United States Patent Application Publication US 2022/0211838 A1 - sequence listing, part 16

SEQ ID NO: 26230 - RNA, 4095 nt, Artificial Sequence
  SARS-CoV-2/Wuhan/WIV05/2019__EPI_ISL_402128 spike protein mRNA gc mod (1-1273)(K986P_V987P_ D614G)
gggaaauaagagagaaaagaagaguaagaagaaauauaagaccccggcgccgccaccauguucguguuucuggugcugcugccccugguguccagccagugugugaaccugaccaccagaacacagcugccuccagccuacaccaacagcuucaccagaggcguguacuaccccgacaagguguucagauccagcgugcugcacucuacccaggaccuguuccugccuuucuucagcaacgugaccugguuccacgccauccacguguccggcaccaauggcaccaagagauucgacaaccccgugcugcccuucaacgacgggguguacuuugccagcaccgagaaguccaacaucaucagaggcuggaucuucggcaccacacuggacagcaagacccagagccugcugaucgugaacaacgccaccaacguggucaucaaagugugcgaguuccaguucugcaacgaccccuuccugggcgucuacuaccacaagaacaacaagagcuggauggaaagcgaguuccggguguacagcagcgccaacaacugcaccuucgaguacgugucccagccuuuccugauggaccuggaaggcaagcagggcaacuucaagaaccugcgcgaguucguguucaagaacaucgacggcuacuucaaaaucuacagcaagcacaccccuaucaaccucgugcgggaucugccucagggcuucucugcucuggaaccccugguggaucugcccaucggcaucaacaucacccgguuucagacacugcuggcccugcacagaagcuaccugacaccuggcgauagcagcagcggauggacagcuggugccgccgcuuacuaugugggcuaccugcagccuagaaccuuccugcugaaguacaacgagaacggcaccaucaccgacgccguggauugugcucuggauccucugagcgagacaaagugcacccugaaguccuucaccguggaaaagggcaucuaccagaccagcaacuuccgggugcagcccaccgaauccaucgugcgguuccccaauaucaccaaucugugccccuucggcgagguguucaaugccaccagauucgccucuguguacgccuggaaccggaagcggaucagcaauugcguggccgacuacuccgugcuguacaacuccgccagcuucagcaccuucaagugcuacggcguguccccuaccaagcugaacgaccugugcuucacaaacguguacgccgacagcuucgugauccggggagaugaagugcggcagauugccccuggacagacaggcaagaucgccgacuacaacuacaagcugcccgacgacuucaccggcugugugauugccuggaacagcaacaaccuggacuccaaagucggcggcaacuacaauuaccuguaccggcuguuccggaaguccaaucugaagcccuucgagcgggacaucagcaccgaaaucuaucaggccggcagcaccccuugcaacggcguggaaggcuucaacugcuacuucccacugcaguccuacggcuuucagcccacaaauggcgugggcuaucagcccuacagagugguggugcugagcuucgaacugcugcaugcuccugccacagugugcggcccuaagaaaagcaccaaucucgugaagaacaaaugcgugaacuucaacuucaacggccugaccggcaccggcgugcugacagagagcaacaagaaguuccugccauuccagcaguuuggccgggauaucgccgauaccacagacgccguuagagauccccagacacuggaaauccuggacaucaccccaugcagcuucggcggagugucugugaucaccccuggcaccaacaccagcaaucagguggcagugcuguaccagggcgugaacuguaccgaagugcccguggccauucacgccgaucagcugacaccuacauggcggguguacuccaccggcagcaauguguuucagaccagagccggcugucugaucggagccgagcacgugaacaauagcuacgagugcgacauccccaucggcgcuggcaucugugccagcuaccagacacagacaaacagccccagacgggcuagaagcguggccagccagagcaucauugccuacacaaugucucugggcgccgagaacagcguggccuacuccaacaacucuaucgcuauccccaccaacuucaccaucagcgugaccaccgagauccugccuguguccaugaccaagaccagcguggacugcaccauguacaucugcggcgauuccaccgagugcuccaaccugcugcugcaguacggcagcuucugcacccagcugaauagagcccugacagggaucgccguggaacaggacaagaacacccaagagguguucgcccaagugaagcaaaucuacaagaccccuccuaucaaggacuucggcggcuucaauuucagccagauucugcccgauccuagcaagcccagcaagcggagcuucaucgaggaccugcuguucaacaaagugacacuggccgacgccggcuucaucaagcaguauggcgauugucugggcgacauugccgccagggaucugauuugcgcccagaaguuuaacggacugacagugcugccuccucugcugaccgaugagaugaucgcccaguacacaucugcccugcuggccggcacaaucacaagcggcuggacauuuggagcuggcgccgcucugcagauccccuuugcuaugcagauggccuaccgguucaacggcaucggagugacccagaaugugcuguacgagaaccagaagcugaucgccaaccaguucaacagcgccaucggcaagauccaggacagccugagcagcacagcaagcgcccugggaaagcugcaggacguggucaaccagaaugcccaggcacugaacacccuggucaagcagcuguccuccaacuucggcgccaucagcucugugcugaacgauauccugagcagacuggacccuccugaggccgaggugcagaucgacagacugaucacaggcagacugcagagccuccagacauacgugacccagcagcugaucagagccgccgagauuagagccucugccaaucuggccgccaccaagaugucugagugugugcugggccagagcaagagaguggacuuuugcggcaagggcuaccaccugaugagcuucccucagucugccccucacggcgugguguuucugcacgugacauaugugcccgcucaagagaagaauuucaccaccgcuccagccaucugccacgacggcaaagcccacuuuccuagagaaggcguguucguguccaacggcacccauugguucgugacacagcggaacuucuacgagccccagaucaucaccaccgacaacaccuucgugucuggcaacugcgacguugugaucggcauugugaacaauaccguguacgacccucugcagcccgagcuggacagcuucaaagaggaacuggacaaguacuuuaagaaccacacaagccccgacguggaccugggcgauaucagcggaaucaaugccagcgucgugaacauccagaaagagaucgaccggcugaacgagguggccaagaaucugaacgagagccugaucgaccugcaagaacuggggaaguacgagcaguacaucaaguggcccugguacaucuggcugggcuuuaucgccggacugauugccaucgugauggucacaaucaugcuguguugcaugaccagcugcuguagcugccugaagggcuguuguagcuguggcagcugcugcaaguucgacgaggacgauucugagcccgugcugaagggcgugaaacugcacuacaccugauaauaggcuggagccucgguggccuagcuucuugccccuugggccuccccccagccccuccuccccuuccugcacccguacccccguggucuuugaauaaagucugagugggcggcaaaaaaaaaaaaaaaaaaaaaaaaaaaaaaaaaaaaaaaaaaaaaaaaaaaaaaaaaaaaaaaaaaaaaaaaaaaaaaaaaaaaaaaaaaaaaaaaaaaa

SEQ ID NO: 26231 - RNA, 4095 nt, Artificial Sequence
  SARS-CoV-2/Wuhan/WIV05/2019__EPI_ISL_402128 spike protein mRNA gc mod (1-1273)(K986P_V987P_A222V_D614G)
gggaaauaagagagaaaagaagaguaagaagaaauauaagaccccggcgccgccaccauguucguguuucuggugcugcugccccugguguccagccagugugugaaccugaccaccagaacacagcugccuccagccuacaccaacagcuucaccagaggcguguacuaccccgacaagguguucagauccagcgugcugcacucuacccaggaccuguuccugccuuucuucagcaacgugaccugguuccacgccauccacguguccggcaccaauggcaccaagagauucgacaaccccgugcugcccuucaacgacgggguguacuuugccagcaccgagaaguccaacaucaucagaggcuggaucuucggcaccacacuggacagcaagacccagagccugcugaucgugaacaacgccaccaacguggucaucaaagugugcgaguuccaguucugcaacgaccccuuccugggcgucuacuaccacaagaacaacaagagcuggauggaaagcgaguuccggguguacagcagcgccaacaacugcaccuucgaguacgugucccagccuuuccugauggaccuggaaggcaagcagggcaacuucaagaaccugcgcgaguucguguucaagaacaucgacggcuacuucaaaaucuacagcaagcacaccccuaucaaccucgugcgggaucugccucagggcuucucugugcuggaaccccugguggaucugcccaucggcaucaacaucacccgguuucagacacugcuggcccugcacagaagcuaccugacaccuggcgauagcagcagcggauggacagcuggugccgccgcuuacuaugugggcuaccugcagccuagaaccuuccugcugaaguacaacgagaacggcaccaucaccgacgccguggauugugcucuggauccucugagcgagacaaagugcacccugaaguccuucaccguggaaaagggcaucuaccagaccagcaacuuccgggugcagcccaccgaauccaucgugcgguuccccaauaucaccaaucugugccccuucggcgagguguucaaugccaccagauucgccucuguguacgccuggaaccggaagcggaucagcaauugcguggccgacuacuccgugcuguacaacuccgccagcuucagcaccuucaagugcuacggcguguccccuaccaagcugaacgaccugugcuucacaaacguguacgccgacagcuucgugauccggggagaugaagugcggcagauugccccuggacagacaggcaagaucgccgacuacaacuacaagcugcccgacgacuucaccggcugugugauugccuggaacagcaacaaccuggacuccaaagucggcggcaacuacaauuaccuguaccggcuguuccggaaguccaaucugaagcccuucgagcgggacaucagcaccgaaaucuaucaggccggcagcaccccuugcaacggcguggaaggcuucaacugcuacuucccacugcaguccuacggcuuucagcccacaaauggcgugggcuaucagcccuacagagugguggugcugagcuucgaacugcugcaugcuccugccacagugugcggcccuaagaaaagcaccaaucucgugaagaacaaaugcgugaacuucaacuucaacggccugaccggcaccggcgugcugacagagagcaacaagaaguuccugccauuccagcaguuuggccgggauaucgccgauaccacagacgccguuagagauccccagacacuggaaauccuggacaucaccccaugcagcuucggcggagugucugugaucaccccuggcaccaacaccagcaaucagguggcagugcuguaccagggcgugaacuguaccgaagugcccguggccauucacgccgaucagcugacaccuacauggcggguguacuccaccggcagcaauguguuucagaccagagccggcugucugaucggagccgagcacgugaacaauagcuacgagugcgacauccccaucggcgcuggcaucugugccagcuaccagacacagacaaacagccccagacgggcuagaagcguggccagccagagcaucauugccuacacaaugucucugggcgccgagaacagcguggccuacuccaacaacucuaucgcuauccccaccaacuucaccaucagcgugaccaccgagauccugccuguguccaugaccaagaccagcguggacugcaccauguacaucugcggcgauuccaccgagugcuccaaccugcugcugcaguacggcagcuucugcacccagcugaauagagcccugacagggaucgccguggaacaggacaagaacacccaagagguguucgcccaagugaagcaaaucuacaagaccccuccuaucaaggacuucggcggcuucaauuucagccagauucugcccgauccuagcaagcccagcaagcggagcuucaucgaggaccugcuguucaacaaagugacacuggccgacgccggcuucaucaagcaguauggcgauugucugggcgacauugccgccagggaucugauuugcgcccagaaguuuaacggacugacagugcugccuccucugcugaccgaugagaugaucgcccaguacacaucugcccugcuggccggcacaaucacaagcggcuggacauuuggagcuggcgccgcucugcagauccccuuugcuaugcagauggccuaccgguucaacggcaucggagugacccagaaugugcuguacgagaaccagaagcugaucgccaaccaguucaacagcgccaucggcaagauccaggacagccugagcagcacagcaagcgcccugggaaagcugcaggacguggucaaccagaaugcccaggcacugaacacccuggucaagcagcuguccuccaacuucggcgccaucagcucugugcugaacgauauccugagcagacuggacccuccugaggccgaggugcagaucgacagacugaucacaggcagacugcagagccuccagacauacgugacccagcagcugaucagagccgccgagauuagagccucugccaaucuggccgccaccaagaugucugagugugugcugggccagagcaagagaguggacuuuugcggcaagggcuaccaccugaugagcuucccucagucugccccucacggcgugguguuucugcacgugacauaugugcccgcucaagagaagaauuucaccaccgcuccagccaucugccacgacggcaaagcccacuuuccuagagaaggcguguucguguccaacggcacccauugguucgugacacagcggaacuucuacgagccccagaucaucaccaccgacaacaccuucgugucuggcaacugcgacguugugaucggcauugugaacaauaccguguacgacccucugcagcccgagcuggacagcuucaaagaggaacuggacaaguacuuuaagaaccacacaagccccgacguggaccugggcgauaucagcggaaucaaugccagcgucgugaacauccagaaagagaucgaccggcugaacgagguggccaagaaucugaacgagagccugaucgaccugcaagaacuggggaaguacgagcaguacaucaaguggcccugguacaucuggcugggcuuuaucgccggacugauugccaucgugauggucacaaucaugcuguguugcaugaccagcugcuguagcugccugaagggcuguuguagcuguggcagcugcugcaaguucgacgaggacgauucugagcccgugcugaagggcgugaaacugcacuacaccugauaauaggcuggagccucgguggccuagcuucuugccccuugggccuccccccagccccuccuccccuuccugcacccguacccccguggucuuugaauaaagucugagugggcggcaaaaaaaaaaaaaaaaaaaaaaaaaaaaaaaaaaaaaaaaaaaaaaaaaaaaaaaaaaaaaaaaaaaaaaaaaaaaaaaaaaaaaaaaaaaaaaaaaaaa

SEQ ID NO: 26232 - RNA, 4095 nt, Artificial Sequence
  SARS-CoV-2/Wuhan/WIV05/2019__EPI_ISL_402128 spike protein mRNA gc mod (1-1273)(K986P_V987P_N439K_D614G)
gggaaauaagagagaaaagaagaguaagaagaaauauaagaccccggcgccgccaccauguucguguuucuggugcugcugccccugguguccagccagugugugaaccugaccaccagaacacagcugccuccagccuacaccaacagcuucaccagaggcguguacuaccccgacaagguguucagauccagcgugcugcacucuacccaggaccuguuccugccuuucuucagcaacgugaccugguuccacgccauccacguguccggcaccaauggcaccaagagauucgacaaccccgugcugcccuucaacgacgggguguacuuugccagcaccgagaaguccaacaucaucagaggcuggaucuucggcaccacacuggacagcaagacccagagccugcugaucgugaacaacgccaccaacguggucaucaaagugugcgaguuccaguucugcaacgaccccuuccugggcgucuacuaccacaagaacaacaagagcuggauggaaagcgaguuccggguguacagcagcgccaacaacugcaccuucgaguacgugucccagccuuuccugauggaccuggaaggcaagcagggcaacuucaagaaccugcgcgaguucguguucaagaacaucgacggcuacuucaaaaucuacagcaagcacaccccuaucaaccucgugcgggaucugccucagggcuucucugcucuggaaccccugguggaucugcccaucggcaucaacaucacccgguuucagacacugcuggcccugcacagaagcuaccugacaccuggcgauagcagcagcggauggacagcuggugccgccgcuuacuaugugggcuaccugcagccuagaaccuuccugcugaaguacaacgagaacggcaccaucaccgacgccguggauugugcucuggauccucugagcgagacaaagugcacccugaaguccuucaccguggaaaagggcaucuaccagaccagcaacuuccgggugcagcccaccgaauccaucgugcgguuccccaauaucaccaaucugugccccuucggcgagguguucaaugccaccagauucgccucuguguacgccuggaaccggaagcggaucagcaauugcguggccgacuacuccgugcuguacaacuccgccagcuucagcaccuucaagugcuacggcguguccccuaccaagcugaacgaccugugcuucacaaacguguacgccgacagcuucgugauccggggagaugaagugcggcagauugccccuggacagacaggcaagaucgccgacuacaacuacaagcugcccgacgacuucaccggcugugugauugccuggaacagcaagaaccuggacuccaaagucggcggcaacuacaauuaccuguaccggcuguuccggaaguccaaucugaagcccuucgagcgggacaucagcaccgaaaucuaucaggccggcagcaccccuugcaacggcguggaaggcuucaacugcuacuucccacugcaguccuacggcuuucagcccacaaauggcgugggcuaucagcccuacagagugguggugcugagcuucgaacugcugcaugcuccugccacagugugcggcccuaagaaaagcaccaaucucgugaagaacaaaugcgugaacuucaacuucaacggccugaccggcaccggcgugcugacagagagcaacaagaaguuccugccauuccagcaguuuggccgggauaucgccgauaccacagacgccguuagagauccccagacacuggaaauccuggacaucaccccaugcagcuucggcggagugucugugaucaccccuggcaccaacaccagcaaucagguggcagugcuguaccagggcgugaacuguaccgaagugcccguggccauucacgccgaucagcugacaccuacauggcggguguacuccaccggcagcaauguguuucagaccagagccggcugucugaucggagccgagcacgugaacaauagcuacgagugcgacauccccaucggcgcuggcaucugugccagcuaccagacacagacaaacagccccagacgggcuagaagcguggccagccagagcaucauugccuacacaaugucucugggcgccgagaacagcguggccuacuccaacaacucuaucgcuauccccaccaacuucaccaucagcgugaccaccgagauccugccuguguccaugaccaagaccagcguggacugcaccauguacaucugcggcgauuccaccgagugcuccaaccugcugcugcaguacggcagcuucugcacccagcugaauagagcccugacagggaucgccguggaacaggacaagaacacccaagagguguucgcccaagugaagcaaaucuacaagaccccuccuaucaaggacuucggcggcuucaauuucagccagauucugcccgauccuagcaagcccagcaagcggagcuucaucgaggaccugcuguucaacaaagugacacuggccgacgccggcuucaucaagcaguauggcgauugucugggcgacauugccgccagggaucugauuugcgcccagaaguuuaacggacugacagugcugccuccucugcugaccgaugagaugaucgcccaguacacaucugcccugcuggccggcacaaucacaagcggcuggacauuuggagcuggcgccgcucugcagauccccuuugcuaugcagauggccuaccgguucaacggcaucggagugacccagaaugugcuguacgagaaccagaagcugaucgccaaccaguucaacagcgccaucggcaagauccaggacagccugagcagcacagcaagcgcccugggaaagcugcaggacguggucaaccagaaugcccaggcacugaacacccuggucaagcagcuguccuccaacuucggcgccaucagcucugugcugaacgauauccugagcagacuggacccuccugaggccgaggugcagaucgacagacugaucacaggcagacugcagagccuccagacauacgugacccagcagcugaucagagccgccgagauuagagccucugccaaucuggccgccaccaagaugucugagugugugcugggccagagcaagagaguggacuuuugcggcaagggcuaccaccugaugagcuucccucagucugccccucacggcgugguguuucugcacgugacauaugugcccgcucaagagaagaauuucaccaccgcuccagccaucugccacgacggcaaagcccacuuuccuagagaaggcguguucguguccaacggcacccauugguucgugacacagcggaacuucuacgagccccagaucaucaccaccgacaacaccuucgugucuggcaacugcgacguugugaucggcauugugaacaauaccguguacgacccucugcagcccgagcuggacagcuucaaagaggaacuggacaaguacuuuaagaaccacacaagccccgacguggaccugggcgauaucagcggaaucaaugccagcgucgugaacauccagaaagagaucgaccggcugaacgagguggccaagaaucugaacgagagccugaucgaccugcaagaacuggggaaguacgagcaguacaucaaguggcccugguacaucuggcugggcuuuaucgccggacugauugccaucgugauggucacaaucaugcuguguugcaugaccagcugcuguagcugccugaagggcuguuguagcuguggcagcugcugcaaguucgacgaggacgauucugagcccgugcugaagggcgugaaacugcacuacaccugauaauaggcuggagccucgguggccuagcuucuugccccuugggccuccccccagccccuccuccccuuccugcacccguacccccguggucuuugaauaaagucugagugggcggcaaaaaaaaaaaaaaaaaaaaaaaaaaaaaaaaaaaaaaaaaaaaaaaaaaaaaaaaaaaaaaaaaaaaaaaaaaaaaaaaaaaaaaaaaaaaaaaaaaaa

SEQ ID NO: 26233 - RNA, 4095 nt, Artificial Sequence
  SARS-CoV-2/Wuhan/WIV05/2019__EPI_ISL_402128 spike protein mRNA gc mod (1-1273)(K986P_V987P_S477N_D614G)
gggaaauaagagagaaaagaagaguaagaagaaauauaagaccccggcgccgccaccauguucguguuucuggugcugcugccccugguguccagccagugugugaaccugaccaccagaacacagcugccuccagccuacaccaacagcuucaccagaggcguguacuaccccgacaagguguucagauccagcgugcugcacucuacccaggaccuguuccugccuuucuucagcaacgugaccugguuccacgccauccacguguccggcaccaauggcaccaagagauucgacaaccccgugcugcccuucaacgacgggguguacuuugccagcaccgagaaguccaacaucaucagaggcuggaucuucggcaccacacuggacagcaagacccagagccugcugaucgugaacaacgccaccaacguggucaucaaagugugcgaguuccaguucugcaacgaccccuuccugggcgucuacuaccacaagaacaacaagagcuggauggaaagcgaguuccggguguacagcagcgccaacaacugcaccuucgaguacgugucccagccuuuccugauggaccuggaaggcaagcagggcaacuucaagaaccugcgcgaguucguguucaagaacaucgacggcuacuucaaaaucuacagcaagcacaccccuaucaaccucgugcgggaucugccucagggcuucucugcucuggaaccccugguggaucugcccaucggcaucaacaucacccgguuucagacacugcuggcccugcacagaagcuaccugacaccuggcgauagcagcagcggauggacagcuggugccgccgcuuacuaugugggcuaccugcagccuagaaccuuccugcugaaguacaacgagaacggcaccaucaccgacgccguggauugugcucuggauccucugagcgagacaaagugcacccugaaguccuucaccguggaaaagggcaucuaccagaccagcaacuuccgggugcagcccaccgaauccaucgugcgguuccccaauaucaccaaucugugccccuucggcgagguguucaaugccaccagauucgccucuguguacgccuggaaccggaagcggaucagcaauugcguggccgacuacuccgugcuguacaacuccgccagcuucagcaccuucaagugcuacggcguguccccuaccaagcugaacgaccugugcuucacaaacguguacgccgacagcuucgugauccggggagaugaagugcggcagauugccccuggacagacaggcaagaucgccgacuacaacuacaagcugcccgacgacuucaccggcugugugauugccuggaacagcaacaaccuggacuccaaagucggcggcaacuacaauuaccuguaccggcuguuccggaaguccaaucugaagcccuucgagcgggacaucagcaccgaaaucuaucaggccggcaacaccccuugcaacggcguggaaggcuucaacugcuacuucccacugcaguccuacggcuuucagcccacaaauggcgugggcuaucagcccuacagagugguggugcugagcuucgaacugcugcaugcuccugccacagugugcggcccuaagaaaagcaccaaucucgugaagaacaaaugcgugaacuucaacuucaacggccugaccggcaccggcgugcugacagagagcaacaagaaguuccugccauuccagcaguuuggccgggauaucgccgauaccacagacgccguuagagauccccagacacuggaaauccuggacaucaccccaugcagcuucggcggagugucugugaucaccccuggcaccaacaccagcaaucagguggcagugcuguaccagggcgugaacuguaccgaagugcccguggccauucacgccgaucagcugacaccuacauggcggguguacuccaccggcagcaauguguuucagaccagagccggcugucugaucggagccgagcacgugaacaauagcuacgagugcgacauccccaucggcgcuggcaucugugccagcuaccagacacagacaaacagccccagacgggcuagaagcguggccagccagagcaucauugccuacacaaugucucugggcgccgagaacagcguggccuacuccaacaacucuaucgcuauccccaccaacuucaccaucagcgugaccaccgagauccugccuguguccaugaccaagaccagcguggacugcaccauguacaucugcggcgauuccaccgagugcuccaaccugcugcugcaguacggcagcuucugcacccagcugaauagagcccugacagggaucgccguggaacaggacaagaacacccaagagguguucgcccaagugaagcaaaucuacaagaccccuccuaucaaggacuucggcggcuucaauuucagccagauucugcccgauccuagcaagcccagcaagcggagcuucaucgaggaccugcuguucaacaaagugacacuggccgacgccggcuucaucaagcaguauggcgauugucugggcgacauugccgccagggaucugauuugcgcccagaaguuuaacggacugacagugcugccuccucugcugaccgaugagaugaucgcccaguacacaucugcccugcuggccggcacaaucacaagcggcuggacauuuggagcuggcgccgcucugcagauccccuuugcuaugcagauggccuaccgguucaacggcaucggagugacccagaaugugcuguacgagaaccagaagcugaucgccaaccaguucaacagcgccaucggcaagauccaggacagccugagcagcacagcaagcgcccugggaaagcugcaggacguggucaaccagaaugcccaggcacugaacacccuggucaagcagcuguccuccaacuucggcgccaucagcucugugcugaacgauauccugagcagacuggacccuccugaggccgaggugcagaucgacagacugaucacaggcagacugcagagccuccagacauacgugacccagcagcugaucagagccgccgagauuagagccucugccaaucuggccgccaccaagaugucugagugugugcugggccagagcaagagaguggacuuuugcggcaagggcuaccaccugaugagcuucccucagucugccccucacggcgugguguuucugcacgugacauaugugcccgcucaagagaagaauuucaccaccgcuccagccaucugccacgacggcaaagcccacuuuccuagagaaggcguguucguguccaacggcacccauugguucgugacacagcggaacuucuacgagccccagaucaucaccaccgacaacaccuucgugucuggcaacugcgacguugugaucggcauugugaacaauaccguguacgacccucugcagcccgagcuggacagcuucaaagaggaacuggacaaguacuuuaagaaccacacaagccccgacguggaccugggcgauaucagcggaaucaaugccagcgucgugaacauccagaaagagaucgaccggcugaacgagguggccaagaaucugaacgagagccugaucgaccugcaagaacuggggaaguacgagcaguacaucaaguggcccugguacaucuggcugggcuuuaucgccggacugauugccaucgugauggucacaaucaugcuguguugcaugaccagcugcuguagcugccugaagggcuguuguagcuguggcagcugcugcaaguucgacgaggacgauucugagcccgugcugaagggcgugaaacugcacuacaccugauaauaggcuggagccucgguggccuagcuucuugccccuugggccuccccccagccccuccuccccuuccugcacccguacccccguggucuuugaauaaagucugagugggcggcaaaaaaaaaaaaaaaaaaaaaaaaaaaaaaaaaaaaaaaaaaaaaaaaaaaaaaaaaaaaaaaaaaaaaaaaaaaaaaaaaaaaaaaaaaaaaaaaaaaa

SEQ ID NO: 26234 - RNA, 4095 nt, Artificial Sequence
  SARS-CoV-2/Wuhan/WIV05/2019__EPI_ISL_402128 spike protein mRNA gc mod (1-1273)(K986P_V987P_N501Y_D614G)
gggaaauaagagagaaaagaagaguaagaagaaauauaagaccccggcgccgccaccauguucguguuucuggugcugcugccccugguguccagccagugugugaaccugaccaccagaacacagcugccuccagccuacaccaacagcuucaccagaggcguguacuaccccgacaagguguucagauccagcgugcugcacucuacccaggaccuguuccugccuuucuucagcaacgugaccugguuccacgccauccacguguccggcaccaauggcaccaagagauucgacaaccccgugcugcccuucaacgacgggguguacuuugccagcaccgagaaguccaacaucaucagaggcuggaucuucggcaccacacuggacagcaagacccagagccugcugaucgugaacaacgccaccaacguggucaucaaagugugcgaguuccaguucugcaacgaccccuuccugggcgucuacuaccacaagaacaacaagagcuggauggaaagcgaguuccggguguacagcagcgccaacaacugcaccuucgaguacgugucccagccuuuccugauggaccuggaaggcaagcagggcaacuucaagaaccugcgcgaguucguguucaagaacaucgacggcuacuucaaaaucuacagcaagcacaccccuaucaaccucgugcgggaucugccucagggcuucucugcucuggaaccccugguggaucugcccaucggcaucaacaucacccgguuucagacacugcuggcccugcacagaagcuaccugacaccuggcgauagcagcagcggauggacagcuggugccgccgcuuacuaugugggcuaccugcagccuagaaccuuccugcugaaguacaacgagaacggcaccaucaccgacgccguggauugugcucuggauccucugagcgagacaaagugcacccugaaguccuucaccguggaaaagggcaucuaccagaccagcaacuuccgggugcagcccaccgaauccaucgugcgguuccccaauaucaccaaucugugccccuucggcgagguguucaaugccaccagauucgccucuguguacgccuggaaccggaagcggaucagcaauugcguggccgacuacuccgugcuguacaacuccgccagcuucagcaccuucaagugcuacggcguguccccuaccaagcugaacgaccugugcuucacaaacguguacgccgacagcuucgugauccggggagaugaagugcggcagauugccccuggacagacaggcaagaucgccgacuacaacuacaagcugcccgacgacuucaccggcugugugauugccuggaacagcaacaaccuggacuccaaagucggcggcaacuacaauuaccuguaccggcuguuccggaaguccaaucugaagcccuucgagcgggacaucagcaccgaaaucuaucaggccggcagcaccccuugcaacggcguggaaggcuucaacugcuacuucccacugcaguccuacggcuuucagcccacauacggcgugggcuaucagcccuacagagugguggugcugagcuucgaacugcugcaugcuccugccacagugugcggcccuaagaaaagcaccaaucucgugaagaacaaaugcgugaacuucaacuucaacggccugaccggcaccggcgugcugacagagagcaacaagaaguuccugccauuccagcaguuuggccgggauaucgccgauaccacagacgccguuagagauccccagacacuggaaauccuggacaucaccccaugcagcuucggcggagugucugugaucaccccuggcaccaacaccagcaaucagguggcagugcuguaccagggcgugaacuguaccgaagugcccguggccauucacgccgaucagcugacaccuacauggcggguguacuccaccggcagcaauguguuucagaccagagccggcugucugaucggagccgagcacgugaacaauagcuacgagugcgacauccccaucggcgcuggcaucugugccagcuaccagacacagacaaacagccccagacgggcuagaagcguggccagccagagcaucauugccuacacaaugucucugggcgccgagaacagcguggccuacuccaacaacucuaucgcuauccccaccaacuucaccaucagcgugaccaccgagauccugccuguguccaugaccaagaccagcguggacugcaccauguacaucugcggcgauuccaccgagugcuccaaccugcugcugcaguacggcagcuucugcacccagcugaauagagcccugacagggaucgccguggaacaggacaagaacacccaagagguguucgcccaagugaagcaaaucuacaagaccccuccuaucaaggacuucggcggcuucaauuucagccagauucugcccgauccuagcaagcccagcaagcggagcuucaucgaggaccugcuguucaacaaagugacacuggccgacgccggcuucaucaagcaguauggcgauugucugggcgacauugccgccagggaucugauuugcgcccagaaguuuaacggacugacagugcugccuccucugcugaccgaugagaugaucgcccaguacacaucugcccugcuggccggcacaaucacaagcggcuggacauuuggagcuggcgccgcucugcagauccccuuugcuaugcagauggccuaccgguucaacggcaucggagugacccagaaugugcuguacgagaaccagaagcugaucgccaaccaguucaacagcgccaucggcaagauccaggacagccugagcagcacagcaagcgcccugggaaagcugcaggacguggucaaccagaaugcccaggcacugaacacccuggucaagcagcuguccuccaacuucggcgccaucagcucugugcugaacgauauccugagcagacuggacccuccugaggccgaggugcagaucgacagacugaucacaggcagacugcagagccuccagacauacgugacccagcagcugaucagagccgccgagauuagagccucugccaaucuggccgccaccaagaugucugagugugugcugggccagagcaagagaguggacuuuugcggcaagggcuaccaccugaugagcuucccucagucugccccucacggcgugguguuucugcacgugacauaugugcccgcucaagagaagaauuucaccaccgcuccagccaucugccacgacggcaaagcccacuuuccuagagaaggcguguucguguccaacggcacccauugguucgugacacagcggaacuucuacgagccccagaucaucaccaccgacaacaccuucgugucuggcaacugcgacguugugaucggcauugugaacaauaccguguacgacccucugcagcccgagcuggacagcuucaaagaggaacuggacaaguacuuuaagaaccacacaagccccgacguggaccugggcgauaucagcggaaucaaugccagcgucgugaacauccagaaagagaucgaccggcugaacgagguggccaagaaucugaacgagagccugaucgaccugcaagaacuggggaaguacgagcaguacaucaaguggcccugguacaucuggcugggcuuuaucgccggacugauugccaucgugauggucacaaucaugcuguguugcaugaccagcugcuguagcugccugaagggcuguuguagcuguggcagcugcugcaaguucgacgaggacgauucugagcccgugcugaagggcgugaaacugcacuacaccugauaauaggcuggagccucgguggccuagcuucuugccccuugggccuccccccagccccuccuccccuuccugcacccguacccccguggucuuugaauaaagucugagugggcggcaaaaaaaaaaaaaaaaaaaaaaaaaaaaaaaaaaaaaaaaaaaaaaaaaaaaaaaaaaaaaaaaaaaaaaaaaaaaaaaaaaaaaaaaaaaaaaaaaaaa

SEQ ID NO: 26235 - RNA, 4089 nt, Artificial Sequence
  SARS-CoV-2/Wuhan/WIV05/2019__EPI_ISL_402128 spike protein mRNA gc mod (1-1273)(K986P_V987P_H69del_V70del_D614G)
gggaaauaagagagaaaagaagaguaagaagaaauauaagaccccggcgccgccaccauguucguguuucuggugcugcugccccugguguccagccagugugugaaccugaccaccagaacacagcugccuccagccuacaccaacagcuucaccagaggcguguacuaccccgacaagguguucagauccagcgugcugcacucuacccaggaccuguuccugccuuucuucagcaacgugaccugguuccacgccaucuccggcaccaauggcaccaagagauucgacaaccccgugcugcccuucaacgacgggguguacuuugccagcaccgagaaguccaacaucaucagaggcuggaucuucggcaccacacuggacagcaagacccagagccugcugaucgugaacaacgccaccaacguggucaucaaagugugcgaguuccaguucugcaacgaccccuuccugggcgucuacuaccacaagaacaacaagagcuggauggaaagcgaguuccggguguacagcagcgccaacaacugcaccuucgaguacgugucccagccuuuccugauggaccuggaaggcaagcagggcaacuucaagaaccugcgcgaguucguguucaagaacaucgacggcuacuucaaaaucuacagcaagcacaccccuaucaaccucgugcgggaucugccucagggcuucucugcucuggaaccccugguggaucugcccaucggcaucaacaucacccgguuucagacacugcuggcccugcacagaagcuaccugacaccuggcgauagcagcagcggauggacagcuggugccgccgcuuacuaugugggcuaccugcagccuagaaccuuccugcugaaguacaacgagaacggcaccaucaccgacgccguggauugugcucuggauccucugagcgagacaaagugcacccugaaguccuucaccguggaaaagggcaucuaccagaccagcaacuuccgggugcagcccaccgaauccaucgugcgguuccccaauaucaccaaucugugccccuucggcgagguguucaaugccaccagauucgccucuguguacgccuggaaccggaagcggaucagcaauugcguggccgacuacuccgugcuguacaacuccgccagcuucagcaccuucaagugcuacggcguguccccuaccaagcugaacgaccugugcuucacaaacguguacgccgacagcuucgugauccggggagaugaagugcggcagauugccccuggacagacaggcaagaucgccgacuacaacuacaagcugcccgacgacuucaccggcugugugauugccuggaacagcaacaaccuggacuccaaagucggcggcaacuacaauuaccuguaccggcuguuccggaaguccaaucugaagcccuucgagcgggacaucagcaccgaaaucuaucaggccggcagcaccccuugcaacggcguggaaggcuucaacugcuacuucccacugcaguccuacggcuuucagcccacaaauggcgugggcuaucagcccuacagagugguggugcugagcuucgaacugcugcaugcuccugccacagugugcggcccuaagaaaagcaccaaucucgugaagaacaaaugcgugaacuucaacuucaacggccugaccggcaccggcgugcugacagagagcaacaagaaguuccugccauuccagcaguuuggccgggauaucgccgauaccacagacgccguuagagauccccagacacuggaaauccuggacaucaccccaugcagcuucggcggagugucugugaucaccccuggcaccaacaccagcaaucagguggcagugcuguaccagggcgugaacuguaccgaagugcccguggccauucacgccgaucagcugacaccuacauggcggguguacuccaccggcagcaauguguuucagaccagagccggcugucugaucggagccgagcacgugaacaauagcuacgagugcgacauccccaucggcgcuggcaucugugccagcuaccagacacagacaaacagccccagacgggcuagaagcguggccagccagagcaucauugccuacacaaugucucugggcgccgagaacagcguggccuacuccaacaacucuaucgcuauccccaccaacuucaccaucagcgugaccaccgagauccugccuguguccaugaccaagaccagcguggacugcaccauguacaucugcggcgauuccaccgagugcuccaaccugcugcugcaguacggcagcuucugcacccagcugaauagagcccugacagggaucgccguggaacaggacaagaacacccaagagguguucgcccaagugaagcaaaucuacaagaccccuccuaucaaggacuucggcggcuucaauuucagccagauucugcccgauccuagcaagcccagcaagcggagcuucaucgaggaccugcuguucaacaaagugacacuggccgacgccggcuucaucaagcaguauggcgauugucugggcgacauugccgccagggaucugauuugcgcccagaaguuuaacggacugacagugcugccuccucugcugaccgaugagaugaucgcccaguacacaucugcccugcuggccggcacaaucacaagcggcuggacauuuggagcuggcgccgcucugcagauccccuuugcuaugcagauggccuaccgguucaacggcaucggagugacccagaaugugcuguacgagaaccagaagcugaucgccaaccaguucaacagcgccaucggcaagauccaggacagccugagcagcacagcaagcgcccugggaaagcugcaggacguggucaaccagaaugcccaggcacugaacacccuggucaagcagcuguccuccaacuucggcgccaucagcucugugcugaacgauauccugagcagacuggacccuccugaggccgaggugcagaucgacagacugaucacaggcagacugcagagccuccagacauacgugacccagcagcugaucagagccgccgagauuagagccucugccaaucuggccgccaccaagaugucugagugugugcugggccagagcaagagaguggacuuuugcggcaagggcuaccaccugaugagcuucccucagucugccccucacggcgugguguuucugcacgugacauaugugcccgcucaagagaagaauuucaccaccgcuccagccaucugccacgacggcaaagcccacuuuccuagagaaggcguguucguguccaacggcacccauugguucgugacacagcggaacuucuacgagccccagaucaucaccaccgacaacaccuucgugucuggcaacugcgacguugugaucggcauugugaacaauaccguguacgacccucugcagcccgagcuggacagcuucaaagaggaacuggacaaguacuuuaagaaccacacaagccccgacguggaccugggcgauaucagcggaaucaaugccagcgucgugaacauccagaaagagaucgaccggcugaacgagguggccaagaaucugaacgagagccugaucgaccugcaagaacuggggaaguacgagcaguacaucaaguggcccugguacaucuggcugggcuuuaucgccggacugauugccaucgugauggucacaaucaugcuguguugcaugaccagcugcuguagcugccugaagggcuguuguagcuguggcagcugcugcaaguucgacgaggacgauucugagcccgugcugaagggcgugaaacugcacuacaccugauaauaggcuggagccucgguggccuagcuucuugccccuugggccuccccccagccccuccuccccuuccugcacccguacccccguggucuuugaauaaagucugagugggcggcaaaaaaaaaaaaaaaaaaaaaaaaaaaaaaaaaaaaaaaaaaaaaaaaaaaaaaaaaaaaaaaaaaaaaaaaaaaaaaaaaaaaaaaaaaaaaaaaaaaa

SEQ ID NO: 26236 - RNA, 4095 nt, Artificial Sequence
  SARS-CoV-2/Wuhan/WIV05/2019__EPI_ISL_402128 spike protein mRNA gc mod (1-1273)(K986P_V987P_Y453F_D614G)
gggaaauaagagagaaaagaagaguaagaagaaauauaagaccccggcgccgccaccauguucguguuucuggugcugcugccccugguguccagccagugugugaaccugaccaccagaacacagcugccuccagccuacaccaacagcuucaccagaggcguguacuaccccgacaagguguucagauccagcgugcugcacucuacccaggaccuguuccugccuuucuucagcaacgugaccugguuccacgccauccacguguccggcaccaauggcaccaagagauucgacaaccccgugcugcccuucaacgacgggguguacuuugccagcaccgagaaguccaacaucaucagaggcuggaucuucggcaccacacuggacagcaagacccagagccugcugaucgugaacaacgccaccaacguggucaucaaagugugcgaguuccaguucugcaacgaccccuuccugggcgucuacuaccacaagaacaacaagagcuggauggaaagcgaguuccggguguacagcagcgccaacaacugcaccuucgaguacgugucccagccuuuccugauggaccuggaaggcaagcagggcaacuucaagaaccugcgcgaguucguguucaagaacaucgacggcuacuucaaaaucuacagcaagcacaccccuaucaaccucgugcgggaucugccucagggcuucucugcucuggaaccccugguggaucugcccaucggcaucaacaucacccgguuucagacacugcuggcccugcacagaagcuaccugacaccuggcgauagcagcagcggauggacagcuggugccgccgcuuacuaugugggcuaccugcagccuagaaccuuccugcugaaguacaacgagaacggcaccaucaccgacgccguggauugugcucuggauccucugagcgagacaaagugcacccugaaguccuucaccguggaaaagggcaucuaccagaccagcaacuuccgggugcagcccaccgaauccaucgugcgguuccccaauaucaccaaucugugccccuucggcgagguguucaaugccaccagauucgccucuguguacgccuggaaccggaagcggaucagcaauugcguggccgacuacuccgugcuguacaacuccgccagcuucagcaccuucaagugcuacggcguguccccuaccaagcugaacgaccugugcuucacaaacguguacgccgacagcuucgugauccggggagaugaagugcggcagauugccccuggacagacaggcaagaucgccgacuacaacuacaagcugcccgacgacuucaccggcugugugauugccuggaacagcaacaaccuggacuccaaagucggcggcaacuacaauuaccuguuccggcuguuccggaaguccaaucugaagcccuucgagcgggacaucagcaccgaaaucuaucaggccggcagcaccccuugcaacggcguggaaggcuucaacugcuacuucccacugcaguccuacggcuuucagcccacaaauggcgugggcuaucagcccuacagagugguggugcugagcuucgaacugcugcaugcuccugccacagugugcggcccuaagaaaagcaccaaucucgugaagaacaaaugcgugaacuucaacuucaacggccugaccggcaccggcgugcugacagagagcaacaagaaguuccugccauuccagcaguuuggccgggauaucgccgauaccacagacgccguuagagauccccagacacuggaaauccuggacaucaccccaugcagcuucggcggagugucugugaucaccccuggcaccaacaccagcaaucagguggcagugcuguaccagggcgugaacuguaccgaagugcccguggccauucacgccgaucagcugacaccuacauggcggguguacuccaccggcagcaauguguuucagaccagagccggcugucugaucggagccgagcacgugaacaauagcuacgagugcgacauccccaucggcgcuggcaucugugccagcuaccagacacagacaaacagccccagacgggcuagaagcguggccagccagagcaucauugccuacacaaugucucugggcgccgagaacagcguggccuacuccaacaacucuaucgcuauccccaccaacuucaccaucagcgugaccaccgagauccugccuguguccaugaccaagaccagcguggacugcaccauguacaucugcggcgauuccaccgagugcuccaaccugcugcugcaguacggcagcuucugcacccagcugaauagagcccugacagggaucgccguggaacaggacaagaacacccaagagguguucgcccaagugaagcaaaucuacaagaccccuccuaucaaggacuucggcggcuucaauuucagccagauucugcccgauccuagcaagcccagcaagcggagcuucaucgaggaccugcuguucaacaaagugacacuggccgacgccggcuucaucaagcaguauggcgauugucugggcgacauugccgccagggaucugauuugcgcccagaaguuuaacggacugacagugcugccuccucugcugaccgaugagaugaucgcccaguacacaucugcccugcuggccggcacaaucacaagcggcuggacauuuggagcuggcgccgcucugcagauccccuuugcuaugcagauggccuaccgguucaacggcaucggagugacccagaaugugcuguacgagaaccagaagcugaucgccaaccaguucaacagcgccaucggcaagauccaggacagccugagcagcacagcaagcgcccugggaaagcugcaggacguggucaaccagaaugcccaggcacugaacacccuggucaagcagcuguccuccaacuucggcgccaucagcucugugcugaacgauauccugagcagacuggacccuccugaggccgaggugcagaucgacagacugaucacaggcagacugcagagccuccagacauacgugacccagcagcugaucagagccgccgagauuagagccucugccaaucuggccgccaccaagaugucugagugugugcugggccagagcaagagaguggacuuuugcggcaagggcuaccaccugaugagcuucccucagucugccccucacggcgugguguuucugcacgugacauaugugcccgcucaagagaagaauuucaccaccgcuccagccaucugccacgacggcaaagcccacuuuccuagagaaggcguguucguguccaacggcacccauugguucgugacacagcggaacuucuacgagccccagaucaucaccaccgacaacaccuucgugucuggcaacugcgacguugugaucggcauugugaacaauaccguguacgacccucugcagcccgagcuggacagcuucaaagaggaacuggacaaguacuuuaagaaccacacaagccccgacguggaccugggcgauaucagcggaaucaaugccagcgucgugaacauccagaaagagaucgaccggcugaacgagguggccaagaaucugaacgagagccugaucgaccugcaagaacuggggaaguacgagcaguacaucaaguggcccugguacaucuggcugggcuuuaucgccggacugauugccaucgugauggucacaaucaugcuguguugcaugaccagcugcuguagcugccugaagggcuguuguagcuguggcagcugcugcaaguucgacgaggacgauucugagcccgugcugaagggcgugaaacugcacuacaccugauaauaggcuggagccucgguggccuagcuucuugccccuugggccuccccccagccccuccuccccuuccugcacccguacccccguggucuuugaauaaagucugagugggcggcaaaaaaaaaaaaaaaaaaaaaaaaaaaaaaaaaaaaaaaaaaaaaaaaaaaaaaaaaaaaaaaaaaaaaaaaaaaaaaaaaaaaaaaaaaaaaaaaaaaa

SEQ ID NO: 26237 - RNA, 4095 nt, Artificial Sequence
  SARS-CoV-2/Wuhan/WIV05/2019__EPI_ISL_402128 spike protein mRNA gc mod (1-1273)(K986P_V987P_D614G_I692V)
gggaaauaagagagaaaagaagaguaagaagaaauauaagaccccggcgccgccaccauguucguguuucuggugcugcugccccugguguccagccagugugugaaccugaccaccagaacacagcugccuccagccuacaccaacagcuucaccagaggcguguacuaccccgacaagguguucagauccagcgugcugcacucuacccaggaccuguuccugccuuucuucagcaacgugaccugguuccacgccauccacguguccggcaccaauggcaccaagagauucgacaaccccgugcugcccuucaacgacgggguguacuuugccagcaccgagaaguccaacaucaucagaggcuggaucuucggcaccacacuggacagcaagacccagagccugcugaucgugaacaacgccaccaacguggucaucaaagugugcgaguuccaguucugcaacgaccccuuccugggcgucuacuaccacaagaacaacaagagcuggauggaaagcgaguuccggguguacagcagcgccaacaacugcaccuucgaguacgugucccagccuuuccugauggaccuggaaggcaagcagggcaacuucaagaaccugcgcgaguucguguucaagaacaucgacggcuacuucaaaaucuacagcaagcacaccccuaucaaccucgugcgggaucugccucagggcuucucugcucuggaaccccugguggaucugcccaucggcaucaacaucacccgguuucagacacugcuggcccugcacagaagcuaccugacaccuggcgauagcagcagcggauggacagcuggugccgccgcuuacuaugugggcuaccugcagccuagaaccuuccugcugaaguacaacgagaacggcaccaucaccgacgccguggauugugcucuggauccucugagcgagacaaagugcacccugaaguccuucaccguggaaaagggcaucuaccagaccagcaacuuccgggugcagcccaccgaauccaucgugcgguuccccaauaucaccaaucugugccccuucggcgagguguucaaugccaccagauucgccucuguguacgccuggaaccggaagcggaucagcaauugcguggccgacuacuccgugcuguacaacuccgccagcuucagcaccuucaagugcuacggcguguccccuaccaagcugaacgaccugugcuucacaaacguguacgccgacagcuucgugauccggggagaugaagugcggcagauugccccuggacagacaggcaagaucgccgacuacaacuacaagcugcccgacgacuucaccggcugugugauugccuggaacagcaacaaccuggacuccaaagucggcggcaacuacaauuaccuguaccggcuguuccggaaguccaaucugaagcccuucgagcgggacaucagcaccgaaaucuaucaggccggcagcaccccuugcaacggcguggaaggcuucaacugcuacuucccacugcaguccuacggcuuucagcccacaaauggcgugggcuaucagcccuacagagugguggugcugagcuucgaacugcugcaugcuccugccacagugugcggcccuaagaaaagcaccaaucucgugaagaacaaaugcgugaacuucaacuucaacggccugaccggcaccggcgugcugacagagagcaacaagaaguuccugccauuccagcaguuuggccgggauaucgccgauaccacagacgccguuagagauccccagacacuggaaauccuggacaucaccccaugcagcuucggcggagugucugugaucaccccuggcaccaacaccagcaaucagguggcagugcuguaccagggcgugaacuguaccgaagugcccguggccauucacgccgaucagcugacaccuacauggcggguguacuccaccggcagcaauguguuucagaccagagccggcugucugaucggagccgagcacgugaacaauagcuacgagugcgacauccccaucggcgcuggcaucugugccagcuaccagacacagacaaacagccccagacgggcuagaagcguggccagccagagcgugauugccuacacaaugucucugggcgccgagaacagcguggccuacuccaacaacucuaucgcuauccccaccaacuucaccaucagcgugaccaccgagauccugccuguguccaugaccaagaccagcguggacugcaccauguacaucugcggcgauuccaccgagugcuccaaccugcugcugcaguacggcagcuucugcacccagcugaauagagcccugacagggaucgccguggaacaggacaagaacacccaagagguguucgcccaagugaagcaaaucuacaagaccccuccuaucaaggacuucggcggcuucaauuucagccagauucugcccgauccuagcaagcccagcaagcggagcuucaucgaggaccugcuguucaacaaagugacacuggccgacgccggcuucaucaagcaguauggcgauugucugggcgacauugccgccagggaucugauuugcgcccagaaguuuaacggacugacagugcugccuccucugcugaccgaugagaugaucgcccaguacacaucugcccugcuggccggcacaaucacaagcggcuggacauuuggagcuggcgccgcucugcagauccccuuugcuaugcagauggccuaccgguucaacggcaucggagugacccagaaugugcuguacgagaaccagaagcugaucgccaaccaguucaacagcgccaucggcaagauccaggacagccugagcagcacagcaagcgcccugggaaagcugcaggacguggucaaccagaaugcccaggcacugaacacccuggucaagcagcuguccuccaacuucggcgccaucagcucugugcugaacgauauccugagcagacuggacccuccugaggccgaggugcagaucgacagacugaucacaggcagacugcagagccuccagacauacgugacccagcagcugaucagagccgccgagauuagagccucugccaaucuggccgccaccaagaugucugagugugugcugggccagagcaagagaguggacuuuugcggcaagggcuaccaccugaugagcuucccucagucugccccucacggcgugguguuucugcacgugacauaugugcccgcucaagagaagaauuucaccaccgcuccagccaucugccacgacggcaaagcccacuuuccuagagaaggcguguucguguccaacggcacccauugguucgugacacagcggaacuucuacgagccccagaucaucaccaccgacaacaccuucgugucuggcaacugcgacguugugaucggcauugugaacaauaccguguacgacccucugcagcccgagcuggacagcuucaaagaggaacuggacaaguacuuuaagaaccacacaagccccgacguggaccugggcgauaucagcggaaucaaugccagcgucgugaacauccagaaagagaucgaccggcugaacgagguggccaagaaucugaacgagagccugaucgaccugcaagaacuggggaaguacgagcaguacaucaaguggcccugguacaucuggcugggcuuuaucgccggacugauugccaucgugauggucacaaucaugcuguguugcaugaccagcugcuguagcugccugaagggcuguuguagcuguggcagcugcugcaaguucgacgaggacgauucugagcccgugcugaagggcgugaaacugcacuacaccugauaauaggcuggagccucgguggccuagcuucuugccccuugggccuccccccagccccuccuccccuuccugcacccguacccccguggucuuugaauaaagucugagugggcggcaaaaaaaaaaaaaaaaaaaaaaaaaaaaaaaaaaaaaaaaaaaaaaaaaaaaaaaaaaaaaaaaaaaaaaaaaaaaaaaaaaaaaaaaaaaaaaaaaaaa

SEQ ID NO: 26238 - RNA, 4095 nt, Artificial Sequence
  SARS-CoV-2/Wuhan/WIV05/2019__EPI_ISL_402128 spike protein mRNA gc mod (1-1273)(K986P_V987P_D614G_M1229I)
gggaaauaagagagaaaagaagaguaagaagaaauauaagaccccggcgccgccaccauguucguguuucuggugcugcugccccugguguccagccagugugugaaccugaccaccagaacacagcugccuccagccuacaccaacagcuucaccagaggcguguacuaccccgacaagguguucagauccagcgugcugcacucuacccaggaccuguuccugccuuucuucagcaacgugaccugguuccacgccauccacguguccggcaccaauggcaccaagagauucgacaaccccgugcugcccuucaacgacgggguguacuuugccagcaccgagaaguccaacaucaucagaggcuggaucuucggcaccacacuggacagcaagacccagagccugcugaucgugaacaacgccaccaacguggucaucaaagugugcgaguuccaguucugcaacgaccccuuccugggcgucuacuaccacaagaacaacaagagcuggauggaaagcgaguuccggguguacagcagcgccaacaacugcaccuucgaguacgugucccagccuuuccugauggaccuggaaggcaagcagggcaacuucaagaaccugcgcgaguucguguucaagaacaucgacggcuacuucaaaaucuacagcaagcacaccccuaucaaccucgugcgggaucugccucagggcuucucugcucuggaaccccugguggaucugcccaucggcaucaacaucacccgguuucagacacugcuggcccugcacagaagcuaccugacaccuggcgauagcagcagcggauggacagcuggugccgccgcuuacuaugugggcuaccugcagccuagaaccuuccugcugaaguacaacgagaacggcaccaucaccgacgccguggauugugcucuggauccucugagcgagacaaagugcacccugaaguccuucaccguggaaaagggcaucuaccagaccagcaacuuccgggugcagcccaccgaauccaucgugcgguuccccaauaucaccaaucugugccccuucggcgagguguucaaugccaccagauucgccucuguguacgccuggaaccggaagcggaucagcaauugcguggccgacuacuccgugcuguacaacuccgccagcuucagcaccuucaagugcuacggcguguccccuaccaagcugaacgaccugugcuucacaaacguguacgccgacagcuucgugauccggggagaugaagugcggcagauugccccuggacagacaggcaagaucgccgacuacaacuacaagcugcccgacgacuucaccggcugugugauugccuggaacagcaacaaccuggacuccaaagucggcggcaacuacaauuaccuguaccggcuguuccggaaguccaaucugaagcccuucgagcgggacaucagcaccgaaaucuaucaggccggcagcaccccuugcaacggcguggaaggcuucaacugcuacuucccacugcaguccuacggcuuucagcccacaaauggcgugggcuaucagcccuacagagugguggugcugagcuucgaacugcugcaugcuccugccacagugugcggcccuaagaaaagcaccaaucucgugaagaacaaaugcgugaacuucaacuucaacggccugaccggcaccggcgugcugacagagagcaacaagaaguuccugccauuccagcaguuuggccgggauaucgccgauaccacagacgccguuagagauccccagacacuggaaauccuggacaucaccccaugcagcuucggcggagugucugugaucaccccuggcaccaacaccagcaaucagguggcagugcuguaccagggcgugaacuguaccgaagugcccguggccauucacgccgaucagcugacaccuacauggcggguguacuccaccggcagcaauguguuucagaccagagccggcugucugaucggagccgagcacgugaacaauagcuacgagugcgacauccccaucggcgcuggcaucugugccagcuaccagacacagacaaacagccccagacgggcuagaagcguggccagccagagcaucauugccuacacaaugucucugggcgccgagaacagcguggccuacuccaacaacucuaucgcuauccccaccaacuucaccaucagcgugaccaccgagauccugccuguguccaugaccaagaccagcguggacugcaccauguacaucugcggcgauuccaccgagugcuccaaccugcugcugcaguacggcagcuucugcacccagcugaauagagcccugacagggaucgccguggaacaggacaagaacacccaagagguguucgcccaagugaagcaaaucuacaagaccccuccuaucaaggacuucggcggcuucaauuucagccagauucugcccgauccuagcaagcccagcaagcggagcuucaucgaggaccugcuguucaacaaagugacacuggccgacgccggcuucaucaagcaguauggcgauugucugggcgacauugccgccagggaucugauuugcgcccagaaguuuaacggacugacagugcugccuccucugcugaccgaugagaugaucgcccaguacacaucugcccugcuggccggcacaaucacaagcggcuggacauuuggagcuggcgccgcucugcagauccccuuugcuaugcagauggccuaccgguucaacggcaucggagugacccagaaugugcuguacgagaaccagaagcugaucgccaaccaguucaacagcgccaucggcaagauccaggacagccugagcagcacagcaagcgcccugggaaagcugcaggacguggucaaccagaaugcccaggcacugaacacccuggucaagcagcuguccuccaacuucggcgccaucagcucugugcugaacgauauccugagcagacuggacccuccugaggccgaggugcagaucgacagacugaucacaggcagacugcagagccuccagacauacgugacccagcagcugaucagagccgccgagauuagagccucugccaaucuggccgccaccaagaugucugagugugugcugggccagagcaagagaguggacuuuugcggcaagggcuaccaccugaugagcuucccucagucugccccucacggcgugguguuucugcacgugacauaugugcccgcucaagagaagaauuucaccaccgcuccagccaucugccacgacggcaaagcccacuuuccuagagaaggcguguucguguccaacggcacccauugguucgugacacagcggaacuucuacgagccccagaucaucaccaccgacaacaccuucgugucuggcaacugcgacguugugaucggcauugugaacaauaccguguacgacccucugcagcccgagcuggacagcuucaaagaggaacuggacaaguacuuuaagaaccacacaagccccgacguggaccugggcgauaucagcggaaucaaugccagcgucgugaacauccagaaagagaucgaccggcugaacgagguggccaagaaucugaacgagagccugaucgaccugcaagaacuggggaaguacgagcaguacaucaaguggcccugguacaucuggcugggcuuuaucgccggacugauugccaucgugaucgucacaaucaugcuguguugcaugaccagcugcuguagcugccugaagggcuguuguagcuguggcagcugcugcaaguucgacgaggacgauucugagcccgugcugaagggcgugaaacugcacuacaccugauaauaggcuggagccucgguggccuagcuucuugccccuugggccuccccccagccccuccuccccuuccugcacccguacccccguggucuuugaauaaagucugagugggcggcaaaaaaaaaaaaaaaaaaaaaaaaaaaaaaaaaaaaaaaaaaaaaaaaaaaaaaaaaaaaaaaaaaaaaaaaaaaaaaaaaaaaaaaaaaaaaaaaaaaa

SEQ ID NO: 26239 - RNA, 4089 nt, Artificial Sequence
  SARS-CoV-2/Wuhan/WIV05/2019__EPI_ISL_402128 spike protein mRNA gc mod (1-1273)(K986P_V987P_H69del_V70del_A222V_Y453F_S477N_D614G_I692V)
gggaaauaagagagaaaagaagaguaagaagaaauauaagaccccggcgccgccaccauguucguguuucuggugcugcugccccugguguccagccagugugugaaccugaccaccagaacacagcugccuccagccuacaccaacagcuucaccagaggcguguacuaccccgacaagguguucagauccagcgugcugcacucuacccaggaccuguuccugccuuucuucagcaacgugaccugguuccacgccaucuccggcaccaauggcaccaagagauucgacaaccccgugcugcccuucaacgacgggguguacuuugccagcaccgagaaguccaacaucaucagaggcuggaucuucggcaccacacuggacagcaagacccagagccugcugaucgugaacaacgccaccaacguggucaucaaagugugcgaguuccaguucugcaacgaccccuuccugggcgucuacuaccacaagaacaacaagagcuggauggaaagcgaguuccggguguacagcagcgccaacaacugcaccuucgaguacgugucccagccuuuccugauggaccuggaaggcaagcagggcaacuucaagaaccugcgcgaguucguguucaagaacaucgacggcuacuucaaaaucuacagcaagcacaccccuaucaaccucgugcgggaucugccucagggcuucucugugcuggaaccccugguggaucugcccaucggcaucaacaucacccgguuucagacacugcuggcccugcacagaagcuaccugacaccuggcgauagcagcagcggauggacagcuggugccgccgcuuacuaugugggcuaccugcagccuagaaccuuccugcugaaguacaacgagaacggcaccaucaccgacgccguggauugugcucuggauccucugagcgagacaaagugcacccugaaguccuucaccguggaaaagggcaucuaccagaccagcaacuuccgggugcagcccaccgaauccaucgugcgguuccccaauaucaccaaucugugccccuucggcgagguguucaaugccaccagauucgccucuguguacgccuggaaccggaagcggaucagcaauugcguggccgacuacuccgugcuguacaacuccgccagcuucagcaccuucaagugcuacggcguguccccuaccaagcugaacgaccugugcuucacaaacguguacgccgacagcuucgugauccggggagaugaagugcggcagauugccccuggacagacaggcaagaucgccgacuacaacuacaagcugcccgacgacuucaccggcugugugauugccuggaacagcaacaaccuggacuccaaagucggcggcaacuacaauuaccuguuccggcuguuccggaaguccaaucugaagcccuucgagcgggacaucagcaccgaaaucuaucaggccggcaacaccccuugcaacggcguggaaggcuucaacugcuacuucccacugcaguccuacggcuuucagcccacaaauggcgugggcuaucagcccuacagagugguggugcugagcuucgaacugcugcaugcuccugccacagugugcggcccuaagaaaagcaccaaucucgugaagaacaaaugcgugaacuucaacuucaacggccugaccggcaccggcgugcugacagagagcaacaagaaguuccugccauuccagcaguuuggccgggauaucgccgauaccacagacgccguuagagauccccagacacuggaaauccuggacaucaccccaugcagcuucggcggagugucugugaucaccccuggcaccaacaccagcaaucagguggcagugcuguaccagggcgugaacuguaccgaagugcccguggccauucacgccgaucagcugacaccuacauggcggguguacuccaccggcagcaauguguuucagaccagagccggcugucugaucggagccgagcacgugaacaauagcuacgagugcgacauccccaucggcgcuggcaucugugccagcuaccagacacagacaaacagccccagacgggcuagaagcguggccagccagagcgugauugccuacacaaugucucugggcgccgagaacagcguggccuacuccaacaacucuaucgcuauccccaccaacuucaccaucagcgugaccaccgagauccugccuguguccaugaccaagaccagcguggacugcaccauguacaucugcggcgauuccaccgagugcuccaaccugcugcugcaguacggcagcuucugcacccagcugaauagagcccugacagggaucgccguggaacaggacaagaacacccaagagguguucgcccaagugaagcaaaucuacaagaccccuccuaucaaggacuucggcggcuucaauuucagccagauucugcccgauccuagcaagcccagcaagcggagcuucaucgaggaccugcuguucaacaaagugacacuggccgacgccggcuucaucaagcaguauggcgauugucugggcgacauugccgccagggaucugauuugcgcccagaaguuuaacggacugacagugcugccuccucugcugaccgaugagaugaucgcccaguacacaucugcccugcuggccggcacaaucacaagcggcuggacauuuggagcuggcgccgcucugcagauccccuuugcuaugcagauggccuaccgguucaacggcaucggagugacccagaaugugcuguacgagaaccagaagcugaucgccaaccaguucaacagcgccaucggcaagauccaggacagccugagcagcacagcaagcgcccugggaaagcugcaggacguggucaaccagaaugcccaggcacugaacacccuggucaagcagcuguccuccaacuucggcgccaucagcucugugcugaacgauauccugagcagacuggacccuccugaggccgaggugcagaucgacagacugaucacaggcagacugcagagccuccagacauacgugacccagcagcugaucagagccgccgagauuagagccucugccaaucuggccgccaccaagaugucugagugugugcugggccagagcaagagaguggacuuuugcggcaagggcuaccaccugaugagcuucccucagucugccccucacggcgugguguuucugcacgugacauaugugcccgcucaagagaagaauuucaccaccgcuccagccaucugccacgacggcaaagcccacuuuccuagagaaggcguguucguguccaacggcacccauugguucgugacacagcggaacuucuacgagccccagaucaucaccaccgacaacaccuucgugucuggcaacugcgacguugugaucggcauugugaacaauaccguguacgacccucugcagcccgagcuggacagcuucaaagaggaacuggacaaguacuuuaagaaccacacaagccccgacguggaccugggcgauaucagcggaaucaaugccagcgucgugaacauccagaaagagaucgaccggcugaacgagguggccaagaaucugaacgagagccugaucgaccugcaagaacuggggaaguacgagcaguacaucaaguggcccugguacaucuggcugggcuuuaucgccggacugauugccaucgugauggucacaaucaugcuguguugcaugaccagcugcuguagcugccugaagggcuguuguagcuguggcagcugcugcaaguucgacgaggacgauucugagcccgugcugaagggcgugaaacugcacuacaccugauaauaggcuggagccucgguggccuagcuucuugccccuugggccuccccccagccccuccuccccuuccugcacccguacccccguggucuuugaauaaagucugagugggcggcaaaaaaaaaaaaaaaaaaaaaaaaaaaaaaaaaaaaaaaaaaaaaaaaaaaaaaaaaaaaaaaaaaaaaaaaaaaaaaaaaaaaaaaaaaaaaaaaaaaa

SEQ ID NO: 26240 - RNA, 4089 nt, Artificial Sequence
  SARS-CoV-2/Wuhan/WIV05/2019__EPI_ISL_402128 spike protein mRNA gc mod (1-1273)(K986P_V987P_H69del_V70del_Y453F_D614G_I692V_M1229I)
gggaaauaagagagaaaagaagaguaagaagaaauauaagaccccggcgccgccaccauguucguguuucuggugcugcugccccugguguccagccagugugugaaccugaccaccagaacacagcugccuccagccuacaccaacagcuucaccagaggcguguacuaccccgacaagguguucagauccagcgugcugcacucuacccaggaccuguuccugccuuucuucagcaacgugaccugguuccacgccaucuccggcaccaauggcaccaagagauucgacaaccccgugcugcccuucaacgacgggguguacuuugccagcaccgagaaguccaacaucaucagaggcuggaucuucggcaccacacuggacagcaagacccagagccugcugaucgugaacaacgccaccaacguggucaucaaagugugcgaguuccaguucugcaacgaccccuuccugggcgucuacuaccacaagaacaacaagagcuggauggaaagcgaguuccggguguacagcagcgccaacaacugcaccuucgaguacgugucccagccuuuccugauggaccuggaaggcaagcagggcaacuucaagaaccugcgcgaguucguguucaagaacaucgacggcuacuucaaaaucuacagcaagcacaccccuaucaaccucgugcgggaucugccucagggcuucucugcucuggaaccccugguggaucugcccaucggcaucaacaucacccgguuucagacacugcuggcccugcacagaagcuaccugacaccuggcgauagcagcagcggauggacagcuggugccgccgcuuacuaugugggcuaccugcagccuagaaccuuccugcugaaguacaacgagaacggcaccaucaccgacgccguggauugugcucuggauccucugagcgagacaaagugcacccugaaguccuucaccguggaaaagggcaucuaccagaccagcaacuuccgggugcagcccaccgaauccaucgugcgguuccccaauaucaccaaucugugccccuucggcgagguguucaaugccaccagauucgccucuguguacgccuggaaccggaagcggaucagcaauugcguggccgacuacuccgugcuguacaacuccgccagcuucagcaccuucaagugcuacggcguguccccuaccaagcugaacgaccugugcuucacaaacguguacgccgacagcuucgugauccggggagaugaagugcggcagauugccccuggacagacaggcaagaucgccgacuacaacuacaagcugcccgacgacuucaccggcugugugauugccuggaacagcaacaaccuggacuccaaagucggcggcaacuacaauuaccuguuccggcuguuccggaaguccaaucugaagcccuucgagcgggacaucagcaccgaaaucuaucaggccggcagcaccccuugcaacggcguggaaggcuucaacugcuacuucccacugcaguccuacggcuuucagcccacaaauggcgugggcuaucagcccuacagagugguggugcugagcuucgaacugcugcaugcuccugccacagugugcggcccuaagaaaagcaccaaucucgugaagaacaaaugcgugaacuucaacuucaacggccugaccggcaccggcgugcugacagagagcaacaagaaguuccugccauuccagcaguuuggccgggauaucgccgauaccacagacgccguuagagauccccagacacuggaaauccuggacaucaccccaugcagcuucggcggagugucugugaucaccccuggcaccaacaccagcaaucagguggcagugcuguaccagggcgugaacuguaccgaagugcccguggccauucacgccgaucagcugacaccuacauggcggguguacuccaccggcagcaauguguuucagaccagagccggcugucugaucggagccgagcacgugaacaauagcuacgagugcgacauccccaucggcgcuggcaucugugccagcuaccagacacagacaaacagccccagacgggcuagaagcguggccagccagagcgugauugccuacacaaugucucugggcgccgagaacagcguggccuacuccaacaacucuaucgcuauccccaccaacuucaccaucagcgugaccaccgagauccugccuguguccaugaccaagaccagcguggacugcaccauguacaucugcggcgauuccaccgagugcuccaaccugcugcugcaguacggcagcuucugcacccagcugaauagagcccugacagggaucgccguggaacaggacaagaacacccaagagguguucgcccaagugaagcaaaucuacaagaccccuccuaucaaggacuucggcggcuucaauuucagccagauucugcccgauccuagcaagcccagcaagcggagcuucaucgaggaccugcuguucaacaaagugacacuggccgacgccggcuucaucaagcaguauggcgauugucugggcgacauugccgccagggaucugauuugcgcccagaaguuuaacggacugacagugcugccuccucugcugaccgaugagaugaucgcccaguacacaucugcccugcuggccggcacaaucacaagcggcuggacauuuggagcuggcgccgcucugcagauccccuuugcuaugcagauggccuaccgguucaacggcaucggagugacccagaaugugcuguacgagaaccagaagcugaucgccaaccaguucaacagcgccaucggcaagauccaggacagccugagcagcacagcaagcgcccugggaaagcugcaggacguggucaaccagaaugcccaggcacugaacacccuggucaagcagcuguccuccaacuucggcgccaucagcucugugcugaacgauauccugagcagacuggacccuccugaggccgaggugcagaucgacagacugaucacaggcagacugcagagccuccagacauacgugacccagcagcugaucagagccgccgagauuagagccucugccaaucuggccgccaccaagaugucugagugugugcugggccagagcaagagaguggacuuuugcggcaagggcuaccaccugaugagcuucccucagucugccccucacggcgugguguuucugcacgugacauaugugcccgcucaagagaagaauuucaccaccgcuccagccaucugccacgacggcaaagcccacuuuccuagagaaggcguguucguguccaacggcacccauugguucgugacacagcggaacuucuacgagccccagaucaucaccaccgacaacaccuucgugucuggcaacugcgacguugugaucggcauugugaacaauaccguguacgacccucugcagcccgagcuggacagcuucaaagaggaacuggacaaguacuuuaagaaccacacaagccccgacguggaccugggcgauaucagcggaaucaaugccagcgucgugaacauccagaaagagaucgaccggcugaacgagguggccaagaaucugaacgagagccugaucgaccugcaagaacuggggaaguacgagcaguacaucaaguggcccugguacaucuggcugggcuuuaucgccggacugauugccaucgugaucgucacaaucaugcuguguugcaugaccagcugcuguagcugccugaagggcuguuguagcuguggcagcugcugcaaguucgacgaggacgauucugagcccgugcugaagggcgugaaacugcacuacaccugauaauaggcuggagccucgguggccuagcuucuugccccuugggccuccccccagccccuccuccccuuccugcacccguacccccguggucuuugaauaaagucugagugggcggcaaaaaaaaaaaaaaaaaaaaaaaaaaaaaaaaaaaaaaaaaaaaaaaaaaaaaaaaaaaaaaaaaaaaaaaaaaaaaaaaaaaaaaaaaaaaaaaaaaaa

SEQ ID NO: 26241 - RNA, 4086 nt, Artificial Sequence
  SARS-CoV-2/Wuhan/WIV05/2019__EPI_ISL_402128 spike protein mRNA gc mod (1-1273)(K986P_V987P_K986P_V987P_H69del_V70del_Y144del_N501Y_A570 D_D614G_P681H_T716I_S982A_D1118H)
gggaaauaagagagaaaagaagaguaagaagaaauauaagaccccggcgccgccaccauguucguguuucuggugcugcugccccugguguccagccagugugugaaccugaccaccagaacacagcugccuccagccuacaccaacagcuucaccagaggcguguacuaccccgacaagguguucagauccagcgugcugcacucuacccaggaccuguuccugccuuucuucagcaacgugaccugguuccacgccaucuccggcaccaauggcaccaagagauucgacaaccccgugcugcccuucaacgacgggguguacuuugccagcaccgagaaguccaacaucaucagaggcuggaucuucggcaccacacuggacagcaagacccagagccugcugaucgugaacaacgccaccaacguggucaucaaagugugcgaguuccaguucugcaacgaccccuuccugggcgucuaccacaagaacaacaagagcuggauggaaagcgaguuccggguguacagcagcgccaacaacugcaccuucgaguacgugucccagccuuuccugauggaccuggaaggcaagcagggcaacuucaagaaccugcgcgaguucguguucaagaacaucgacggcuacuucaaaaucuacagcaagcacaccccuaucaaccucgugcgggaucugccucagggcuucucugcucuggaaccccugguggaucugcccaucggcaucaacaucacccgguuucagacacugcuggcccugcacagaagcuaccugacaccuggcgauagcagcagcggauggacagcuggugccgccgcuuacuaugugggcuaccugcagccuagaaccuuccugcugaaguacaacgagaacggcaccaucaccgacgccguggauugugcucuggauccucugagcgagacaaagugcacccugaaguccuucaccguggaaaagggcaucuaccagaccagcaacuuccgggugcagcccaccgaauccaucgugcgguuccccaauaucaccaaucugugccccuucggcgagguguucaaugccaccagauucgccucuguguacgccuggaaccggaagcggaucagcaauugcguggccgacuacuccgugcuguacaacuccgccagcuucagcaccuucaagugcuacggcguguccccuaccaagcugaacgaccugugcuucacaaacguguacgccgacagcuucgugauccggggagaugaagugcggcagauugccccuggacagacaggcaagaucgccgacuacaacuacaagcugcccgacgacuucaccggcugugugauugccuggaacagcaacaaccuggacuccaaagucggcggcaacuacaauuaccuguaccggcuguuccggaaguccaaucugaagcccuucgagcgggacaucagcaccgaaaucuaucaggccggcagcaccccuugcaacggcguggaaggcuucaacugcuacuucccacugcaguccuacggcuuucagcccacauacggcgugggcuaucagcccuacagagugguggugcugagcuucgaacugcugcaugcuccugccacagugugcggcccuaagaaaagcaccaaucucgugaagaacaaaugcgugaacuucaacuucaacggccugaccggcaccggcgugcugacagagagcaacaagaaguuccugccauuccagcaguuuggccgggauaucgacgauaccacagacgccguuagagauccccagacacuggaaauccuggacaucaccccaugcagcuucggcggagugucugugaucaccccuggcaccaacaccagcaaucagguggcagugcuguaccagggcgugaacuguaccgaagugcccguggccauucacgccgaucagcugacaccuacauggcggguguacuccaccggcagcaauguguuucagaccagagccggcugucugaucggagccgagcacgugaacaauagcuacgagugcgacauccccaucggcgcuggcaucugugccagcuaccagacacagacaaacagccacagacgggcuagaagcguggccagccagagcaucauugccuacacaaugucucugggcgccgagaacagcguggccuacuccaacaacucuaucgcuauccccaucaacuucaccaucagcgugaccaccgagauccugccuguguccaugaccaagaccagcguggacugcaccauguacaucugcggcgauuccaccgagugcuccaaccugcugcugcaguacggcagcuucugcacccagcugaauagagcccugacagggaucgccguggaacaggacaagaacacccaagagguguucgcccaagugaagcaaaucuacaagaccccuccuaucaaggacuucggcggcuucaauuucagccagauucugcccgauccuagcaagcccagcaagcggagcuucaucgaggaccugcuguucaacaaagugacacuggccgacgccggcuucaucaagcaguauggcgauugucugggcgacauugccgccagggaucugauuugcgcccagaaguuuaacggacugacagugcugccuccucugcugaccgaugagaugaucgcccaguacacaucugcccugcuggccggcacaaucacaagcggcuggacauuuggagcuggcgccgcucugcagauccccuuugcuaugcagauggccuaccgguucaacggcaucggagugacccagaaugugcuguacgagaaccagaagcugaucgccaaccaguucaacagcgccaucggcaagauccaggacagccugagcagcacagcaagcgcccugggaaagcugcaggacguggucaaccagaaugcccaggcacugaacacccuggucaagcagcuguccuccaacuucggcgccaucagcucugugcugaacgauauccuggccagacuggacccuccugaggccgaggugcagaucgacagacugaucacaggcagacugcagagccuccagacauacgugacccagcagcugaucagagccgccgagauuagagccucugccaaucuggccgccaccaagaugucugagugugugcugggccagagcaagagaguggacuuuugcggcaagggcuaccaccugaugagcuucccucagucugccccucacggcgugguguuucugcacgugacauaugugcccgcucaagagaagaauuucaccaccgcuccagccaucugccacgacggcaaagcccacuuuccuagagaaggcguguucguguccaacggcacccauugguucgugacacagcggaacuucuacgagccccagaucaucaccacccacaacaccuucgugucuggcaacugcgacguugugaucggcauugugaacaauaccguguacgacccucugcagcccgagcuggacagcuucaaagaggaacuggacaaguacuuuaagaaccacacaagccccgacguggaccugggcgauaucagcggaaucaaugccagcgucgugaacauccagaaagagaucgaccggcugaacgagguggccaagaaucugaacgagagccugaucgaccugcaagaacuggggaaguacgagcaguacaucaaguggcccugguacaucuggcugggcuuuaucgccggacugauugccaucgugauggucacaaucaugcuguguugcaugaccagcugcuguagcugccugaagggcuguuguagcuguggcagcugcugcaaguucgacgaggacgauucugagcccgugcugaagggcgugaaacugcacuacaccugauaauaggcuggagccucgguggccuagcuucuugccccuugggccuccccccagccccuccuccccuuccugcacccguacccccguggucuuugaauaaagucugagugggcggcaaaaaaaaaaaaaaaaaaaaaaaaaaaaaaaaaaaaaaaaaaaaaaaaaaaaaaaaaaaaaaaaaaaaaaaaaaaaaaaaaaaaaaaaaaaaaaaaaaaa

SEQ ID NO: 26242 - RNA, 4095 nt, Artificial Sequence
  SARS-CoV-2/Wuhan/WIV05/2019__EPI_ISL_402128 spike protein mRNA gc mod (1-1273)(K986P_V987P_K986P_V987P_K417N_E484K_N501Y_D614G)
gggaaauaagagagaaaagaagaguaagaagaaauauaagaccccggcgccgccaccauguucguguuucuggugcugcugccccugguguccagccagugugugaaccugaccaccagaacacagcugccuccagccuacaccaacagcuucaccagaggcguguacuaccccgacaagguguucagauccagcgugcugcacucuacccaggaccuguuccugccuuucuucagcaacgugaccugguuccacgccauccacguguccggcaccaauggcaccaagagauucgacaaccccgugcugcccuucaacgacgggguguacuuugccagcaccgagaaguccaacaucaucagaggcuggaucuucggcaccacacuggacagcaagacccagagccugcugaucgugaacaacgccaccaacguggucaucaaagugugcgaguuccaguucugcaacgaccccuuccugggcgucuacuaccacaagaacaacaagagcuggauggaaagcgaguuccggguguacagcagcgccaacaacugcaccuucgaguacgugucccagccuuuccugauggaccuggaaggcaagcagggcaacuucaagaaccugcgcgaguucguguucaagaacaucgacggcuacuucaaaaucuacagcaagcacaccccuaucaaccucgugcgggaucugccucagggcuucucugcucuggaaccccugguggaucugcccaucggcaucaacaucacccgguuucagacacugcuggcccugcacagaagcuaccugacaccuggcgauagcagcagcggauggacagcuggugccgccgcuuacuaugugggcuaccugcagccuagaaccuuccugcugaaguacaacgagaacggcaccaucaccgacgccguggauugugcucuggauccucugagcgagacaaagugcacccugaaguccuucaccguggaaaagggcaucuaccagaccagcaacuuccgggugcagcccaccgaauccaucgugcgguuccccaauaucaccaaucugugccccuucggcgagguguucaaugccaccagauucgccucuguguacgccuggaaccggaagcggaucagcaauugcguggccgacuacuccgugcuguacaacuccgccagcuucagcaccuucaagugcuacggcguguccccuaccaagcugaacgaccugugcuucacaaacguguacgccgacagcuucgugauccggggagaugaagugcggcagauugccccuggacagacaggcaacaucgccgacuacaacuacaagcugcccgacgacuucaccggcugugugauugccuggaacagcaacaaccuggacuccaaagucggcggcaacuacaauuaccuguaccggcuguuccggaaguccaaucugaagcccuucgagcgggacaucagcaccgaaaucuaucaggccggcagcaccccuugcaacggcgugaagggcuucaacugcuacuucccacugcaguccuacggcuuucagcccacauacggcgugggcuaucagcccuacagagugguggugcugagcuucgaacugcugcaugcuccugccacagugugcggcccuaagaaaagcaccaaucucgugaagaacaaaugcgugaacuucaacuucaacggccugaccggcaccggcgugcugacagagagcaacaagaaguuccugccauuccagcaguuuggccgggauaucgccgauaccacagacgccguuagagauccccagacacuggaaauccuggacaucaccccaugcagcuucggcggagugucugugaucaccccuggcaccaacaccagcaaucagguggcagugcuguaccagggcgugaacuguaccgaagugcccguggccauucacgccgaucagcugacaccuacauggcggguguacuccaccggcagcaauguguuucagaccagagccggcugucugaucggagccgagcacgugaacaauagcuacgagugcgacauccccaucggcgcuggcaucugugccagcuaccagacacagacaaacagccccagacgggcuagaagcguggccagccagagcaucauugccuacacaaugucucugggcgccgagaacagcguggccuacuccaacaacucuaucgcuauccccaccaacuucaccaucagcgugaccaccgagauccugccuguguccaugaccaagaccagcguggacugcaccauguacaucugcggcgauuccaccgagugcuccaaccugcugcugcaguacggcagcuucugcacccagcugaauagagcccugacagggaucgccguggaacaggacaagaacacccaagagguguucgcccaagugaagcaaaucuacaagaccccuccuaucaaggacuucggcggcuucaauuucagccagauucugcccgauccuagcaagcccagcaagcggagcuucaucgaggaccugcuguucaacaaagugacacuggccgacgccggcuucaucaagcaguauggcgauugucugggcgacauugccgccagggaucugauuugcgcccagaaguuuaacggacugacagugcugccuccucugcugaccgaugagaugaucgcccaguacacaucugcccugcuggccggcacaaucacaagcggcuggacauuuggagcuggcgccgcucugcagauccccuuugcuaugcagauggccuaccgguucaacggcaucggagugacccagaaugugcuguacgagaaccagaagcugaucgccaaccaguucaacagcgccaucggcaagauccaggacagccugagcagcacagcaagcgcccugggaaagcugcaggacguggucaaccagaaugcccaggcacugaacacccuggucaagcagcuguccuccaacuucggcgccaucagcucugugcugaacgauauccugagcagacuggacccuccugaggccgaggugcagaucgacagacugaucacaggcagacugcagagccuccagacauacgugacccagcagcugaucagagccgccgagauuagagccucugccaaucuggccgccaccaagaugucugagugugugcugggccagagcaagagaguggacuuuugcggcaagggcuaccaccugaugagcuucccucagucugccccucacggcgugguguuucugcacgugacauaugugcccgcucaagagaagaauuucaccaccgcuccagccaucugccacgacggcaaagcccacuuuccuagagaaggcguguucguguccaacggcacccauugguucgugacacagcggaacuucuacgagccccagaucaucaccaccgacaacaccuucgugucuggcaacugcgacguugugaucggcauugugaacaauaccguguacgacccucugcagcccgagcuggacagcuucaaagaggaacuggacaaguacuuuaagaaccacacaagccccgacguggaccugggcgauaucagcggaaucaaugccagcgucgugaacauccagaaagagaucgaccggcugaacgagguggccaagaaucugaacgagagccugaucgaccugcaagaacuggggaaguacgagcaguacaucaaguggcccugguacaucuggcugggcuuuaucgccggacugauugccaucgugauggucacaaucaugcuguguugcaugaccagcugcuguagcugccugaagggcuguuguagcuguggcagcugcugcaaguucgacgaggacgauucugagcccgugcugaagggcgugaaacugcacuacaccugauaauaggcuggagccucgguggccuagcuucuugccccuugggccuccccccagccccuccuccccuuccugcacccguacccccguggucuuugaauaaagucugagugggcggcaaaaaaaaaaaaaaaaaaaaaaaaaaaaaaaaaaaaaaaaaaaaaaaaaaaaaaaaaaaaaaaaaaaaaaaaaaaaaaaaaaaaaaaaaaaaaaaaaaaa

SEQ ID NO: 26243 - RNA, 4086 nt, Artificial Sequence
  SARS-CoV-2/Wuhan/WIV05/2019__EPI_ISL_402128 spike protein mRNA gc mod (1-1273)(K986P_V987P_K986P_V987P_L18F_D80A_D215G_L242del_A243del_ L244del_R246I_K417N_E484K_N501Y_D614G_A701V)
gggaaauaagagagaaaagaagaguaagaagaaauauaagaccccggcgccgccaccauguucguguuucuggugcugcugccccugguguccagccagugugugaacuucaccaccagaacacagcugccuccagccuacaccaacagcuucaccagaggcguguacuaccccgacaagguguucagauccagcgugcugcacucuacccaggaccuguuccugccuuucuucagcaacgugaccugguuccacgccauccacguguccggcaccaauggcaccaagagauucgccaaccccgugcugcccuucaacgacgggguguacuuugccagcaccgagaaguccaacaucaucagaggcuggaucuucggcaccacacuggacagcaagacccagagccugcugaucgugaacaacgccaccaacguggucaucaaagugugcgaguuccaguucugcaacgaccccuuccugggcgucuacuaccacaagaacaacaagagcuggauggaaagcgaguuccggguguacagcagcgccaacaacugcaccuucgaguacgugucccagccuuuccugauggaccuggaaggcaagcagggcaacuucaagaaccugcgcgaguucguguucaagaacaucgacggcuacuucaaaaucuacagcaagcacaccccuaucaaccucgugcggggccugccucagggcuucucugcucuggaaccccugguggaucugcccaucggcaucaacaucacccgguuucagacacugcacaucagcuaccugacaccuggcgauagcagcagcggauggacagcuggugccgccgcuuacuaugugggcuaccugcagccuagaaccuuccugcugaaguacaacgagaacggcaccaucaccgacgccguggauugugcucuggauccucugagcgagacaaagugcacccugaaguccuucaccguggaaaagggcaucuaccagaccagcaacuuccgggugcagcccaccgaauccaucgugcgguuccccaauaucaccaaucugugccccuucggcgagguguucaaugccaccagauucgccucuguguacgccuggaaccggaagcggaucagcaauugcguggccgacuacuccgugcuguacaacuccgccagcuucagcaccuucaagugcuacggcguguccccuaccaagcugaacgaccugugcuucacaaacguguacgccgacagcuucgugauccggggagaugaagugcggcagauugccccuggacagacaggcaacaucgccgacuacaacuacaagcugcccgacgacuucaccggcugugugauugccuggaacagcaacaaccuggacuccaaagucggcggcaacuacaauuaccuguaccggcuguuccggaaguccaaucugaagcccuucgagcgggacaucagcaccgaaaucuaucaggccggcagcaccccuugcaacggcgugaagggcuucaacugcuacuucccacugcaguccuacggcuuucagcccacauacggcgugggcuaucagcccuacagagugguggugcugagcuucgaacugcugcaugcuccugccacagugugcggcccuaagaaaagcaccaaucucgugaagaacaaaugcgugaacuucaacuucaacggccugaccggcaccggcgugcugacagagagcaacaagaaguuccugccauuccagcaguuuggccgggauaucgccgauaccacagacgccguuagagauccccagacacuggaaauccuggacaucaccccaugcagcuucggcggagugucugugaucaccccuggcaccaacaccagcaaucagguggcagugcuguaccagggcgugaacuguaccgaagugcccguggccauucacgccgaucagcugacaccuacauggcggguguacuccaccggcagcaauguguuucagaccagagccggcugucugaucggagccgagcacgugaacaauagcuacgagugcgacauccccaucggcgcuggcaucugugccagcuaccagacacagacaaacagccccagacgggcuagaagcguggccagccagagcaucauugccuacacaaugucucugggcguggagaacagcguggccuacuccaacaacucuaucgcuauccccaccaacuucaccaucagcgugaccaccgagauccugccuguguccaugaccaagaccagcguggacugcaccauguacaucugcggcgauuccaccgagugcuccaaccugcugcugcaguacggcagcuucugcacccagcugaauagagcccugacagggaucgccguggaacaggacaagaacacccaagagguguucgcccaagugaagcaaaucuacaagaccccuccuaucaaggacuucggcggcuucaauuucagccagauucugcccgauccuagcaagcccagcaagcggagcuucaucgaggaccugcuguucaacaaagugacacuggccgacgccggcuucaucaagcaguauggcgauugucugggcgacauugccgccagggaucugauuugcgcccagaaguuuaacggacugacagugcugccuccucugcugaccgaugagaugaucgcccaguacacaucugcccugcuggccggcacaaucacaagcggcuggacauuuggagcuggcgccgcucugcagauccccuuugcuaugcagauggccuaccgguucaacggcaucggagugacccagaaugugcuguacgagaaccagaagcugaucgccaaccaguucaacagcgccaucggcaagauccaggacagccugagcagcacagcaagcgcccugggaaagcugcaggacguggucaaccagaaugcccaggcacugaacacccuggucaagcagcuguccuccaacuucggcgccaucagcucugugcugaacgauauccugagcagacuggacccuccugaggccgaggugcagaucgacagacugaucacaggcagacugcagagccuccagacauacgugacccagcagcugaucagagccgccgagauuagagccucugccaaucuggccgccaccaagaugucugagugugugcugggccagagcaagagaguggacuuuugcggcaagggcuaccaccugaugagcuucccucagucugccccucacggcgugguguuucugcacgugacauaugugcccgcucaagagaagaauuucaccaccgcuccagccaucugccacgacggcaaagcccacuuuccuagagaaggcguguucguguccaacggcacccauugguucgugacacagcggaacuucuacgagccccagaucaucaccaccgacaacaccuucgugucuggcaacugcgacguugugaucggcauugugaacaauaccguguacgacccucugcagcccgagcuggacagcuucaaagaggaacuggacaaguacuuuaagaaccacacaagccccgacguggaccugggcgauaucagcggaaucaaugccagcgucgugaacauccagaaagagaucgaccggcugaacgagguggccaagaaucugaacgagagccugaucgaccugcaagaacuggggaaguacgagcaguacaucaaguggcccugguacaucuggcugggcuuuaucgccggacugauugccaucgugauggucacaaucaugcuguguugcaugaccagcugcuguagcugccugaagggcuguuguagcuguggcagcugcugcaaguucgacgaggacgauucugagcccgugcugaagggcgugaaacugcacuacaccugauaauaggcuggagccucgguggccuagcuucuugccccuugggccuccccccagccccuccuccccuuccugcacccguacccccguggucuuugaauaaagucugagugggcggcaaaaaaaaaaaaaaaaaaaaaaaaaaaaaaaaaaaaaaaaaaaaaaaaaaaaaaaaaaaaaaaaaaaaaaaaaaaaaaaaaaaaaaaaaaaaaaaaaaaa

SEQ ID NO: 26244 - RNA, 4095 nt, Artificial Sequence
  SARS-CoV-2/Wuhan/WIV05/2019__EPI_ISL_402128 spike protein mRNA gc mod (1-1273)(K986P_V987P_K986P_V987P_E484K_D614G)
gggaaauaagagagaaaagaagaguaagaagaaauauaagaccccggcgccgccaccauguucguguuucuggugcugcugccccugguguccagccagugugugaaccugaccaccagaacacagcugccuccagccuacaccaacagcuucaccagaggcguguacuaccccgacaagguguucagauccagcgugcugcacucuacccaggaccuguuccugccuuucuucagcaacgugaccugguuccacgccauccacguguccggcaccaauggcaccaagagauucgacaaccccgugcugcccuucaacgacgggguguacuuugccagcaccgagaaguccaacaucaucagaggcuggaucuucggcaccacacuggacagcaagacccagagccugcugaucgugaacaacgccaccaacguggucaucaaagugugcgaguuccaguucugcaacgaccccuuccugggcgucuacuaccacaagaacaacaagagcuggauggaaagcgaguuccggguguacagcagcgccaacaacugcaccuucgaguacgugucccagccuuuccugauggaccuggaaggcaagcagggcaacuucaagaaccugcgcgaguucguguucaagaacaucgacggcuacuucaaaaucuacagcaagcacaccccuaucaaccucgugcgggaucugccucagggcuucucugcucuggaaccccugguggaucugcccaucggcaucaacaucacccgguuucagacacugcuggcccugcacagaagcuaccugacaccuggcgauagcagcagcggauggacagcuggugccgccgcuuacuaugugggcuaccugcagccuagaaccuuccugcugaaguacaacgagaacggcaccaucaccgacgccguggauugugcucuggauccucugagcgagacaaagugcacccugaaguccuucaccguggaaaagggcaucuaccagaccagcaacuuccgggugcagcccaccgaauccaucgugcgguuccccaauaucaccaaucugugccccuucggcgagguguucaaugccaccagauucgccucuguguacgccuggaaccggaagcggaucagcaauugcguggccgacuacuccgugcuguacaacuccgccagcuucagcaccuucaagugcuacggcguguccccuaccaagcugaacgaccugugcuucacaaacguguacgccgacagcuucgugauccggggagaugaagugcggcagauugccccuggacagacaggcaagaucgccgacuacaacuacaagcugcccgacgacuucaccggcugugugauugccuggaacagcaacaaccuggacuccaaagucggcggcaacuacaauuaccuguaccggcuguuccggaaguccaaucugaagcccuucgagcgggacaucagcaccgaaaucuaucaggccggcagcaccccuugcaacggcgugaagggcuucaacugcuacuucccacugcaguccuacggcuuucagcccacaaauggcgugggcuaucagcccuacagagugguggugcugagcuucgaacugcugcaugcuccugccacagugugcggcccuaagaaaagcaccaaucucgugaagaacaaaugcgugaacuucaacuucaacggccugaccggcaccggcgugcugacagagagcaacaagaaguuccugccauuccagcaguuuggccgggauaucgccgauaccacagacgccguuagagauccccagacacuggaaauccuggacaucaccccaugcagcuucggcggagugucugugaucaccccuggcaccaacaccagcaaucagguggcagugcuguaccagggcgugaacuguaccgaagugcccguggccauucacgccgaucagcugacaccuacauggcggguguacuccaccggcagcaauguguuucagaccagagccggcugucugaucggagccgagcacgugaacaauagcuacgagugcgacauccccaucggcgcuggcaucugugccagcuaccagacacagacaaacagccccagacgggcuagaagcguggccagccagagcaucauugccuacacaaugucucugggcgccgagaacagcguggccuacuccaacaacucuaucgcuauccccaccaacuucaccaucagcgugaccaccgagauccugccuguguccaugaccaagaccagcguggacugcaccauguacaucugcggcgauuccaccgagugcuccaaccugcugcugcaguacggcagcuucugcacccagcugaauagagcccugacagggaucgccguggaacaggacaagaacacccaagagguguucgcccaagugaagcaaaucuacaagaccccuccuaucaaggacuucggcggcuucaauuucagccagauucugcccgauccuagcaagcccagcaagcggagcuucaucgaggaccugcuguucaacaaagugacacuggccgacgccggcuucaucaagcaguauggcgauugucugggcgacauugccgccagggaucugauuugcgcccagaaguuuaacggacugacagugcugccuccucugcugaccgaugagaugaucgcccaguacacaucugcccugcuggccggcacaaucacaagcggcuggacauuuggagcuggcgccgcucugcagauccccuuugcuaugcagauggccuaccgguucaacggcaucggagugacccagaaugugcuguacgagaaccagaagcugaucgccaaccaguucaacagcgccaucggcaagauccaggacagccugagcagcacagcaagcgcccugggaaagcugcaggacguggucaaccagaaugcccaggcacugaacacccuggucaagcagcuguccuccaacuucggcgccaucagcucugugcugaacgauauccugagcagacuggacccuccugaggccgaggugcagaucgacagacugaucacaggcagacugcagagccuccagacauacgugacccagcagcugaucagagccgccgagauuagagccucugccaaucuggccgccaccaagaugucugagugugugcugggccagagcaagagaguggacuuuugcggcaagggcuaccaccugaugagcuucccucagucugccccucacggcgugguguuucugcacgugacauaugugcccgcucaagagaagaauuucaccaccgcuccagccaucugccacgacggcaaagcccacuuuccuagagaaggcguguucguguccaacggcacccauugguucgugacacagcggaacuucuacgagccccagaucaucaccaccgacaacaccuucgugucuggcaacugcgacguugugaucggcauugugaacaauaccguguacgacccucugcagcccgagcuggacagcuucaaagaggaacuggacaaguacuuuaagaaccacacaagccccgacguggaccugggcgauaucagcggaaucaaugccagcgucgugaacauccagaaagagaucgaccggcugaacgagguggccaagaaucugaacgagagccugaucgaccugcaagaacuggggaaguacgagcaguacaucaaguggcccugguacaucuggcugggcuuuaucgccggacugauugccaucgugauggucacaaucaugcuguguugcaugaccagcugcuguagcugccugaagggcuguuguagcuguggcagcugcugcaaguucgacgaggacgauucugagcccgugcugaagggcgugaaacugcacuacaccugauaauaggcuggagccucgguggccuagcuucuugccccuugggccuccccccagccccuccuccccuuccugcacccguacccccguggucuuugaauaaagucugagugggcggcaaaaaaaaaaaaaaaaaaaaaaaaaaaaaaaaaaaaaaaaaaaaaaaaaaaaaaaaaaaaaaaaaaaaaaaaaaaaaaaaaaaaaaaaaaaaaaaaaaaa

SEQ ID NO: 26245 - RNA, 4095 nt, Artificial Sequence
  SARS-CoV-2/Wuhan/WIV05/2019__EPI_ISL_402128 spike protein mRNA gc mod (1-1273)(K986P_V987P_K986P_V987P_L18F_T20N_P26S_D138Y_R190S_K417T _E484K_N501Y_D614G_H655Y_T1027I)
gggaaauaagagagaaaagaagaguaagaagaaauauaagaccccggcgccgccaccauguucguguuucuggugcugcugccccugguguccagccagugugugaacuucaccaacagaacacagcugccuagcgccuacaccaacagcuucaccagaggcguguacuaccccgacaagguguucagauccagcgugcugcacucuacccaggaccuguuccugccuuucuucagcaacgugaccugguuccacgccauccacguguccggcaccaauggcaccaagagauucgacaaccccgugcugcccuucaacgacgggguguacuuugccagcaccgagaaguccaacaucaucagaggcuggaucuucggcaccacacuggacagcaagacccagagccugcugaucgugaacaacgccaccaacguggucaucaaagugugcgaguuccaguucugcaacuaccccuuccugggcgucuacuaccacaagaacaacaagagcuggauggaaagcgaguuccggguguacagcagcgccaacaacugcaccuucgaguacgugucccagccuuuccugauggaccuggaaggcaagcagggcaacuucaagaaccugagcgaguucguguucaagaacaucgacggcuacuucaaaaucuacagcaagcacaccccuaucaaccucgugcgggaucugccucagggcuucucugcucuggaaccccugguggaucugcccaucggcaucaacaucacccgguuucagacacugcuggcccugcacagaagcuaccugacaccuggcgauagcagcagcggauggacagcuggugccgccgcuuacuaugugggcuaccugcagccuagaaccuuccugcugaaguacaacgagaacggcaccaucaccgacgccguggauugugcucuggauccucugagcgagacaaagugcacccugaaguccuucaccguggaaaagggcaucuaccagaccagcaacuuccgggugcagcccaccgaauccaucgugcgguuccccaauaucaccaaucugugccccuucggcgagguguucaaugccaccagauucgccucuguguacgccuggaaccggaagcggaucagcaauugcguggccgacuacuccgugcuguacaacuccgccagcuucagcaccuucaagugcuacggcguguccccuaccaagcugaacgaccugugcuucacaaacguguacgccgacagcuucgugauccggggagaugaagugcggcagauugccccuggacagacaggcaccaucgccgacuacaacuacaagcugcccgacgacuucaccggcugugugauugccuggaacagcaacaaccuggacuccaaagucggcggcaacuacaauuaccuguaccggcuguuccggaaguccaaucugaagcccuucgagcgggacaucagcaccgaaaucuaucaggccggcagcaccccuugcaacggcgugaagggcuucaacugcuacuucccacugcaguccuacggcuuucagcccacauacggcgugggcuaucagcccuacagagugguggugcugagcuucgaacugcugcaugcuccugccacagugugcggcccuaagaaaagcaccaaucucgugaagaacaaaugcgugaacuucaacuucaacggccugaccggcaccggcgugcugacagagagcaacaagaaguuccugccauuccagcaguuuggccgggauaucgccgauaccacagacgccguuagagauccccagacacuggaaauccuggacaucaccccaugcagcuucggcggagugucugugaucaccccuggcaccaacaccagcaaucagguggcagugcuguaccagggcgugaacuguaccgaagugcccguggccauucacgccgaucagcugacaccuacauggcggguguacuccaccggcagcaauguguuucagaccagagccggcugucugaucggagccgaguacgugaacaauagcuacgagugcgacauccccaucggcgcuggcaucugugccagcuaccagacacagacaaacagccccagacgggcuagaagcguggccagccagagcaucauugccuacacaaugucucugggcgccgagaacagcguggccuacuccaacaacucuaucgcuauccccaccaacuucaccaucagcgugaccaccgagauccugccuguguccaugaccaagaccagcguggacugcaccauguacaucugcggcgauuccaccgagugcuccaaccugcugcugcaguacggcagcuucugcacccagcugaauagagcccugacagggaucgccguggaacaggacaagaacacccaagagguguucgcccaagugaagcaaaucuacaagaccccuccuaucaaggacuucggcggcuucaauuucagccagauucugcccgauccuagcaagcccagcaagcggagcuucaucgaggaccugcuguucaacaaagugacacuggccgacgccggcuucaucaagcaguauggcgauugucugggcgacauugccgccagggaucugauuugcgcccagaaguuuaacggacugacagugcugccuccucugcugaccgaugagaugaucgcccaguacacaucugcccugcuggccggcacaaucacaagcggcuggacauuuggagcuggcgccgcucugcagauccccuuugcuaugcagauggccuaccgguucaacggcaucggagugacccagaaugugcuguacgagaaccagaagcugaucgccaaccaguucaacagcgccaucggcaagauccaggacagccugagcagcacagcaagcgcccugggaaagcugcaggacguggucaaccagaaugcccaggcacugaacacccuggucaagcagcuguccuccaacuucggcgccaucagcucugugcugaacgauauccugagcagacuggacccuccugaggccgaggugcagaucgacagacugaucacaggcagacugcagagccuccagacauacgugacccagcagcugaucagagccgccgagauuagagccucugccaaucuggccgccaucaagaugucugagugugugcugggccagagcaagagaguggacuuuugcggcaagggcuaccaccugaugagcuucccucagucugccccucacggcgugguguuucugcacgugacauaugugcccgcucaagagaagaauuucaccaccgcuccagccaucugccacgacggcaaagcccacuuuccuagagaaggcguguucguguccaacggcacccauugguucgugacacagcggaacuucuacgagccccagaucaucaccaccgacaacaccuucgugucuggcaacugcgacguugugaucggcauugugaacaauaccguguacgacccucugcagcccgagcuggacagcuucaaagaggaacuggacaaguacuuuaagaaccacacaagccccgacguggaccugggcgauaucagcggaaucaaugccagcgucgugaacauccagaaagagaucgaccggcugaacgagguggccaagaaucugaacgagagccugaucgaccugcaagaacuggggaaguacgagcaguacaucaaguggcccugguacaucuggcugggcuuuaucgccggacugauugccaucgugauggucacaaucaugcuguguugcaugaccagcugcuguagcugccugaagggcuguuguagcuguggcagcugcugcaaguucgacgaggacgauucugagcccgugcugaagggcgugaaacugcacuacaccugauaauaggcuggagccucgguggccuagcuucuugccccuugggccuccccccagccccuccuccccuuccugcacccguacccccguggucuuugaauaaagucugagugggcggcaaaaaaaaaaaaaaaaaaaaaaaaaaaaaaaaaaaaaaaaaaaaaaaaaaaaaaaaaaaaaaaaaaaaaaaaaaaaaaaaaaaaaaaaaaaaaaaaaaaa

SEQ ID NO: 26246 - RNA, 4095 nt, Artificial Sequence
  SARS-CoV-2/Wuhan/WIV05/2019__EPI_ISL_402128 spike protein mRNA gc mod (1-1273)(K986P_V987P_K986P_V987P_S13I_W152C_L452R_D614G)
gggaaauaagagagaaaagaagaguaagaagaaauauaagaccccggcgccgccaccauguucguguuucuggugcugcugccccugguguccauccagugugugaaccugaccaccagaacacagcugccuccagccuacaccaacagcuucaccagaggcguguacuaccccgacaagguguucagauccagcgugcugcacucuacccaggaccuguuccugccuuucuucagcaacgugaccugguuccacgccauccacguguccggcaccaauggcaccaagagauucgacaaccccgugcugcccuucaacgacgggguguacuuugccagcaccgagaaguccaacaucaucagaggcuggaucuucggcaccacacuggacagcaagacccagagccugcugaucgugaacaacgccaccaacguggucaucaaagugugcgaguuccaguucugcaacgaccccuuccugggcgucuacuaccacaagaacaacaagagcugcauggaaagcgaguuccggguguacagcagcgccaacaacugcaccuucgaguacgugucccagccuuuccugauggaccuggaaggcaagcagggcaacuucaagaaccugcgcgaguucguguucaagaacaucgacggcuacuucaaaaucuacagcaagcacaccccuaucaaccucgugcgggaucugccucagggcuucucugcucuggaaccccugguggaucugcccaucggcaucaacaucacccgguuucagacacugcuggcccugcacagaagcuaccugacaccuggcgauagcagcagcggauggacagcuggugccgccgcuuacuaugugggcuaccugcagccuagaaccuuccugcugaaguacaacgagaacggcaccaucaccgacgccguggauugugcucuggauccucugagcgagacaaagugcacccugaaguccuucaccguggaaaagggcaucuaccagaccagcaacuuccgggugcagcccaccgaauccaucgugcgguuccccaauaucaccaaucugugccccuucggcgagguguucaaugccaccagauucgccucuguguacgccuggaaccggaagcggaucagcaauugcguggccgacuacuccgugcuguacaacuccgccagcuucagcaccuucaagugcuacggcguguccccuaccaagcugaacgaccugugcuucacaaacguguacgccgacagcuucgugauccggggagaugaagugcggcagauugccccuggacagacaggcaagaucgccgacuacaacuacaagcugcccgacgacuucaccggcugugugauugccuggaacagcaacaaccuggacuccaaagucggcggcaacuacaauuaccgcuaccggcuguuccggaaguccaaucugaagcccuucgagcgggacaucagcaccgaaaucuaucaggccggcagcaccccuugcaacggcguggaaggcuucaacugcuacuucccacugcaguccuacggcuuucagcccacaaauggcgugggcuaucagcccuacagagugguggugcugagcuucgaacugcugcaugcuccugccacagugugcggcccuaagaaaagcaccaaucucgugaagaacaaaugcgugaacuucaacuucaacggccugaccggcaccggcgugcugacagagagcaacaagaaguuccugccauuccagcaguuuggccgggauaucgccgauaccacagacgccguuagagauccccagacacuggaaauccuggacaucaccccaugcagcuucggcggagugucugugaucaccccuggcaccaacaccagcaaucagguggcagugcuguaccagggcgugaacuguaccgaagugcccguggccauucacgccgaucagcugacaccuacauggcggguguacuccaccggcagcaauguguuucagaccagagccggcugucugaucggagccgagcacgugaacaauagcuacgagugcgacauccccaucggcgcuggcaucugugccagcuaccagacacagacaaacagccccagacgggcuagaagcguggccagccagagcaucauugccuacacaaugucucugggcgccgagaacagcguggccuacuccaacaacucuaucgcuauccccaccaacuucaccaucagcgugaccaccgagauccugccuguguccaugaccaagaccagcguggacugcaccauguacaucugcggcgauuccaccgagugcuccaaccugcugcugcaguacggcagcuucugcacccagcugaauagagcccugacagggaucgccguggaacaggacaagaacacccaagagguguucgcccaagugaagcaaaucuacaagaccccuccuaucaaggacuucggcggcuucaauuucagccagauucugcccgauccuagcaagcccagcaagcggagcuucaucgaggaccugcuguucaacaaagugacacuggccgacgccggcuucaucaagcaguauggcgauugucugggcgacauugccgccagggaucugauuugcgcccagaaguuuaacggacugacagugcugccuccucugcugaccgaugagaugaucgcccaguacacaucugcccugcuggccggcacaaucacaagcggcuggacauuuggagcuggcgccgcucugcagauccccuuugcuaugcagauggccuaccgguucaacggcaucggagugacccagaaugugcuguacgagaaccagaagcugaucgccaaccaguucaacagcgccaucggcaagauccaggacagccugagcagcacagcaagcgcccugggaaagcugcaggacguggucaaccagaaugcccaggcacugaacacccuggucaagcagcuguccuccaacuucggcgccaucagcucugugcugaacgauauccugagcagacuggacccuccugaggccgaggugcagaucgacagacugaucacaggcagacugcagagccuccagacauacgugacccagcagcugaucagagccgccgagauuagagccucugccaaucuggccgccaccaagaugucugagugugugcugggccagagcaagagaguggacuuuugcggcaagggcuaccaccugaugagcuucccucagucugccccucacggcgugguguuucugcacgugacauaugugcccgcucaagagaagaauuucaccaccgcuccagccaucugccacgacggcaaagcccacuuuccuagagaaggcguguucguguccaacggcacccauugguucgugacacagcggaacuucuacgagccccagaucaucaccaccgacaacaccuucgugucuggcaacugcgacguugugaucggcauugugaacaauaccguguacgacccucugcagcccgagcuggacagcuucaaagaggaacuggacaaguacuuuaagaaccacacaagccccgacguggaccugggcgauaucagcggaaucaaugccagcgucgugaacauccagaaagagaucgaccggcugaacgagguggccaagaaucugaacgagagccugaucgaccugcaagaacuggggaaguacgagcaguacaucaaguggcccugguacaucuggcugggcuuuaucgccggacugauugccaucgugauggucacaaucaugcuguguugcaugaccagcugcuguagcugccugaagggcuguuguagcuguggcagcugcugcaaguucgacgaggacgauucugagcccgugcugaagggcgugaaacugcacuacaccugauaauaggcuggagccucgguggccuagcuucuugccccuugggccuccccccagccccuccuccccuuccugcacccguacccccguggucuuugaauaaagucugagugggcggcaaaaaaaaaaaaaaaaaaaaaaaaaaaaaaaaaaaaaaaaaaaaaaaaaaaaaaaaaaaaaaaaaaaaaaaaaaaaaaaaaaaaaaaaaaaaaaaaaaaa

SEQ ID NO: 26247 - RNA, 4095 nt, Artificial Sequence
  SARS-CoV-2/Wuhan/WIV05/2019__EPI_ISL_402128 spike protein mRNA gc mod (1-1273)(K986P_V987P)
gggaaauaagagagaaaagaagaguaagaagaaauauaagaccccggcgccgccaccauguucguguuccuggugcugcugccucugguguccagccagugugugaaccugaccaccagaacacagcugccuccagccuacaccaacagcuuuaccagaggcguguacuaccccgacaagguguucagauccagcgugcugcacucuacccaggaccuguuccugccuuucuucagcaacgugaccugguuccacgccauccacguguccggcaccaauggcaccaagagauucgacaaccccgugcugcccuucaacgacgggguguacuuugccagcaccgagaaguccaacaucaucagaggcuggaucuucggcaccacacuggacagcaagacccagagccugcugaucgugaacaacgccaccaacguggucaucaaagugugcgaguuccaguucugcaacgaccccuuccugggcgucuacuaccacaagaacaacaagagcuggauggaaagcgaguuccggguguacagcagcgccaacaacugcaccuucgaguacgugucccagccuuuccugauggaccuggaaggcaagcagggcaacuucaagaaccugcgcgaguucguguuuaagaacaucgacggcuacuucaagaucuacagcaagcacaccccuaucaaccucgugcgggaucugccucagggcuucucugcucuggaaccccugguggaucugcccaucggcaucaacaucacccgguuucagacacugcuggcccugcacagaagcuaccugacaccuggcgauagcagcagcggauggacagcuggugccgccgcuuacuaugugggcuaccugcagccuagaaccuuccugcugaaguacaacgagaacggcaccaucaccgacgccguggauugugcucuggauccucugagcgagacaaagugcacccugaaguccuucaccguggaaaagggcaucuaccagaccagcaacuuccgggugcagcccaccgaauccaucgugcgguuccccaauaucaccaaucugugccccuucggcgagguguucaaugccaccagauucgccucuguguacgccuggaaccggaagcggaucagcaauugcguggccgacuacuccgugcuguacaacuccgccagcuucagcaccuucaagugcuacggcguguccccuaccaagcugaacgaccugugcuucacaaacguguacgccgacagcuucgugauccggggagaugaagugcggcagauugccccuggacagacaggcaagaucgccgacuacaacuacaagcugcccgacgacuucaccggcugugugauugccuggaacagcaacaaccuggacuccaaagucggcggcaacuacaauuaccuguaccggcuguuccggaaguccaaucugaagcccuucgagcgggacaucuccaccgagaucuaucaggccggcagcaccccuuguaacggcguggaaggcuucaacugcuacuucccacugcaguccuacggcuuucagcccacaaauggcgugggcuaucagcccuacagagugguggugcugagcuucgaacugcugcaugccccugccacagugugcggcccuaagaaaagcaccaaucucgugaagaacaaaugcgugaacuucaacuucaacggccugaccggcaccggcgugcugacagagagcaacaagaaguuccugccauuccagcaguuuggccgggauaucgccgauaccacagacgccguuagagauccccagacacuggaaauccuggacaucaccccuugcagcuucggcggagugucugugaucaccccuggcaccaacaccagcaaucagguggcagugcuguaccaggacgugaacuguaccgaagugcccguggccauucacgccgaucagcugacaccuacauggcggguguacuccaccggcagcaauguguuucagaccagagccggcugucugaucggagccgagcacgugaacaauagcuacgagugcgacauccccaucggcgcuggaaucugcgccagcuaccagacacagacaaacagcccucggagagccagaagcguggccagccagagcaucauugccuacacaaugucucugggcgccgagaacagcguggccuacuccaacaacucuaucgcuauccccaccaacuucaccaucagcgugaccacagagauccugccuguguccaugaccaagaccagcguggacugcaccauguacaucugcggcgauuccaccgagugcuccaaccugcugcugcaguacggcagcuucugcacccagcugaauagagcccugacagggaucgccguggaacaggacaagaacacccaagagguguucgcccaagugaagcagaucuacaagaccccuccuaucaaggacuucggcggcuucaauuucagccagauucugcccgauccuagcaagcccagcaagcggagcuucaucgaggaccugcuguucaacaaagugacacuggccgacgccggcuucaucaagcaguauggcgauugucugggcgacauugccgccagggaucugauuugcgcccagaaguuuaacggacugacagugcugccuccucugcugaccgaugagaugaucgcccaguacacaucugcccugcuggccggcacaaucacaagcggcuggacauuuggagcaggcgccgcucugcagauccccuuugcuaugcagauggccuaccgguucaacggcaucggagugacccagaaugugcuguacgagaaccagaagcugaucgccaaccaguucaacagcgccaucggcaagauccaggacagccugagcagcacagcaagcgcccugggaaagcugcaggacguggucaaccagaaugcccaggcacugaacacccuggucaagcagcuguccuccaacuucggcgccaucagcucugugcugaacgauauccugagcagacuggacccuccugaggccgaggugcagaucgacagacugaucacaggcagacugcagagccuccagacauacgugacccagcagcugaucagagccgccgagauuagagccucugccaaucuggccgccaccaagaugucugagugugugcugggccagagcaagagaguggacuuuugcggcaagggcuaccaccugaugagcuucccucagucugccccucacggcgugguguuucugcacgugacauaugugcccgcucaagagaagaauuucaccaccgcuccagccaucugccacgacggcaaagcccacuuuccuagagaaggcguguucguguccaacggcacccauugguucgugacacagcggaacuucuacgagccccagaucaucaccaccgacaacaccuucgugucuggcaacugcgacgucgugaucggcauugugaacaauaccguguacgacccucugcagcccgagcuggacagcuucaaagaggaacuggacaaguacuuuaagaaccacacaagccccgacguggaccugggcgauaucagcggaaucaaugccagcgucgugaacauccagaaagagaucgaccggcugaacgagguggccaagaaucugaacgagagccugaucgaccugcaagaacuggggaaguacgagcaguacaucaaguggcccugguacaucuggcugggcuuuaucgccggacugauugccaucgugauggucacaaucaugcuguguugcaugaccagcugcuguagcugccugaagggcuguuguagcuguggcagcugcugcaaguucgacgaggacgauucugagcccgugcugaagggcgugaaacugcacuacacaugauaauaggcuggagccucgguggccuagcuucuugccccuugggccuccccccagccccuccuccccuuccugcacccguacccccguggucuuugaauaaagucugagugggcggcaaaaaaaaaaaaaaaaaaaaaaaaaaaaaaaaaaaaaaaaaaaaaaaaaaaaaaaaaaaaaaaaaaaaaaaaaaaaaaaaaaaaaaaaaaaaaaaaaaaa

SEQ ID NO: 26248 - RNA, 4095 nt, Artificial Sequence
  SARS-CoV-2/Wuhan/WIV05/2019__EPI_ISL_402128 spike protein mRNA gc mod (1-1273)(K986P_V987P_ D614G)
gggaaauaagagagaaaagaagaguaagaagaaauauaagaccccggcgccgccaccauguucguguuccuggugcugcugccucugguguccagccagugugugaaccugaccaccagaacacagcugccuccagccuacaccaacagcuuuaccagaggcguguacuaccccgacaagguguucagauccagcgugcugcacucuacccaggaccuguuccugccuuucuucagcaacgugaccugguuccacgccauccacguguccggcaccaauggcaccaagagauucgacaaccccgugcugcccuucaacgacgggguguacuuugccagcaccgagaaguccaacaucaucagaggcuggaucuucggcaccacacuggacagcaagacccagagccugcugaucgugaacaacgccaccaacguggucaucaaagugugcgaguuccaguucugcaacgaccccuuccugggcgucuacuaccacaagaacaacaagagcuggauggaaagcgaguuccggguguacagcagcgccaacaacugcaccuucgaguacgugucccagccuuuccugauggaccuggaaggcaagcagggcaacuucaagaaccugcgcgaguucguguuuaagaacaucgacggcuacuucaagaucuacagcaagcacaccccuaucaaccucgugcgggaucugccucagggcuucucugcucuggaaccccugguggaucugcccaucggcaucaacaucacccgguuucagacacugcuggcccugcacagaagcuaccugacaccuggcgauagcagcagcggauggacagcuggugccgccgcuuacuaugugggcuaccugcagccuagaaccuuccugcugaaguacaacgagaacggcaccaucaccgacgccguggauugugcucuggauccucugagcgagacaaagugcacccugaaguccuucaccguggaaaagggcaucuaccagaccagcaacuuccgggugcagcccaccgaauccaucgugcgguuccccaauaucaccaaucugugccccuucggcgagguguucaaugccaccagauucgccucuguguacgccuggaaccggaagcggaucagcaauugcguggccgacuacuccgugcuguacaacuccgccagcuucagcaccuucaagugcuacggcguguccccuaccaagcugaacgaccugugcuucacaaacguguacgccgacagcuucgugauccggggagaugaagugcggcagauugccccuggacagacaggcaagaucgccgacuacaacuacaagcugcccgacgacuucaccggcugugugauugccuggaacagcaacaaccuggacuccaaagucggcggcaacuacaauuaccuguaccggcuguuccggaaguccaaucugaagcccuucgagcgggacaucuccaccgagaucuaucaggccggcagcaccccuuguaacggcguggaaggcuucaacugcuacuucccacugcaguccuacggcuuucagcccacaaauggcgugggcuaucagcccuacagagugguggugcugagcuucgaacugcugcaugccccugccacagugugcggcccuaagaaaagcaccaaucucgugaagaacaaaugcgugaacuucaacuucaacggccugaccggcaccggcgugcugacagagagcaacaagaaguuccugccauuccagcaguuuggccgggauaucgccgauaccacagacgccguuagagauccccagacacuggaaauccuggacaucaccccuugcagcuucggcggagugucugugaucaccccuggcaccaacaccagcaaucagguggcagugcuguaccagggcgugaacuguaccgaagugcccguggccauucacgccgaucagcugacaccuacauggcggguguacuccaccggcagcaauguguuucagaccagagccggcugucugaucggagccgagcacgugaacaauagcuacgagugcgacauccccaucggcgcuggaaucugcgccagcuaccagacacagacaaacagcccucggagagccagaagcguggccagccagagcaucauugccuacacaaugucucugggcgccgagaacagcguggccuacuccaacaacucuaucgcuauccccaccaacuucaccaucagcgugaccacagagauccugccuguguccaugaccaagaccagcguggacugcaccauguacaucugcggcgauuccaccgagugcuccaaccugcugcugcaguacggcagcuucugcacccagcugaauagagcccugacagggaucgccguggaacaggacaagaacacccaagagguguucgcccaagugaagcagaucuacaagaccccuccuaucaaggacuucggcggcuucaauuucagccagauucugcccgauccuagcaagcccagcaagcggagcuucaucgaggaccugcuguucaacaaagugacacuggccgacgccggcuucaucaagcaguauggcgauugucugggcgacauugccgccagggaucugauuugcgcccagaaguuuaacggacugacagugcugccuccucugcugaccgaugagaugaucgcccaguacacaucugcccugcuggccggcacaaucacaagcggcuggacauuuggagcaggcgccgcucugcagauccccuuugcuaugcagauggccuaccgguucaacggcaucggagugacccagaaugugcuguacgagaaccagaagcugaucgccaaccaguucaacagcgccaucggcaagauccaggacagccugagcagcacagcaagcgcccugggaaagcugcaggacguggucaaccagaaugcccaggcacugaacacccuggucaagcagcuguccuccaacuucggcgccaucagcucugugcugaacgauauccugagcagacuggacccuccugaggccgaggugcagaucgacagacugaucacaggcagacugcagagccuccagacauacgugacccagcagcugaucagagccgccgagauuagagccucugccaaucuggccgccaccaagaugucugagugugugcugggccagagcaagagaguggacuuuugcggcaagggcuaccaccugaugagcuucccucagucugccccucacggcgugguguuucugcacgugacauaugugcccgcucaagagaagaauuucaccaccgcuccagccaucugccacgacggcaaagcccacuuuccuagagaaggcguguucguguccaacggcacccauugguucgugacacagcggaacuucuacgagccccagaucaucaccaccgacaacaccuucgugucuggcaacugcgacgucgugaucggcauugugaacaauaccguguacgacccucugcagcccgagcuggacagcuucaaagaggaacuggacaaguacuuuaagaaccacacaagccccgacguggaccugggcgauaucagcggaaucaaugccagcgucgugaacauccagaaagagaucgaccggcugaacgagguggccaagaaucugaacgagagccugaucgaccugcaagaacuggggaaguacgagcaguacaucaaguggcccugguacaucuggcugggcuuuaucgccggacugauugccaucgugauggucacaaucaugcuguguugcaugaccagcugcuguagcugccugaagggcuguuguagcuguggcagcugcugcaaguucgacgaggacgauucugagcccgugcugaagggcgugaaacugcacuacacaugauaauaggcuggagccucgguggccuagcuucuugccccuugggccuccccccagccccuccuccccuuccugcacccguacccccguggucuuugaauaaagucugagugggcggcaaaaaaaaaaaaaaaaaaaaaaaaaaaaaaaaaaaaaaaaaaaaaaaaaaaaaaaaaaaaaaaaaaaaaaaaaaaaaaaaaaaaaaaaaaaaaaaaaaaa

SEQ ID NO: 26249 - RNA, 4095 nt, Artificial Sequence
  SARS-CoV-2/Wuhan/WIV05/2019__EPI_ISL_402128 spike protein mRNA gc mod (1-1273)(K986P_V987P_A222V_D614G)
gggaaauaagagagaaaagaagaguaagaagaaauauaagaccccggcgccgccaccauguucguguuccuggugcugcugccucugguguccagccagugugugaaccugaccaccagaacacagcugccuccagccuacaccaacagcuuuaccagaggcguguacuaccccgacaagguguucagauccagcgugcugcacucuacccaggaccuguuccugccuuucuucagcaacgugaccugguuccacgccauccacguguccggcaccaauggcaccaagagauucgacaaccccgugcugcccuucaacgacgggguguacuuugccagcaccgagaaguccaacaucaucagaggcuggaucuucggcaccacacuggacagcaagacccagagccugcugaucgugaacaacgccaccaacguggucaucaaagugugcgaguuccaguucugcaacgaccccuuccugggcgucuacuaccacaagaacaacaagagcuggauggaaagcgaguuccggguguacagcagcgccaacaacugcaccuucgaguacgugucccagccuuuccugauggaccuggaaggcaagcagggcaacuucaagaaccugcgcgaguucguguuuaagaacaucgacggcuacuucaagaucuacagcaagcacaccccuaucaaccucgugcgggaucugccucagggcuucucugugcuggaaccccugguggaucugcccaucggcaucaacaucacccgguuucagacacugcuggcccugcacagaagcuaccugacaccuggcgauagcagcagcggauggacagcuggugccgccgcuuacuaugugggcuaccugcagccuagaaccuuccugcugaaguacaacgagaacggcaccaucaccgacgccguggauugugcucuggauccucugagcgagacaaagugcacccugaaguccuucaccguggaaaagggcaucuaccagaccagcaacuuccgggugcagcccaccgaauccaucgugcgguuccccaauaucaccaaucugugccccuucggcgagguguucaaugccaccagauucgccucuguguacgccuggaaccggaagcggaucagcaauugcguggccgacuacuccgugcuguacaacuccgccagcuucagcaccuucaagugcuacggcguguccccuaccaagcugaacgaccugugcuucacaaacguguacgccgacagcuucgugauccggggagaugaagugcggcagauugccccuggacagacaggcaagaucgccgacuacaacuacaagcugcccgacgacuucaccggcugugugauugccuggaacagcaacaaccuggacuccaaagucggcggcaacuacaauuaccuguaccggcuguuccggaaguccaaucugaagcccuucgagcgggacaucuccaccgagaucuaucaggccggcagcaccccuuguaacggcguggaaggcuucaacugcuacuucccacugcaguccuacggcuuucagcccacaaauggcgugggcuaucagcccuacagagugguggugcugagcuucgaacugcugcaugccccugccacagugugcggcccuaagaaaagcaccaaucucgugaagaacaaaugcgugaacuucaacuucaacggccugaccggcaccggcgugcugacagagagcaacaagaaguuccugccauuccagcaguuuggccgggauaucgccgauaccacagacgccguuagagauccccagacacuggaaauccuggacaucaccccuugcagcuucggcggagugucugugaucaccccuggcaccaacaccagcaaucagguggcagugcuguaccagggcgugaacuguaccgaagugcccguggccauucacgccgaucagcugacaccuacauggcggguguacuccaccggcagcaauguguuucagaccagagccggcugucugaucggagccgagcacgugaacaauagcuacgagugcgacauccccaucggcgcuggaaucugcgccagcuaccagacacagacaaacagcccucggagagccagaagcguggccagccagagcaucauugccuacacaaugucucugggcgccgagaacagcguggccuacuccaacaacucuaucgcuauccccaccaacuucaccaucagcgugaccacagagauccugccuguguccaugaccaagaccagcguggacugcaccauguacaucugcggcgauuccaccgagugcuccaaccugcugcugcaguacggcagcuucugcacccagcugaauagagcccugacagggaucgccguggaacaggacaagaacacccaagagguguucgcccaagugaagcagaucuacaagaccccuccuaucaaggacuucggcggcuucaauuucagccagauucugcccgauccuagcaagcccagcaagcggagcuucaucgaggaccugcuguucaacaaagugacacuggccgacgccggcuucaucaagcaguauggcgauugucugggcgacauugccgccagggaucugauuugcgcccagaaguuuaacggacugacagugcugccuccucugcugaccgaugagaugaucgcccaguacacaucugcccugcuggccggcacaaucacaagcggcuggacauuuggagcaggcgccgcucugcagauccccuuugcuaugcagauggccuaccgguucaacggcaucggagugacccagaaugugcuguacgagaaccagaagcugaucgccaaccaguucaacagcgccaucggcaagauccaggacagccugagcagcacagcaagcgcccugggaaagcugcaggacguggucaaccagaaugcccaggcacugaacacccuggucaagcagcuguccuccaacuucggcgccaucagcucugugcugaacgauauccugagcagacuggacccuccugaggccgaggugcagaucgacagacugaucacaggcagacugcagagccuccagacauacgugacccagcagcugaucagagccgccgagauuagagccucugccaaucuggccgccaccaagaugucugagugugugcugggccagagcaagagaguggacuuuugcggcaagggcuaccaccugaugagcuucccucagucugccccucacggcgugguguuucugcacgugacauaugugcccgcucaagagaagaauuucaccaccgcuccagccaucugccacgacggcaaagcccacuuuccuagagaaggcguguucguguccaacggcacccauugguucgugacacagcggaacuucuacgagccccagaucaucaccaccgacaacaccuucgugucuggcaacugcgacgucgugaucggcauugugaacaauaccguguacgacccucugcagcccgagcuggacagcuucaaagaggaacuggacaaguacuuuaagaaccacacaagccccgacguggaccugggcgauaucagcggaaucaaugccagcgucgugaacauccagaaagagaucgaccggcugaacgagguggccaagaaucugaacgagagccugaucgaccugcaagaacuggggaaguacgagcaguacaucaaguggcccugguacaucuggcugggcuuuaucgccggacugauugccaucgugauggucacaaucaugcuguguugcaugaccagcugcuguagcugccugaagggcuguuguagcuguggcagcugcugcaaguucgacgaggacgauucugagcccgugcugaagggcgugaaacugcacuacacaugauaauaggcuggagccucgguggccuagcuucuugccccuugggccuccccccagccccuccuccccuuccugcacccguacccccguggucuuugaauaaagucugagugggcggcaaaaaaaaaaaaaaaaaaaaaaaaaaaaaaaaaaaaaaaaaaaaaaaaaaaaaaaaaaaaaaaaaaaaaaaaaaaaaaaaaaaaaaaaaaaaaaaaaaaa

SEQ ID NO: 26250 - RNA, 4095 nt, Artificial Sequence
  SARS-CoV-2/Wuhan/WIV05/2019__EPI_ISL_402128 spike protein mRNA gc mod (1-1273)(K986P_V987P_N439K_D614G)
gggaaauaagagagaaaagaagaguaagaagaaauauaagaccccggcgccgccaccauguucguguuccuggugcugcugccucugguguccagccagugugugaaccugaccaccagaacacagcugccuccagccuacaccaacagcuuuaccagaggcguguacuaccccgacaagguguucagauccagcgugcugcacucuacccaggaccuguuccugccuuucuucagcaacgugaccugguuccacgccauccacguguccggcaccaauggcaccaagagauucgacaaccccgugcugcccuucaacgacgggguguacuuugccagcaccgagaaguccaacaucaucagaggcuggaucuucggcaccacacuggacagcaagacccagagccugcugaucgugaacaacgccaccaacguggucaucaaagugugcgaguuccaguucugcaacgaccccuuccugggcgucuacuaccacaagaacaacaagagcuggauggaaagcgaguuccggguguacagcagcgccaacaacugcaccuucgaguacgugucccagccuuuccugauggaccuggaaggcaagcagggcaacuucaagaaccugcgcgaguucguguuuaagaacaucgacggcuacuucaagaucuacagcaagcacaccccuaucaaccucgugcgggaucugccucagggcuucucugcucuggaaccccugguggaucugcccaucggcaucaacaucacccgguuucagacacugcuggcccugcacagaagcuaccugacaccuggcgauagcagcagcggauggacagcuggugccgccgcuuacuaugugggcuaccugcagccuagaaccuuccugcugaaguacaacgagaacggcaccaucaccgacgccguggauugugcucuggauccucugagcgagacaaagugcacccugaaguccuucaccguggaaaagggcaucuaccagaccagcaacuuccgggugcagcccaccgaauccaucgugcgguuccccaauaucaccaaucugugccccuucggcgagguguucaaugccaccagauucgccucuguguacgccuggaaccggaagcggaucagcaauugcguggccgacuacuccgugcuguacaacuccgccagcuucagcaccuucaagugcuacggcguguccccuaccaagcugaacgaccugugcuucacaaacguguacgccgacagcuucgugauccggggagaugaagugcggcagauugccccuggacagacaggcaagaucgccgacuacaacuacaagcugcccgacgacuucaccggcugugugauugccuggaacagcaagaaccuggacuccaaagucggcggcaacuacaauuaccuguaccggcuguuccggaaguccaaucugaagcccuucgagcgggacaucuccaccgagaucuaucaggccggcagcaccccuuguaacggcguggaaggcuucaacugcuacuucccacugcaguccuacggcuuucagcccacaaauggcgugggcuaucagcccuacagagugguggugcugagcuucgaacugcugcaugccccugccacagugugcggcccuaagaaaagcaccaaucucgugaagaacaaaugcgugaacuucaacuucaacggccugaccggcaccggcgugcugacagagagcaacaagaaguuccugccauuccagcaguuuggccgggauaucgccgauaccacagacgccguuagagauccccagacacuggaaauccuggacaucaccccuugcagcuucggcggagugucugugaucaccccuggcaccaacaccagcaaucagguggcagugcuguaccagggcgugaacuguaccgaagugcccguggccauucacgccgaucagcugacaccuacauggcggguguacuccaccggcagcaauguguuucagaccagagccggcugucugaucggagccgagcacgugaacaauagcuacgagugcgacauccccaucggcgcuggaaucugcgccagcuaccagacacagacaaacagcccucggagagccagaagcguggccagccagagcaucauugccuacacaaugucucugggcgccgagaacagcguggccuacuccaacaacucuaucgcuauccccaccaacuucaccaucagcgugaccacagagauccugccuguguccaugaccaagaccagcguggacugcaccauguacaucugcggcgauuccaccgagugcuccaaccugcugcugcaguacggcagcuucugcacccagcugaauagagcccugacagggaucgccguggaacaggacaagaacacccaagagguguucgcccaagugaagcagaucuacaagaccccuccuaucaaggacuucggcggcuucaauuucagccagauucugcccgauccuagcaagcccagcaagcggagcuucaucgaggaccugcuguucaacaaagugacacuggccgacgccggcuucaucaagcaguauggcgauugucugggcgacauugccgccagggaucugauuugcgcccagaaguuuaacggacugacagugcugccuccucugcugaccgaugagaugaucgcccaguacacaucugcccugcuggccggcacaaucacaagcggcuggacauuuggagcaggcgccgcucugcagauccccuuugcuaugcagauggccuaccgguucaacggcaucggagugacccagaaugugcuguacgagaaccagaagcugaucgccaaccaguucaacagcgccaucggcaagauccaggacagccugagcagcacagcaagcgcccugggaaagcugcaggacguggucaaccagaaugcccaggcacugaacacccuggucaagcagcuguccuccaacuucggcgccaucagcucugugcugaacgauauccugagcagacuggacccuccugaggccgaggugcagaucgacagacugaucacaggcagacugcagagccuccagacauacgugacccagcagcugaucagagccgccgagauuagagccucugccaaucuggccgccaccaagaugucugagugugugcugggccagagcaagagaguggacuuuugcggcaagggcuaccaccugaugagcuucccucagucugccccucacggcgugguguuucugcacgugacauaugugcccgcucaagagaagaauuucaccaccgcuccagccaucugccacgacggcaaagcccacuuuccuagagaaggcguguucguguccaacggcacccauugguucgugacacagcggaacuucuacgagccccagaucaucaccaccgacaacaccuucgugucuggcaacugcgacgucgugaucggcauugugaacaauaccguguacgacccucugcagcccgagcuggacagcuucaaagaggaacuggacaaguacuuuaagaaccacacaagccccgacguggaccugggcgauaucagcggaaucaaugccagcgucgugaacauccagaaagagaucgaccggcugaacgagguggccaagaaucugaacgagagccugaucgaccugcaagaacuggggaaguacgagcaguacaucaaguggcccugguacaucuggcugggcuuuaucgccggacugauugccaucgugauggucacaaucaugcuguguugcaugaccagcugcuguagcugccugaagggcuguuguagcuguggcagcugcugcaaguucgacgaggacgauucugagcccgugcugaagggcgugaaacugcacuacacaugauaauaggcuggagccucgguggccuagcuucuugccccuugggccuccccccagccccuccuccccuuccugcacccguacccccguggucuuugaauaaagucugagugggcggcaaaaaaaaaaaaaaaaaaaaaaaaaaaaaaaaaaaaaaaaaaaaaaaaaaaaaaaaaaaaaaaaaaaaaaaaaaaaaaaaaaaaaaaaaaaaaaaaaaaa

SEQ ID NO: 26251 - RNA, 4095 nt, Artificial Sequence
  SARS-CoV-2/Wuhan/WIV05/2019__EPI_ISL_402128 spike protein mRNA gc mod (1-1273)(K986P_V987P_S477N_D614G)
gggaaauaagagagaaaagaagaguaagaagaaauauaagaccccggcgccgccaccauguucguguuccuggugcugcugccucugguguccagccagugugugaaccugaccaccagaacacagcugccuccagccuacaccaacagcuuuaccagaggcguguacuaccccgacaagguguucagauccagcgugcugcacucuacccaggaccuguuccugccuuucuucagcaacgugaccugguuccacgccauccacguguccggcaccaauggcaccaagagauucgacaaccccgugcugcccuucaacgacgggguguacuuugccagcaccgagaaguccaacaucaucagaggcuggaucuucggcaccacacuggacagcaagacccagagccugcugaucgugaacaacgccaccaacguggucaucaaagugugcgaguuccaguucugcaacgaccccuuccugggcgucuacuaccacaagaacaacaagagcuggauggaaagcgaguuccggguguacagcagcgccaacaacugcaccuucgaguacgugucccagccuuuccugauggaccuggaaggcaagcagggcaacuucaagaaccugcgcgaguucguguuuaagaacaucgacggcuacuucaagaucuacagcaagcacaccccuaucaaccucgugcgggaucugccucagggcuucucugcucuggaaccccugguggaucugcccaucggcaucaacaucacccgguuucagacacugcuggcccugcacagaagcuaccugacaccuggcgauagcagcagcggauggacagcuggugccgccgcuuacuaugugggcuaccugcagccuagaaccuuccugcugaaguacaacgagaacggcaccaucaccgacgccguggauugugcucuggauccucugagcgagacaaagugcacccugaaguccuucaccguggaaaagggcaucuaccagaccagcaacuuccgggugcagcccaccgaauccaucgugcgguuccccaauaucaccaaucugugccccuucggcgagguguucaaugccaccagauucgccucuguguacgccuggaaccggaagcggaucagcaauugcguggccgacuacuccgugcuguacaacuccgccagcuucagcaccuucaagugcuacggcguguccccuaccaagcugaacgaccugugcuucacaaacguguacgccgacagcuucgugauccggggagaugaagugcggcagauugccccuggacagacaggcaagaucgccgacuacaacuacaagcugcccgacgacuucaccggcugugugauugccuggaacagcaacaaccuggacuccaaagucggcggcaacuacaauuaccuguaccggcuguuccggaaguccaaucugaagcccuucgagcgggacaucuccaccgagaucuaucaggccggcaacaccccuuguaacggcguggaaggcuucaacugcuacuucccacugcaguccuacggcuuucagcccacaaauggcgugggcuaucagcccuacagagugguggugcugagcuucgaacugcugcaugccccugccacagugugcggcccuaagaaaagcaccaaucucgugaagaacaaaugcgugaacuucaacuucaacggccugaccggcaccggcgugcugacagagagcaacaagaaguuccugccauuccagcaguuuggccgggauaucgccgauaccacagacgccguuagagauccccagacacuggaaauccuggacaucaccccuugcagcuucggcggagugucugugaucaccccuggcaccaacaccagcaaucagguggcagugcuguaccagggcgugaacuguaccgaagugcccguggccauucacgccgaucagcugacaccuacauggcggguguacuccaccggcagcaauguguuucagaccagagccggcugucugaucggagccgagcacgugaacaauagcuacgagugcgacauccccaucggcgcuggaaucugcgccagcuaccagacacagacaaacagcccucggagagccagaagcguggccagccagagcaucauugccuacacaaugucucugggcgccgagaacagcguggccuacuccaacaacucuaucgcuauccccaccaacuucaccaucagcgugaccacagagauccugccuguguccaugaccaagaccagcguggacugcaccauguacaucugcggcgauuccaccgagugcuccaaccugcugcugcaguacggcagcuucugcacccagcugaauagagcccugacagggaucgccguggaacaggacaagaacacccaagagguguucgcccaagugaagcagaucuacaagaccccuccuaucaaggacuucggcggcuucaauuucagccagauucugcccgauccuagcaagcccagcaagcggagcuucaucgaggaccugcuguucaacaaagugacacuggccgacgccggcuucaucaagcaguauggcgauugucugggcgacauugccgccagggaucugauuugcgcccagaaguuuaacggacugacagugcugccuccucugcugaccgaugagaugaucgcccaguacacaucugcccugcuggccggcacaaucacaagcggcuggacauuuggagcaggcgccgcucugcagauccccuuugcuaugcagauggccuaccgguucaacggcaucggagugacccagaaugugcuguacgagaaccagaagcugaucgccaaccaguucaacagcgccaucggcaagauccaggacagccugagcagcacagcaagcgcccugggaaagcugcaggacguggucaaccagaaugcccaggcacugaacacccuggucaagcagcuguccuccaacuucggcgccaucagcucugugcugaacgauauccugagcagacuggacccuccugaggccgaggugcagaucgacagacugaucacaggcagacugcagagccuccagacauacgugacccagcagcugaucagagccgccgagauuagagccucugccaaucuggccgccaccaagaugucugagugugugcugggccagagcaagagaguggacuuuugcggcaagggcuaccaccugaugagcuucccucagucugccccucacggcgugguguuucugcacgugacauaugugcccgcucaagagaagaauuucaccaccgcuccagccaucugccacgacggcaaagcccacuuuccuagagaaggcguguucguguccaacggcacccauugguucgugacacagcggaacuucuacgagccccagaucaucaccaccgacaacaccuucgugucuggcaacugcgacgucgugaucggcauugugaacaauaccguguacgacccucugcagcccgagcuggacagcuucaaagaggaacuggacaaguacuuuaagaaccacacaagccccgacguggaccugggcgauaucagcggaaucaaugccagcgucgugaacauccagaaagagaucgaccggcugaacgagguggccaagaaucugaacgagagccugaucgaccugcaagaacuggggaaguacgagcaguacaucaaguggcccugguacaucuggcugggcuuuaucgccggacugauugccaucgugauggucacaaucaugcuguguugcaugaccagcugcuguagcugccugaagggcuguuguagcuguggcagcugcugcaaguucgacgaggacgauucugagcccgugcugaagggcgugaaacugcacuacacaugauaauaggcuggagccucgguggccuagcuucuugccccuugggccuccccccagccccuccuccccuuccugcacccguacccccguggucuuugaauaaagucugagugggcggcaaaaaaaaaaaaaaaaaaaaaaaaaaaaaaaaaaaaaaaaaaaaaaaaaaaaaaaaaaaaaaaaaaaaaaaaaaaaaaaaaaaaaaaaaaaaaaaaaaaa

SEQ ID NO: 26252 - RNA, 4095 nt, Artificial Sequence
  SARS-CoV-2/Wuhan/WIV05/2019__EPI_ISL_402128 spike protein mRNA gc mod (1-1273)(K986P_V987P_N501Y_D614G)
gggaaauaagagagaaaagaagaguaagaagaaauauaagaccccggcgccgccaccauguucguguuccuggugcugcugccucugguguccagccagugugugaaccugaccaccagaacacagcugccuccagccuacaccaacagcuuuaccagaggcguguacuaccccgacaagguguucagauccagcgugcugcacucuacccaggaccuguuccugccuuucuucagcaacgugaccugguuccacgccauccacguguccggcaccaauggcaccaagagauucgacaaccccgugcugcccuucaacgacgggguguacuuugccagcaccgagaaguccaacaucaucagaggcuggaucuucggcaccacacuggacagcaagacccagagccugcugaucgugaacaacgccaccaacguggucaucaaagugugcgaguuccaguucugcaacgaccccuuccugggcgucuacuaccacaagaacaacaagagcuggauggaaagcgaguuccggguguacagcagcgccaacaacugcaccuucgaguacgugucccagccuuuccugauggaccuggaaggcaagcagggcaacuucaagaaccugcgcgaguucguguuuaagaacaucgacggcuacuucaagaucuacagcaagcacaccccuaucaaccucgugcgggaucugccucagggcuucucugcucuggaaccccugguggaucugcccaucggcaucaacaucacccgguuucagacacugcuggcccugcacagaagcuaccugacaccuggcgauagcagcagcggauggacagcuggugccgccgcuuacuaugugggcuaccugcagccuagaaccuuccugcugaaguacaacgagaacggcaccaucaccgacgccguggauugugcucuggauccucugagcgagacaaagugcacccugaaguccuucaccguggaaaagggcaucuaccagaccagcaacuuccgggugcagcccaccgaauccaucgugcgguuccccaauaucaccaaucugugccccuucggcgagguguucaaugccaccagauucgccucuguguacgccuggaaccggaagcggaucagcaauugcguggccgacuacuccgugcuguacaacuccgccagcuucagcaccuucaagugcuacggcguguccccuaccaagcugaacgaccugugcuucacaaacguguacgccgacagcuucgugauccggggagaugaagugcggcagauugccccuggacagacaggcaagaucgccgacuacaacuacaagcugcccgacgacuucaccggcugugugauugccuggaacagcaacaaccuggacuccaaagucggcggcaacuacaauuaccuguaccggcuguuccggaaguccaaucugaagcccuucgagcgggacaucuccaccgagaucuaucaggccggcagcaccccuuguaacggcguggaaggcuucaacugcuacuucccacugcaguccuacggcuuucagcccacauacggcgugggcuaucagcccuacagagugguggugcugagcuucgaacugcugcaugccccugccacagugugcggcccuaagaaaagcaccaaucucgugaagaacaaaugcgugaacuucaacuucaacggccugaccggcaccggcgugcugacagagagcaacaagaaguuccugccauuccagcaguuuggccgggauaucgccgauaccacagacgccguuagagauccccagacacuggaaauccuggacaucaccccuugcagcuucggcggagugucugugaucaccccuggcaccaacaccagcaaucagguggcagugcuguaccagggcgugaacuguaccgaagugcccguggccauucacgccgaucagcugacaccuacauggcggguguacuccaccggcagcaauguguuucagaccagagccggcugucugaucggagccgagcacgugaacaauagcuacgagugcgacauccccaucggcgcuggaaucugcgccagcuaccagacacagacaaacagcccucggagagccagaagcguggccagccagagcaucauugccuacacaaugucucugggcgccgagaacagcguggccuacuccaacaacucuaucgcuauccccaccaacuucaccaucagcgugaccacagagauccugccuguguccaugaccaagaccagcguggacugcaccauguacaucugcggcgauuccaccgagugcuccaaccugcugcugcaguacggcagcuucugcacccagcugaauagagcccugacagggaucgccguggaacaggacaagaacacccaagagguguucgcccaagugaagcagaucuacaagaccccuccuaucaaggacuucggcggcuucaauuucagccagauucugcccgauccuagcaagcccagcaagcggagcuucaucgaggaccugcuguucaacaaagugacacuggccgacgccggcuucaucaagcaguauggcgauugucugggcgacauugccgccagggaucugauuugcgcccagaaguuuaacggacugacagugcugccuccucugcugaccgaugagaugaucgcccaguacacaucugcccugcuggccggcacaaucacaagcggcuggacauuuggagcaggcgccgcucugcagauccccuuugcuaugcagauggccuaccgguucaacggcaucggagugacccagaaugugcuguacgagaaccagaagcugaucgccaaccaguucaacagcgccaucggcaagauccaggacagccugagcagcacagcaagcgcccugggaaagcugcaggacguggucaaccagaaugcccaggcacugaacacccuggucaagcagcuguccuccaacuucggcgccaucagcucugugcugaacgauauccugagcagacuggacccuccugaggccgaggugcagaucgacagacugaucacaggcagacugcagagccuccagacauacgugacccagcagcugaucagagccgccgagauuagagccucugccaaucuggccgccaccaagaugucugagugugugcugggccagagcaagagaguggacuuuugcggcaagggcuaccaccugaugagcuucccucagucugccccucacggcgugguguuucugcacgugacauaugugcccgcucaagagaagaauuucaccaccgcuccagccaucugccacgacggcaaagcccacuuuccuagagaaggcguguucguguccaacggcacccauugguucgugacacagcggaacuucuacgagccccagaucaucaccaccgacaacaccuucgugucuggcaacugcgacgucgugaucggcauugugaacaauaccguguacgacccucugcagcccgagcuggacagcuucaaagaggaacuggacaaguacuuuaagaaccacacaagccccgacguggaccugggcgauaucagcggaaucaaugccagcgucgugaacauccagaaagagaucgaccggcugaacgagguggccaagaaucugaacgagagccugaucgaccugcaagaacuggggaaguacgagcaguacaucaaguggcccugguacaucuggcugggcuuuaucgccggacugauugccaucgugauggucacaaucaugcuguguugcaugaccagcugcuguagcugccugaagggcuguuguagcuguggcagcugcugcaaguucgacgaggacgauucugagcccgugcugaagggcgugaaacugcacuacacaugauaauaggcuggagccucgguggccuagcuucuugccccuugggccuccccccagccccuccuccccuuccugcacccguacccccguggucuuugaauaaagucugagugggcggcaaaaaaaaaaaaaaaaaaaaaaaaaaaaaaaaaaaaaaaaaaaaaaaaaaaaaaaaaaaaaaaaaaaaaaaaaaaaaaaaaaaaaaaaaaaaaaaaaaaa

SEQ ID NO: 26253 - RNA, 4089 nt, Artificial Sequence
  SARS-CoV-2/Wuhan/WIV05/2019__EPI_ISL_402128 spike protein mRNA gc mod (1-1273)(K986P_V987P_H69del_V70del_D614G)
gggaaauaagagagaaaagaagaguaagaagaaauauaagaccccggcgccgccaccauguucguguuccuggugcugcugccucugguguccagccagugugugaaccugaccaccagaacacagcugccuccagccuacaccaacagcuuuaccagaggcguguacuaccccgacaagguguucagauccagcgugcugcacucuacccaggaccuguuccugccuuucuucagcaacgugaccugguuccacgccaucuccggcaccaauggcaccaagagauucgacaaccccgugcugcccuucaacgacgggguguacuuugccagcaccgagaaguccaacaucaucagaggcuggaucuucggcaccacacuggacagcaagacccagagccugcugaucgugaacaacgccaccaacguggucaucaaagugugcgaguuccaguucugcaacgaccccuuccugggcgucuacuaccacaagaacaacaagagcuggauggaaagcgaguuccggguguacagcagcgccaacaacugcaccuucgaguacgugucccagccuuuccugauggaccuggaaggcaagcagggcaacuucaagaaccugcgcgaguucguguuuaagaacaucgacggcuacuucaagaucuacagcaagcacaccccuaucaaccucgugcgggaucugccucagggcuucucugcucuggaaccccugguggaucugcccaucggcaucaacaucacccgguuucagacacugcuggcccugcacagaagcuaccugacaccuggcgauagcagcagcggauggacagcuggugccgccgcuuacuaugugggcuaccugcagccuagaaccuuccugcugaaguacaacgagaacggcaccaucaccgacgccguggauugugcucuggauccucugagcgagacaaagugcacccugaaguccuucaccguggaaaagggcaucuaccagaccagcaacuuccgggugcagcccaccgaauccaucgugcgguuccccaauaucaccaaucugugccccuucggcgagguguucaaugccaccagauucgccucuguguacgccuggaaccggaagcggaucagcaauugcguggccgacuacuccgugcuguacaacuccgccagcuucagcaccuucaagugcuacggcguguccccuaccaagcugaacgaccugugcuucacaaacguguacgccgacagcuucgugauccggggagaugaagugcggcagauugccccuggacagacaggcaagaucgccgacuacaacuacaagcugcccgacgacuucaccggcugugugauugccuggaacagcaacaaccuggacuccaaagucggcggcaacuacaauuaccuguaccggcuguuccggaaguccaaucugaagcccuucgagcgggacaucuccaccgagaucuaucaggccggcagcaccccuuguaacggcguggaaggcuucaacugcuacuucccacugcaguccuacggcuuucagcccacaaauggcgugggcuaucagcccuacagagugguggugcugagcuucgaacugcugcaugccccugccacagugugcggcccuaagaaaagcaccaaucucgugaagaacaaaugcgugaacuucaacuucaacggccugaccggcaccggcgugcugacagagagcaacaagaaguuccugccauuccagcaguuuggccgggauaucgccgauaccacagacgccguuagagauccccagacacuggaaauccuggacaucaccccuugcagcuucggcggagugucugugaucaccccuggcaccaacaccagcaaucagguggcagugcuguaccagggcgugaacuguaccgaagugcccguggccauucacgccgaucagcugacaccuacauggcggguguacuccaccggcagcaauguguuucagaccagagccggcugucugaucggagccgagcacgugaacaauagcuacgagugcgacauccccaucggcgcuggaaucugcgccagcuaccagacacagacaaacagcccucggagagccagaagcguggccagccagagcaucauugccuacacaaugucucugggcgccgagaacagcguggccuacuccaacaacucuaucgcuauccccaccaacuucaccaucagcgugaccacagagauccugccuguguccaugaccaagaccagcguggacugcaccauguacaucugcggcgauuccaccgagugcuccaaccugcugcugcaguacggcagcuucugcacccagcugaauagagcccugacagggaucgccguggaacaggacaagaacacccaagagguguucgcccaagugaagcagaucuacaagaccccuccuaucaaggacuucggcggcuucaauuucagccagauucugcccgauccuagcaagcccagcaagcggagcuucaucgaggaccugcuguucaacaaagugacacuggccgacgccggcuucaucaagcaguauggcgauugucugggcgacauugccgccagggaucugauuugcgcccagaaguuuaacggacugacagugcugccuccucugcugaccgaugagaugaucgcccaguacacaucugcccugcuggccggcacaaucacaagcggcuggacauuuggagcaggcgccgcucugcagauccccuuugcuaugcagauggccuaccgguucaacggcaucggagugacccagaaugugcuguacgagaaccagaagcugaucgccaaccaguucaacagcgccaucggcaagauccaggacagccugagcagcacagcaagcgcccugggaaagcugcaggacguggucaaccagaaugcccaggcacugaacacccuggucaagcagcuguccuccaacuucggcgccaucagcucugugcugaacgauauccugagcagacuggacccuccugaggccgaggugcagaucgacagacugaucacaggcagacugcagagccuccagacauacgugacccagcagcugaucagagccgccgagauuagagccucugccaaucuggccgccaccaagaugucugagugugugcugggccagagcaagagaguggacuuuugcggcaagggcuaccaccugaugagcuucccucagucugccccucacggcgugguguuucugcacgugacauaugugcccgcucaagagaagaauuucaccaccgcuccagccaucugccacgacggcaaagcccacuuuccuagagaaggcguguucguguccaacggcacccauugguucgugacacagcggaacuucuacgagccccagaucaucaccaccgacaacaccuucgugucuggcaacugcgacgucgugaucggcauugugaacaauaccguguacgacccucugcagcccgagcuggacagcuucaaagaggaacuggacaaguacuuuaagaaccacacaagccccgacguggaccugggcgauaucagcggaaucaaugccagcgucgugaacauccagaaagagaucgaccggcugaacgagguggccaagaaucugaacgagagccugaucgaccugcaagaacuggggaaguacgagcaguacaucaaguggcccugguacaucuggcugggcuuuaucgccggacugauugccaucgugauggucacaaucaugcuguguugcaugaccagcugcuguagcugccugaagggcuguuguagcuguggcagcugcugcaaguucgacgaggacgauucugagcccgugcugaagggcgugaaacugcacuacacaugauaauaggcuggagccucgguggccuagcuucuugccccuugggccuccccccagccccuccuccccuuccugcacccguacccccguggucuuugaauaaagucugagugggcggcaaaaaaaaaaaaaaaaaaaaaaaaaaaaaaaaaaaaaaaaaaaaaaaaaaaaaaaaaaaaaaaaaaaaaaaaaaaaaaaaaaaaaaaaaaaaaaaaaaaa

SEQ ID NO: 26254 - RNA, 4095 nt, Artificial Sequence
  SARS-CoV-2/Wuhan/WIV05/2019__EPI_ISL_402128 spike protein mRNA gc mod (1-1273)(K986P_V987P_Y453F_D614G)
gggaaauaagagagaaaagaagaguaagaagaaauauaagaccccggcgccgccaccauguucguguuccuggugcugcugccucugguguccagccagugugugaaccugaccaccagaacacagcugccuccagccuacaccaacagcuuuaccagaggcguguacuaccccgacaagguguucagauccagcgugcugcacucuacccaggaccuguuccugccuuucuucagcaacgugaccugguuccacgccauccacguguccggcaccaauggcaccaagagauucgacaaccccgugcugcccuucaacgacgggguguacuuugccagcaccgagaaguccaacaucaucagaggcuggaucuucggcaccacacuggacagcaagacccagagccugcugaucgugaacaacgccaccaacguggucaucaaagugugcgaguuccaguucugcaacgaccccuuccugggcgucuacuaccacaagaacaacaagagcuggauggaaagcgaguuccggguguacagcagcgccaacaacugcaccuucgaguacgugucccagccuuuccugauggaccuggaaggcaagcagggcaacuucaagaaccugcgcgaguucguguuuaagaacaucgacggcuacuucaagaucuacagcaagcacaccccuaucaaccucgugcgggaucugccucagggcuucucugcucuggaaccccugguggaucugcccaucggcaucaacaucacccgguuucagacacugcuggcccugcacagaagcuaccugacaccuggcgauagcagcagcggauggacagcuggugccgccgcuuacuaugugggcuaccugcagccuagaaccuuccugcugaaguacaacgagaacggcaccaucaccgacgccguggauugugcucuggauccucugagcgagacaaagugcacccugaaguccuucaccguggaaaagggcaucuaccagaccagcaacuuccgggugcagcccaccgaauccaucgugcgguuccccaauaucaccaaucugugccccuucggcgagguguucaaugccaccagauucgccucuguguacgccuggaaccggaagcggaucagcaauugcguggccgacuacuccgugcuguacaacuccgccagcuucagcaccuucaagugcuacggcguguccccuaccaagcugaacgaccugugcuucacaaacguguacgccgacagcuucgugauccggggagaugaagugcggcagauugccccuggacagacaggcaagaucgccgacuacaacuacaagcugcccgacgacuucaccggcugugugauugccuggaacagcaacaaccuggacuccaaagucggcggcaacuacaauuaccuguuccggcuguuccggaaguccaaucugaagcccuucgagcgggacaucuccaccgagaucuaucaggccggcagcaccccuuguaacggcguggaaggcuucaacugcuacuucccacugcaguccuacggcuuucagcccacaaauggcgugggcuaucagcccuacagagugguggugcugagcuucgaacugcugcaugccccugccacagugugcggcccuaagaaaagcaccaaucucgugaagaacaaaugcgugaacuucaacuucaacggccugaccggcaccggcgugcugacagagagcaacaagaaguuccugccauuccagcaguuuggccgggauaucgccgauaccacagacgccguuagagauccccagacacuggaaauccuggacaucaccccuugcagcuucggcggagugucugugaucaccccuggcaccaacaccagcaaucagguggcagugcuguaccagggcgugaacuguaccgaagugcccguggccauucacgccgaucagcugacaccuacauggcggguguacuccaccggcagcaauguguuucagaccagagccggcugucugaucggagccgagcacgugaacaauagcuacgagugcgacauccccaucggcgcuggaaucugcgccagcuaccagacacagacaaacagcccucggagagccagaagcguggccagccagagcaucauugccuacacaaugucucugggcgccgagaacagcguggccuacuccaacaacucuaucgcuauccccaccaacuucaccaucagcgugaccacagagauccugccuguguccaugaccaagaccagcguggacugcaccauguacaucugcggcgauuccaccgagugcuccaaccugcugcugcaguacggcagcuucugcacccagcugaauagagcccugacagggaucgccguggaacaggacaagaacacccaagagguguucgcccaagugaagcagaucuacaagaccccuccuaucaaggacuucggcggcuucaauuucagccagauucugcccgauccuagcaagcccagcaagcggagcuucaucgaggaccugcuguucaacaaagugacacuggccgacgccggcuucaucaagcaguauggcgauugucugggcgacauugccgccagggaucugauuugcgcccagaaguuuaacggacugacagugcugccuccucugcugaccgaugagaugaucgcccaguacacaucugcccugcuggccggcacaaucacaagcggcuggacauuuggagcaggcgccgcucugcagauccccuuugcuaugcagauggccuaccgguucaacggcaucggagugacccagaaugugcuguacgagaaccagaagcugaucgccaaccaguucaacagcgccaucggcaagauccaggacagccugagcagcacagcaagcgcccugggaaagcugcaggacguggucaaccagaaugcccaggcacugaacacccuggucaagcagcuguccuccaacuucggcgccaucagcucugugcugaacgauauccugagcagacuggacccuccugaggccgaggugcagaucgacagacugaucacaggcagacugcagagccuccagacauacgugacccagcagcugaucagagccgccgagauuagagccucugccaaucuggccgccaccaagaugucugagugugugcugggccagagcaagagaguggacuuuugcggcaagggcuaccaccugaugagcuucccucagucugccccucacggcgugguguuucugcacgugacauaugugcccgcucaagagaagaauuucaccaccgcuccagccaucugccacgacggcaaagcccacuuuccuagagaaggcguguucguguccaacggcacccauugguucgugacacagcggaacuucuacgagccccagaucaucaccaccgacaacaccuucgugucuggcaacugcgacgucgugaucggcauugugaacaauaccguguacgacccucugcagcccgagcuggacagcuucaaagaggaacuggacaaguacuuuaagaaccacacaagccccgacguggaccugggcgauaucagcggaaucaaugccagcgucgugaacauccagaaagagaucgaccggcugaacgagguggccaagaaucugaacgagagccugaucgaccugcaagaacuggggaaguacgagcaguacaucaaguggcccugguacaucuggcugggcuuuaucgccggacugauugccaucgugauggucacaaucaugcuguguugcaugaccagcugcuguagcugccugaagggcuguuguagcuguggcagcugcugcaaguucgacgaggacgauucugagcccgugcugaagggcgugaaacugcacuacacaugauaauaggcuggagccucgguggccuagcuucuugccccuugggccuccccccagccccuccuccccuuccugcacccguacccccguggucuuugaauaaagucugagugggcggcaaaaaaaaaaaaaaaaaaaaaaaaaaaaaaaaaaaaaaaaaaaaaaaaaaaaaaaaaaaaaaaaaaaaaaaaaaaaaaaaaaaaaaaaaaaaaaaaaaaa

SEQ ID NO: 26255 - RNA, 4095 nt, Artificial Sequence
  SARS-CoV-2/Wuhan/WIV05/2019__EPI_ISL_402128 spike protein mRNA gc mod (1-1273)(K986P_V987P_D614G_I692V)
gggaaauaagagagaaaagaagaguaagaagaaauauaagaccccggcgccgccaccauguucguguuccuggugcugcugccucugguguccagccagugugugaaccugaccaccagaacacagcugccuccagccuacaccaacagcuuuaccagaggcguguacuaccccgacaagguguucagauccagcgugcugcacucuacccaggaccuguuccugccuuucuucagcaacgugaccugguuccacgccauccacguguccggcaccaauggcaccaagagauucgacaaccccgugcugcccuucaacgacgggguguacuuugccagcaccgagaaguccaacaucaucagaggcuggaucuucggcaccacacuggacagcaagacccagagccugcugaucgugaacaacgccaccaacguggucaucaaagugugcgaguuccaguucugcaacgaccccuuccugggcgucuacuaccacaagaacaacaagagcuggauggaaagcgaguuccggguguacagcagcgccaacaacugcaccuucgaguacgugucccagccuuuccugauggaccuggaaggcaagcagggcaacuucaagaaccugcgcgaguucguguuuaagaacaucgacggcuacuucaagaucuacagcaagcacaccccuaucaaccucgugcgggaucugccucagggcuucucugcucuggaaccccugguggaucugcccaucggcaucaacaucacccgguuucagacacugcuggcccugcacagaagcuaccugacaccuggcgauagcagcagcggauggacagcuggugccgccgcuuacuaugugggcuaccugcagccuagaaccuuccugcugaaguacaacgagaacggcaccaucaccgacgccguggauugugcucuggauccucugagcgagacaaagugcacccugaaguccuucaccguggaaaagggcaucuaccagaccagcaacuuccgggugcagcccaccgaauccaucgugcgguuccccaauaucaccaaucugugccccuucggcgagguguucaaugccaccagauucgccucuguguacgccuggaaccggaagcggaucagcaauugcguggccgacuacuccgugcuguacaacuccgccagcuucagcaccuucaagugcuacggcguguccccuaccaagcugaacgaccugugcuucacaaacguguacgccgacagcuucgugauccggggagaugaagugcggcagauugccccuggacagacaggcaagaucgccgacuacaacuacaagcugcccgacgacuucaccggcugugugauugccuggaacagcaacaaccuggacuccaaagucggcggcaacuacaauuaccuguaccggcuguuccggaaguccaaucugaagcccuucgagcgggacaucuccaccgagaucuaucaggccggcagcaccccuuguaacggcguggaaggcuucaacugcuacuucccacugcaguccuacggcuuucagcccacaaauggcgugggcuaucagcccuacagagugguggugcugagcuucgaacugcugcaugccccugccacagugugcggcccuaagaaaagcaccaaucucgugaagaacaaaugcgugaacuucaacuucaacggccugaccggcaccggcgugcugacagagagcaacaagaaguuccugccauuccagcaguuuggccgggauaucgccgauaccacagacgccguuagagauccccagacacuggaaauccuggacaucaccccuugcagcuucggcggagugucugugaucaccccuggcaccaacaccagcaaucagguggcagugcuguaccagggcgugaacuguaccgaagugcccguggccauucacgccgaucagcugacaccuacauggcggguguacuccaccggcagcaauguguuucagaccagagccggcugucugaucggagccgagcacgugaacaauagcuacgagugcgacauccccaucggcgcuggaaucugcgccagcuaccagacacagacaaacagcccucggagagccagaagcguggccagccagagcgugauugccuacacaaugucucugggcgccgagaacagcguggccuacuccaacaacucuaucgcuauccccaccaacuucaccaucagcgugaccacagagauccugccuguguccaugaccaagaccagcguggacugcaccauguacaucugcggcgauuccaccgagugcuccaaccugcugcugcaguacggcagcuucugcacccagcugaauagagcccugacagggaucgccguggaacaggacaagaacacccaagagguguucgcccaagugaagcagaucuacaagaccccuccuaucaaggacuucggcggcuucaauuucagccagauucugcccgauccuagcaagcccagcaagcggagcuucaucgaggaccugcuguucaacaaagugacacuggccgacgccggcuucaucaagcaguauggcgauugucugggcgacauugccgccagggaucugauuugcgcccagaaguuuaacggacugacagugcugccuccucugcugaccgaugagaugaucgcccaguacacaucugcccugcuggccggcacaaucacaagcggcuggacauuuggagcaggcgccgcucugcagauccccuuugcuaugcagauggccuaccgguucaacggcaucggagugacccagaaugugcuguacgagaaccagaagcugaucgccaaccaguucaacagcgccaucggcaagauccaggacagccugagcagcacagcaagcgcccugggaaagcugcaggacguggucaaccagaaugcccaggcacugaacacccuggucaagcagcuguccuccaacuucggcgccaucagcucugugcugaacgauauccugagcagacuggacccuccugaggccgaggugcagaucgacagacugaucacaggcagacugcagagccuccagacauacgugacccagcagcugaucagagccgccgagauuagagccucugccaaucuggccgccaccaagaugucugagugugugcugggccagagcaagagaguggacuuuugcggcaagggcuaccaccugaugagcuucccucagucugccccucacggcgugguguuucugcacgugacauaugugcccgcucaagagaagaauuucaccaccgcuccagccaucugccacgacggcaaagcccacuuuccuagagaaggcguguucguguccaacggcacccauugguucgugacacagcggaacuucuacgagccccagaucaucaccaccgacaacaccuucgugucuggcaacugcgacgucgugaucggcauugugaacaauaccguguacgacccucugcagcccgagcuggacagcuucaaagaggaacuggacaaguacuuuaagaaccacacaagccccgacguggaccugggcgauaucagcggaaucaaugccagcgucgugaacauccagaaagagaucgaccggcugaacgagguggccaagaaucugaacgagagccugaucgaccugcaagaacuggggaaguacgagcaguacaucaaguggcccugguacaucuggcugggcuuuaucgccggacugauugccaucgugauggucacaaucaugcuguguugcaugaccagcugcuguagcugccugaagggcuguuguagcuguggcagcugcugcaaguucgacgaggacgauucugagcccgugcugaagggcgugaaacugcacuacacaugauaauaggcuggagccucgguggccuagcuucuugccccuugggccuccccccagccccuccuccccuuccugcacccguacccccguggucuuugaauaaagucugagugggcggcaaaaaaaaaaaaaaaaaaaaaaaaaaaaaaaaaaaaaaaaaaaaaaaaaaaaaaaaaaaaaaaaaaaaaaaaaaaaaaaaaaaaaaaaaaaaaaaaaaaa

SEQ ID NO: 26256 - RNA, 4095 nt, Artificial Sequence
  SARS-CoV-2/Wuhan/WIV05/2019__EPI_ISL_402128 spike protein mRNA gc mod (1-1273)(K986P_V987P_D614G_M1229I)
gggaaauaagagagaaaagaagaguaagaagaaauauaagaccccggcgccgccaccauguucguguuccuggugcugcugccucugguguccagccagugugugaaccugaccaccagaacacagcugccuccagccuacaccaacagcuuuaccagaggcguguacuaccccgacaagguguucagauccagcgugcugcacucuacccaggaccuguuccugccuuucuucagcaacgugaccugguuccacgccauccacguguccggcaccaauggcaccaagagauucgacaaccccgugcugcccuucaacgacgggguguacuuugccagcaccgagaaguccaacaucaucagaggcuggaucuucggcaccacacuggacagcaagacccagagccugcugaucgugaacaacgccaccaacguggucaucaaagugugcgaguuccaguucugcaacgaccccuuccugggcgucuacuaccacaagaacaacaagagcuggauggaaagcgaguuccggguguacagcagcgccaacaacugcaccuucgaguacgugucccagccuuuccugauggaccuggaaggcaagcagggcaacuucaagaaccugcgcgaguucguguuuaagaacaucgacggcuacuucaagaucuacagcaagcacaccccuaucaaccucgugcgggaucugccucagggcuucucugcucuggaaccccugguggaucugcccaucggcaucaacaucacccgguuucagacacugcuggcccugcacagaagcuaccugacaccuggcgauagcagcagcggauggacagcuggugccgccgcuuacuaugugggcuaccugcagccuagaaccuuccugcugaaguacaacgagaacggcaccaucaccgacgccguggauugugcucuggauccucugagcgagacaaagugcacccugaaguccuucaccguggaaaagggcaucuaccagaccagcaacuuccgggugcagcccaccgaauccaucgugcgguuccccaauaucaccaaucugugccccuucggcgagguguucaaugccaccagauucgccucuguguacgccuggaaccggaagcggaucagcaauugcguggccgacuacuccgugcuguacaacuccgccagcuucagcaccuucaagugcuacggcguguccccuaccaagcugaacgaccugugcuucacaaacguguacgccgacagcuucgugauccggggagaugaagugcggcagauugccccuggacagacaggcaagaucgccgacuacaacuacaagcugcccgacgacuucaccggcugugugauugccuggaacagcaacaaccuggacuccaaagucggcggcaacuacaauuaccuguaccggcuguuccggaaguccaaucugaagcccuucgagcgggacaucuccaccgagaucuaucaggccggcagcaccccuuguaacggcguggaaggcuucaacugcuacuucccacugcaguccuacggcuuucagcccacaaauggcgugggcuaucagcccuacagagugguggugcugagcuucgaacugcugcaugccccugccacagugugcggcccuaagaaaagcaccaaucucgugaagaacaaaugcgugaacuucaacuucaacggccugaccggcaccggcgugcugacagagagcaacaagaaguuccugccauuccagcaguuuggccgggauaucgccgauaccacagacgccguuagagauccccagacacuggaaauccuggacaucaccccuugcagcuucggcggagugucugugaucaccccuggcaccaacaccagcaaucagguggcagugcuguaccagggcgugaacuguaccgaagugcccguggccauucacgccgaucagcugacaccuacauggcggguguacuccaccggcagcaauguguuucagaccagagccggcugucugaucggagccgagcacgugaacaauagcuacgagugcgacauccccaucggcgcuggaaucugcgccagcuaccagacacagacaaacagcccucggagagccagaagcguggccagccagagcaucauugccuacacaaugucucugggcgccgagaacagcguggccuacuccaacaacucuaucgcuauccccaccaacuucaccaucagcgugaccacagagauccugccuguguccaugaccaagaccagcguggacugcaccauguacaucugcggcgauuccaccgagugcuccaaccugcugcugcaguacggcagcuucugcacccagcugaauagagcccugacagggaucgccguggaacaggacaagaacacccaagagguguucgcccaagugaagcagaucuacaagaccccuccuaucaaggacuucggcggcuucaauuucagccagauucugcccgauccuagcaagcccagcaagcggagcuucaucgaggaccugcuguucaacaaagugacacuggccgacgccggcuucaucaagcaguauggcgauugucugggcgacauugccgccagggaucugauuugcgcccagaaguuuaacggacugacagugcugccuccucugcugaccgaugagaugaucgcccaguacacaucugcccugcuggccggcacaaucacaagcggcuggacauuuggagcaggcgccgcucugcagauccccuuugcuaugcagauggccuaccgguucaacggcaucggagugacccagaaugugcuguacgagaaccagaagcugaucgccaaccaguucaacagcgccaucggcaagauccaggacagccugagcagcacagcaagcgcccugggaaagcugcaggacguggucaaccagaaugcccaggcacugaacacccuggucaagcagcuguccuccaacuucggcgccaucagcucugugcugaacgauauccugagcagacuggacccuccugaggccgaggugcagaucgacagacugaucacaggcagacugcagagccuccagacauacgugacccagcagcugaucagagccgccgagauuagagccucugccaaucuggccgccaccaagaugucugagugugugcugggccagagcaagagaguggacuuuugcggcaagggcuaccaccugaugagcuucccucagucugccccucacggcgugguguuucugcacgugacauaugugcccgcucaagagaagaauuucaccaccgcuccagccaucugccacgacggcaaagcccacuuuccuagagaaggcguguucguguccaacggcacccauugguucgugacacagcggaacuucuacgagccccagaucaucaccaccgacaacaccuucgugucuggcaacugcgacgucgugaucggcauugugaacaauaccguguacgacccucugcagcccgagcuggacagcuucaaagaggaacuggacaaguacuuuaagaaccacacaagccccgacguggaccugggcgauaucagcggaaucaaugccagcgucgugaacauccagaaagagaucgaccggcugaacgagguggccaagaaucugaacgagagccugaucgaccugcaagaacuggggaaguacgagcaguacaucaaguggcccugguacaucuggcugggcuuuaucgccggacugauugccaucgugaucgucacaaucaugcuguguugcaugaccagcugcuguagcugccugaagggcuguuguagcuguggcagcugcugcaaguucgacgaggacgauucugagcccgugcugaagggcgugaaacugcacuacacaugauaauaggcuggagccucgguggccuagcuucuugccccuugggccuccccccagccccuccuccccuuccugcacccguacccccguggucuuugaauaaagucugagugggcggcaaaaaaaaaaaaaaaaaaaaaaaaaaaaaaaaaaaaaaaaaaaaaaaaaaaaaaaaaaaaaaaaaaaaaaaaaaaaaaaaaaaaaaaaaaaaaaaaaaaa

SEQ ID NO: 26257 - RNA, 4089 nt, Artificial Sequence
  SARS-CoV-2/Wuhan/WIV05/2019__EPI_ISL_402128 spike protein mRNA gc mod (1-1273)(K986P_V987P_H69del_V70del_A222V_Y453F_S477N_D614G_I692V)
gggaaauaagagagaaaagaagaguaagaagaaauauaagaccccggcgccgccaccauguucguguuccuggugcugcugccucugguguccagccagugugugaaccugaccaccagaacacagcugccuccagccuacaccaacagcuuuaccagaggcguguacuaccccgacaagguguucagauccagcgugcugcacucuacccaggaccuguuccugccuuucuucagcaacgugaccugguuccacgccaucuccggcaccaauggcaccaagagauucgacaaccccgugcugcccuucaacgacgggguguacuuugccagcaccgagaaguccaacaucaucagaggcuggaucuucggcaccacacuggacagcaagacccagagccugcugaucgugaacaacgccaccaacguggucaucaaagugugcgaguuccaguucugcaacgaccccuuccugggcgucuacuaccacaagaacaacaagagcuggauggaaagcgaguuccggguguacagcagcgccaacaacugcaccuucgaguacgugucccagccuuuccugauggaccuggaaggcaagcagggcaacuucaagaaccugcgcgaguucguguuuaagaacaucgacggcuacuucaagaucuacagcaagcacaccccuaucaaccucgugcgggaucugccucagggcuucucugugcuggaaccccugguggaucugcccaucggcaucaacaucacccgguuucagacacugcuggcccugcacagaagcuaccugacaccuggcgauagcagcagcggauggacagcuggugccgccgcuuacuaugugggcuaccugcagccuagaaccuuccugcugaaguacaacgagaacggcaccaucaccgacgccguggauugugcucuggauccucugagcgagacaaagugcacccugaaguccuucaccguggaaaagggcaucuaccagaccagcaacuuccgggugcagcccaccgaauccaucgugcgguuccccaauaucaccaaucugugccccuucggcgagguguucaaugccaccagauucgccucuguguacgccuggaaccggaagcggaucagcaauugcguggccgacuacuccgugcuguacaacuccgccagcuucagcaccuucaagugcuacggcguguccccuaccaagcugaacgaccugugcuucacaaacguguacgccgacagcuucgugauccggggagaugaagugcggcagauugccccuggacagacaggcaagaucgccgacuacaacuacaagcugcccgacgacuucaccggcugugugauugccuggaacagcaacaaccuggacuccaaagucggcggcaacuacaauuaccuguuccggcuguuccggaaguccaaucugaagcccuucgagcgggacaucuccaccgagaucuaucaggccggcaacaccccuuguaacggcguggaaggcuucaacugcuacuucccacugcaguccuacggcuuucagcccacaaauggcgugggcuaucagcccuacagagugguggugcugagcuucgaacugcugcaugccccugccacagugugcggcccuaagaaaagcaccaaucucgugaagaacaaaugcgugaacuucaacuucaacggccugaccggcaccggcgugcugacagagagcaacaagaaguuccugccauuccagcaguuuggccgggauaucgccgauaccacagacgccguuagagauccccagacacuggaaauccuggacaucaccccuugcagcuucggcggagugucugugaucaccccuggcaccaacaccagcaaucagguggcagugcuguaccagggcgugaacuguaccgaagugcccguggccauucacgccgaucagcugacaccuacauggcggguguacuccaccggcagcaauguguuucagaccagagccggcugucugaucggagccgagcacgugaacaauagcuacgagugcgacauccccaucggcgcuggaaucugcgccagcuaccagacacagacaaacagcccucggagagccagaagcguggccagccagagcgugauugccuacacaaugucucugggcgccgagaacagcguggccuacuccaacaacucuaucgcuauccccaccaacuucaccaucagcgugaccacagagauccugccuguguccaugaccaagaccagcguggacugcaccauguacaucugcggcgauuccaccgagugcuccaaccugcugcugcaguacggcagcuucugcacccagcugaauagagcccugacagggaucgccguggaacaggacaagaacacccaagagguguucgcccaagugaagcagaucuacaagaccccuccuaucaaggacuucggcggcuucaauuucagccagauucugcccgauccuagcaagcccagcaagcggagcuucaucgaggaccugcuguucaacaaagugacacuggccgacgccggcuucaucaagcaguauggcgauugucugggcgacauugccgccagggaucugauuugcgcccagaaguuuaacggacugacagugcugccuccucugcugaccgaugagaugaucgcccaguacacaucugcccugcuggccggcacaaucacaagcggcuggacauuuggagcaggcgccgcucugcagauccccuuugcuaugcagauggccuaccgguucaacggcaucggagugacccagaaugugcuguacgagaaccagaagcugaucgccaaccaguucaacagcgccaucggcaagauccaggacagccugagcagcacagcaagcgcccugggaaagcugcaggacguggucaaccagaaugcccaggcacugaacacccuggucaagcagcuguccuccaacuucggcgccaucagcucugugcugaacgauauccugagcagacuggacccuccugaggccgaggugcagaucgacagacugaucacaggcagacugcagagccuccagacauacgugacccagcagcugaucagagccgccgagauuagagccucugccaaucuggccgccaccaagaugucugagugugugcugggccagagcaagagaguggacuuuugcggcaagggcuaccaccugaugagcuucccucagucugccccucacggcgugguguuucugcacgugacauaugugcccgcucaagagaagaauuucaccaccgcuccagccaucugccacgacggcaaagcccacuuuccuagagaaggcguguucguguccaacggcacccauugguucgugacacagcggaacuucuacgagccccagaucaucaccaccgacaacaccuucgugucuggcaacugcgacgucgugaucggcauugugaacaauaccguguacgacccucugcagcccgagcuggacagcuucaaagaggaacuggacaaguacuuuaagaaccacacaagccccgacguggaccugggcgauaucagcggaaucaaugccagcgucgugaacauccagaaagagaucgaccggcugaacgagguggccaagaaucugaacgagagccugaucgaccugcaagaacuggggaaguacgagcaguacaucaaguggcccugguacaucuggcugggcuuuaucgccggacugauugccaucgugauggucacaaucaugcuguguugcaugaccagcugcuguagcugccugaagggcuguuguagcuguggcagcugcugcaaguucgacgaggacgauucugagcccgugcugaagggcgugaaacugcacuacacaugauaauaggcuggagccucgguggccuagcuucuugccccuugggccuccccccagccccuccuccccuuccugcacccguacccccguggucuuugaauaaagucugagugggcggcaaaaaaaaaaaaaaaaaaaaaaaaaaaaaaaaaaaaaaaaaaaaaaaaaaaaaaaaaaaaaaaaaaaaaaaaaaaaaaaaaaaaaaaaaaaaaaaaaaaa

SEQ ID NO: 26258 - RNA, 4089 nt, Artificial Sequence
  SARS-CoV-2/Wuhan/WIV05/2019__EPI_ISL_402128 spike protein mRNA gc mod (1-1273)(K986P_V987P_H69del_V70del_Y453F_D614G_I692V_M1229I)
gggaaauaagagagaaaagaagaguaagaagaaauauaagaccccggcgccgccaccauguucguguuccuggugcugcugccucugguguccagccagugugugaaccugaccaccagaacacagcugccuccagccuacaccaacagcuuuaccagaggcguguacuaccccgacaagguguucagauccagcgugcugcacucuacccaggaccuguuccugccuuucuucagcaacgugaccugguuccacgccaucuccggcaccaauggcaccaagagauucgacaaccccgugcugcccuucaacgacgggguguacuuugccagcaccgagaaguccaacaucaucagaggcuggaucuucggcaccacacuggacagcaagacccagagccugcugaucgugaacaacgccaccaacguggucaucaaagugugcgaguuccaguucugcaacgaccccuuccugggcgucuacuaccacaagaacaacaagagcuggauggaaagcgaguuccggguguacagcagcgccaacaacugcaccuucgaguacgugucccagccuuuccugauggaccuggaaggcaagcagggcaacuucaagaaccugcgcgaguucguguuuaagaacaucgacggcuacuucaagaucuacagcaagcacaccccuaucaaccucgugcgggaucugccucagggcuucucugcucuggaaccccugguggaucugcccaucggcaucaacaucacccgguuucagacacugcuggcccugcacagaagcuaccugacaccuggcgauagcagcagcggauggacagcuggugccgccgcuuacuaugugggcuaccugcagccuagaaccuuccugcugaaguacaacgagaacggcaccaucaccgacgccguggauugugcucuggauccucugagcgagacaaagugcacccugaaguccuucaccguggaaaagggcaucuaccagaccagcaacuuccgggugcagcccaccgaauccaucgugcgguuccccaauaucaccaaucugugccccuucggcgagguguucaaugccaccagauucgccucuguguacgccuggaaccggaagcggaucagcaauugcguggccgacuacuccgugcuguacaacuccgccagcuucagcaccuucaagugcuacggcguguccccuaccaagcugaacgaccugugcuucacaaacguguacgccgacagcuucgugauccggggagaugaagugcggcagauugccccuggacagacaggcaagaucgccgacuacaacuacaagcugcccgacgacuucaccggcugugugauugccuggaacagcaacaaccuggacuccaaagucggcggcaacuacaauuaccuguuccggcuguuccggaaguccaaucugaagcccuucgagcgggacaucuccaccgagaucuaucaggccggcagcaccccuuguaacggcguggaaggcuucaacugcuacuucccacugcaguccuacggcuuucagcccacaaauggcgugggcuaucagcccuacagagugguggugcugagcuucgaacugcugcaugccccugccacagugugcggcccuaagaaaagcaccaaucucgugaagaacaaaugcgugaacuucaacuucaacggccugaccggcaccggcgugcugacagagagcaacaagaaguuccugccauuccagcaguuuggccgggauaucgccgauaccacagacgccguuagagauccccagacacuggaaauccuggacaucaccccuugcagcuucggcggagugucugugaucaccccuggcaccaacaccagcaaucagguggcagugcuguaccagggcgugaacuguaccgaagugcccguggccauucacgccgaucagcugacaccuacauggcggguguacuccaccggcagcaauguguuucagaccagagccggcugucugaucggagccgagcacgugaacaauagcuacgagugcgacauccccaucggcgcuggaaucugcgccagcuaccagacacagacaaacagcccucggagagccagaagcguggccagccagagcgugauugccuacacaaugucucugggcgccgagaacagcguggccuacuccaacaacucuaucgcuauccccaccaacuucaccaucagcgugaccacagagauccugccuguguccaugaccaagaccagcguggacugcaccauguacaucugcggcgauuccaccgagugcuccaaccugcugcugcaguacggcagcuucugcacccagcugaauagagcccugacagggaucgccguggaacaggacaagaacacccaagagguguucgcccaagugaagcagaucuacaagaccccuccuaucaaggacuucggcggcuucaauuucagccagauucugcccgauccuagcaagcccagcaagcggagcuucaucgaggaccugcuguucaacaaagugacacuggccgacgccggcuucaucaagcaguauggcgauugucugggcgacauugccgccagggaucugauuugcgcccagaaguuuaacggacugacagugcugccuccucugcugaccgaugagaugaucgcccaguacacaucugcccugcuggccggcacaaucacaagcggcuggacauuuggagcaggcgccgcucugcagauccccuuugcuaugcagauggccuaccgguucaacggcaucggagugacccagaaugugcuguacgagaaccagaagcugaucgccaaccaguucaacagcgccaucggcaagauccaggacagccugagcagcacagcaagcgcccugggaaagcugcaggacguggucaaccagaaugcccaggcacugaacacccuggucaagcagcuguccuccaacuucggcgccaucagcucugugcugaacgauauccugagcagacuggacccuccugaggccgaggugcagaucgacagacugaucacaggcagacugcagagccuccagacauacgugacccagcagcugaucagagccgccgagauuagagccucugccaaucuggccgccaccaagaugucugagugugugcugggccagagcaagagaguggacuuuugcggcaagggcuaccaccugaugagcuucccucagucugccccucacggcgugguguuucugcacgugacauaugugcccgcucaagagaagaauuucaccaccgcuccagccaucugccacgacggcaaagcccacuuuccuagagaaggcguguucguguccaacggcacccauugguucgugacacagcggaacuucuacgagccccagaucaucaccaccgacaacaccuucgugucuggcaacugcgacgucgugaucggcauugugaacaauaccguguacgacccucugcagcccgagcuggacagcuucaaagaggaacuggacaaguacuuuaagaaccacacaagccccgacguggaccugggcgauaucagcggaaucaaugccagcgucgugaacauccagaaagagaucgaccggcugaacgagguggccaagaaucugaacgagagccugaucgaccugcaagaacuggggaaguacgagcaguacaucaaguggcccugguacaucuggcugggcuuuaucgccggacugauugccaucgugaucgucacaaucaugcuguguugcaugaccagcugcuguagcugccugaagggcuguuguagcuguggcagcugcugcaaguucgacgaggacgauucugagcccgugcugaagggcgugaaacugcacuacacaugauaauaggcuggagccucgguggccuagcuucuugccccuugggccuccccccagccccuccuccccuuccugcacccguacccccguggucuuugaauaaagucugagugggcggcaaaaaaaaaaaaaaaaaaaaaaaaaaaaaaaaaaaaaaaaaaaaaaaaaaaaaaaaaaaaaaaaaaaaaaaaaaaaaaaaaaaaaaaaaaaaaaaaaaaa

SEQ ID NO: 26259 - RNA, 4086 nt, Artificial Sequence
  SARS-CoV-2/Wuhan/WIV05/2019__EPI_ISL_402128 spike protein mRNA gc mod (1-1273)(K986P_V987P_K986P_V987P_H69del_V70del_Y144del_N501Y_A570 D_D614G_P681H_T716I_S982A_D1118H)
gggaaauaagagagaaaagaagaguaagaagaaauauaagaccccggcgccgccaccauguucguguuccuggugcugcugccucugguguccagccagugugugaaccugaccaccagaacacagcugccuccagccuacaccaacagcuuuaccagaggcguguacuaccccgacaagguguucagauccagcgugcugcacucuacccaggaccuguuccugccuuucuucagcaacgugaccugguuccacgccaucuccggcaccaauggcaccaagagauucgacaaccccgugcugcccuucaacgacgggguguacuuugccagcaccgagaaguccaacaucaucagaggcuggaucuucggcaccacacuggacagcaagacccagagccugcugaucgugaacaacgccaccaacguggucaucaaagugugcgaguuccaguucugcaacgaccccuuccugggcgucuaccacaagaacaacaagagcuggauggaaagcgaguuccggguguacagcagcgccaacaacugcaccuucgaguacgugucccagccuuuccugauggaccuggaaggcaagcagggcaacuucaagaaccugcgcgaguucguguuuaagaacaucgacggcuacuucaagaucuacagcaagcacaccccuaucaaccucgugcgggaucugccucagggcuucucugcucuggaaccccugguggaucugcccaucggcaucaacaucacccgguuucagacacugcuggcccugcacagaagcuaccugacaccuggcgauagcagcagcggauggacagcuggugccgccgcuuacuaugugggcuaccugcagccuagaaccuuccugcugaaguacaacgagaacggcaccaucaccgacgccguggauugugcucuggauccucugagcgagacaaagugcacccugaaguccuucaccguggaaaagggcaucuaccagaccagcaacuuccgggugcagcccaccgaauccaucgugcgguuccccaauaucaccaaucugugccccuucggcgagguguucaaugccaccagauucgccucuguguacgccuggaaccggaagcggaucagcaauugcguggccgacuacuccgugcuguacaacuccgccagcuucagcaccuucaagugcuacggcguguccccuaccaagcugaacgaccugugcuucacaaacguguacgccgacagcuucgugauccggggagaugaagugcggcagauugccccuggacagacaggcaagaucgccgacuacaacuacaagcugcccgacgacuucaccggcugugugauugccuggaacagcaacaaccuggacuccaaagucggcggcaacuacaauuaccuguaccggcuguuccggaaguccaaucugaagcccuucgagcgggacaucuccaccgagaucuaucaggccggcagcaccccuuguaacggcguggaaggcuucaacugcuacuucccacugcaguccuacggcuuucagcccacauacggcgugggcuaucagcccuacagagugguggugcugagcuucgaacugcugcaugccccugccacagugugcggcccuaagaaaagcaccaaucucgugaagaacaaaugcgugaacuucaacuucaacggccugaccggcaccggcgugcugacagagagcaacaagaaguuccugccauuccagcaguuuggccgggauaucgacgauaccacagacgccguuagagauccccagacacuggaaauccuggacaucaccccuugcagcuucggcggagugucugugaucaccccuggcaccaacaccagcaaucagguggcagugcuguaccagggcgugaacuguaccgaagugcccguggccauucacgccgaucagcugacaccuacauggcggguguacuccaccggcagcaauguguuucagaccagagccggcugucugaucggagccgagcacgugaacaauagcuacgagugcgacauccccaucggcgcuggaaucugcgccagcuaccagacacagacaaacagccaccggagagccagaagcguggccagccagagcaucauugccuacacaaugucucugggcgccgagaacagcguggccuacuccaacaacucuaucgcuauccccaucaacuucaccaucagcgugaccacagagauccugccuguguccaugaccaagaccagcguggacugcaccauguacaucugcggcgauuccaccgagugcuccaaccugcugcugcaguacggcagcuucugcacccagcugaauagagcccugacagggaucgccguggaacaggacaagaacacccaagagguguucgcccaagugaagcagaucuacaagaccccuccuaucaaggacuucggcggcuucaauuucagccagauucugcccgauccuagcaagcccagcaagcggagcuucaucgaggaccugcuguucaacaaagugacacuggccgacgccggcuucaucaagcaguauggcgauugucugggcgacauugccgccagggaucugauuugcgcccagaaguuuaacggacugacagugcugccuccucugcugaccgaugagaugaucgcccaguacacaucugcccugcuggccggcacaaucacaagcggcuggacauuuggagcaggcgccgcucugcagauccccuuugcuaugcagauggccuaccgguucaacggcaucggagugacccagaaugugcuguacgagaaccagaagcugaucgccaaccaguucaacagcgccaucggcaagauccaggacagccugagcagcacagcaagcgcccugggaaagcugcaggacguggucaaccagaaugcccaggcacugaacacccuggucaagcagcuguccuccaacuucggcgccaucagcucugugcugaacgauauccuggccagacuggacccuccugaggccgaggugcagaucgacagacugaucacaggcagacugcagagccuccagacauacgugacccagcagcugaucagagccgccgagauuagagccucugccaaucuggccgccaccaagaugucugagugugugcugggccagagcaagagaguggacuuuugcggcaagggcuaccaccugaugagcuucccucagucugccccucacggcgugguguuucugcacgugacauaugugcccgcucaagagaagaauuucaccaccgcuccagccaucugccacgacggcaaagcccacuuuccuagagaaggcguguucguguccaacggcacccauugguucgugacacagcggaacuucuacgagccccagaucaucaccacccacaacaccuucgugucuggcaacugcgacgucgugaucggcauugugaacaauaccguguacgacccucugcagcccgagcuggacagcuucaaagaggaacuggacaaguacuuuaagaaccacacaagccccgacguggaccugggcgauaucagcggaaucaaugccagcgucgugaacauccagaaagagaucgaccggcugaacgagguggccaagaaucugaacgagagccugaucgaccugcaagaacuggggaaguacgagcaguacaucaaguggcccugguacaucuggcugggcuuuaucgccggacugauugccaucgugauggucacaaucaugcuguguugcaugaccagcugcuguagcugccugaagggcuguuguagcuguggcagcugcugcaaguucgacgaggacgauucugagcccgugcugaagggcgugaaacugcacuacacaugauaauaggcuggagccucgguggccuagcuucuugccccuugggccuccccccagccccuccuccccuuccugcacccguacccccguggucuuugaauaaagucugagugggcggcaaaaaaaaaaaaaaaaaaaaaaaaaaaaaaaaaaaaaaaaaaaaaaaaaaaaaaaaaaaaaaaaaaaaaaaaaaaaaaaaaaaaaaaaaaaaaaaaaaaa

SEQ ID NO: 26260 - RNA, 4095 nt, Artificial Sequence
  SARS-CoV-2/Wuhan/WIV05/2019__EPI_ISL_402128 spike protein mRNA gc mod (1-1273)(K986P_V987P_K986P_V987P_K417N_E484K_N501Y_D614G)
gggaaauaagagagaaaagaagaguaagaagaaauauaagaccccggcgccgccaccauguucguguuccuggugcugcugccucugguguccagccagugugugaaccugaccaccagaacacagcugccuccagccuacaccaacagcuuuaccagaggcguguacuaccccgacaagguguucagauccagcgugcugcacucuacccaggaccuguuccugccuuucuucagcaacgugaccugguuccacgccauccacguguccggcaccaauggcaccaagagauucgacaaccccgugcugcccuucaacgacgggguguacuuugccagcaccgagaaguccaacaucaucagaggcuggaucuucggcaccacacuggacagcaagacccagagccugcugaucgugaacaacgccaccaacguggucaucaaagugugcgaguuccaguucugcaacgaccccuuccugggcgucuacuaccacaagaacaacaagagcuggauggaaagcgaguuccggguguacagcagcgccaacaacugcaccuucgaguacgugucccagccuuuccugauggaccuggaaggcaagcagggcaacuucaagaaccugcgcgaguucguguuuaagaacaucgacggcuacuucaagaucuacagcaagcacaccccuaucaaccucgugcgggaucugccucagggcuucucugcucuggaaccccugguggaucugcccaucggcaucaacaucacccgguuucagacacugcuggcccugcacagaagcuaccugacaccuggcgauagcagcagcggauggacagcuggugccgccgcuuacuaugugggcuaccugcagccuagaaccuuccugcugaaguacaacgagaacggcaccaucaccgacgccguggauugugcucuggauccucugagcgagacaaagugcacccugaaguccuucaccguggaaaagggcaucuaccagaccagcaacuuccgggugcagcccaccgaauccaucgugcgguuccccaauaucaccaaucugugccccuucggcgagguguucaaugccaccagauucgccucuguguacgccuggaaccggaagcggaucagcaauugcguggccgacuacuccgugcuguacaacuccgccagcuucagcaccuucaagugcuacggcguguccccuaccaagcugaacgaccugugcuucacaaacguguacgccgacagcuucgugauccggggagaugaagugcggcagauugccccuggacagacaggcaacaucgccgacuacaacuacaagcugcccgacgacuucaccggcugugugauugccuggaacagcaacaaccuggacuccaaagucggcggcaacuacaauuaccuguaccggcuguuccggaaguccaaucugaagcccuucgagcgggacaucuccaccgagaucuaucaggccggcagcaccccuuguaacggcgugaagggcuucaacugcuacuucccacugcaguccuacggcuuucagcccacauacggcgugggcuaucagcccuacagagugguggugcugagcuucgaacugcugcaugccccugccacagugugcggcccuaagaaaagcaccaaucucgugaagaacaaaugcgugaacuucaacuucaacggccugaccggcaccggcgugcugacagagagcaacaagaaguuccugccauuccagcaguuuggccgggauaucgccgauaccacagacgccguuagagauccccagacacuggaaauccuggacaucaccccuugcagcuucggcggagugucugugaucaccccuggcaccaacaccagcaaucagguggcagugcuguaccagggcgugaacuguaccgaagugcccguggccauucacgccgaucagcugacaccuacauggcggguguacuccaccggcagcaauguguuucagaccagagccggcugucugaucggagccgagcacgugaacaauagcuacgagugcgacauccccaucggcgcuggaaucugcgccagcuaccagacacagacaaacagcccucggagagccagaagcguggccagccagagcaucauugccuacacaaugucucugggcgccgagaacagcguggccuacuccaacaacucuaucgcuauccccaccaacuucaccaucagcgugaccacagagauccugccuguguccaugaccaagaccagcguggacugcaccauguacaucugcggcgauuccaccgagugcuccaaccugcugcugcaguacggcagcuucugcacccagcugaauagagcccugacagggaucgccguggaacaggacaagaacacccaagagguguucgcccaagugaagcagaucuacaagaccccuccuaucaaggacuucggcggcuucaauuucagccagauucugcccgauccuagcaagcccagcaagcggagcuucaucgaggaccugcuguucaacaaagugacacuggccgacgccggcuucaucaagcaguauggcgauugucugggcgacauugccgccagggaucugauuugcgcccagaaguuuaacggacugacagugcugccuccucugcugaccgaugagaugaucgcccaguacacaucugcccugcuggccggcacaaucacaagcggcuggacauuuggagcaggcgccgcucugcagauccccuuugcuaugcagauggccuaccgguucaacggcaucggagugacccagaaugugcuguacgagaaccagaagcugaucgccaaccaguucaacagcgccaucggcaagauccaggacagccugagcagcacagcaagcgcccugggaaagcugcaggacguggucaaccagaaugcccaggcacugaacacccuggucaagcagcuguccuccaacuucggcgccaucagcucugugcugaacgauauccugagcagacuggacccuccugaggccgaggugcagaucgacagacugaucacaggcagacugcagagccuccagacauacgugacccagcagcugaucagagccgccgagauuagagccucugccaaucuggccgccaccaagaugucugagugugugcugggccagagcaagagaguggacuuuugcggcaagggcuaccaccugaugagcuucccucagucugccccucacggcgugguguuucugcacgugacauaugugcccgcucaagagaagaauuucaccaccgcuccagccaucugccacgacggcaaagcccacuuuccuagagaaggcguguucguguccaacggcacccauugguucgugacacagcggaacuucuacgagccccagaucaucaccaccgacaacaccuucgugucuggcaacugcgacgucgugaucggcauugugaacaauaccguguacgacccucugcagcccgagcuggacagcuucaaagaggaacuggacaaguacuuuaagaaccacacaagccccgacguggaccugggcgauaucagcggaaucaaugccagcgucgugaacauccagaaagagaucgaccggcugaacgagguggccaagaaucugaacgagagccugaucgaccugcaagaacuggggaaguacgagcaguacaucaaguggcccugguacaucuggcugggcuuuaucgccggacugauugccaucgugauggucacaaucaugcuguguugcaugaccagcugcuguagcugccugaagggcuguuguagcuguggcagcugcugcaaguucgacgaggacgauucugagcccgugcugaagggcgugaaacugcacuacacaugauaauaggcuggagccucgguggccuagcuucuugccccuugggccuccccccagccccuccuccccuuccugcacccguacccccguggucuuugaauaaagucugagugggcggcaaaaaaaaaaaaaaaaaaaaaaaaaaaaaaaaaaaaaaaaaaaaaaaaaaaaaaaaaaaaaaaaaaaaaaaaaaaaaaaaaaaaaaaaaaaaaaaaaaaa

SEQ ID NO: 26261 - RNA, 4086 nt, Artificial Sequence
  SARS-CoV-2/Wuhan/WIV05/2019__EPI_ISL_402128 spike protein mRNA gc mod (1-1273)(K986P_V987P_K986P_V987P_L18F_D80A_D215G_L242del_A243del_ L244del_R246I_K417N_E484K_N501Y_D614G_A701V)
gggaaauaagagagaaaagaagaguaagaagaaauauaagaccccggcgccgccaccauguucguguuccuggugcugcugccucugguguccagccagugugugaacuucaccaccagaacacagcugccuccagccuacaccaacagcuuuaccagaggcguguacuaccccgacaagguguucagauccagcgugcugcacucuacccaggaccuguuccugccuuucuucagcaacgugaccugguuccacgccauccacguguccggcaccaauggcaccaagagauucgccaaccccgugcugcccuucaacgacgggguguacuuugccagcaccgagaaguccaacaucaucagaggcuggaucuucggcaccacacuggacagcaagacccagagccugcugaucgugaacaacgccaccaacguggucaucaaagugugcgaguuccaguucugcaacgaccccuuccugggcgucuacuaccacaagaacaacaagagcuggauggaaagcgaguuccggguguacagcagcgccaacaacugcaccuucgaguacgugucccagccuuuccugauggaccuggaaggcaagcagggcaacuucaagaaccugcgcgaguucguguuuaagaacaucgacggcuacuucaagaucuacagcaagcacaccccuaucaaccucgugcggggccugccucagggcuucucugcucuggaaccccugguggaucugcccaucggcaucaacaucacccgguuucagacacugcacaucagcuaccugacaccuggcgauagcagcagcggauggacagcuggugccgccgcuuacuaugugggcuaccugcagccuagaaccuuccugcugaaguacaacgagaacggcaccaucaccgacgccguggauugugcucuggauccucugagcgagacaaagugcacccugaaguccuucaccguggaaaagggcaucuaccagaccagcaacuuccgggugcagcccaccgaauccaucgugcgguuccccaauaucaccaaucugugccccuucggcgagguguucaaugccaccagauucgccucuguguacgccuggaaccggaagcggaucagcaauugcguggccgacuacuccgugcuguacaacuccgccagcuucagcaccuucaagugcuacggcguguccccuaccaagcugaacgaccugugcuucacaaacguguacgccgacagcuucgugauccggggagaugaagugcggcagauugccccuggacagacaggcaacaucgccgacuacaacuacaagcugcccgacgacuucaccggcugugugauugccuggaacagcaacaaccuggacuccaaagucggcggcaacuacaauuaccuguaccggcuguuccggaaguccaaucugaagcccuucgagcgggacaucuccaccgagaucuaucaggccggcagcaccccuuguaacggcgugaagggcuucaacugcuacuucccacugcaguccuacggcuuucagcccacauacggcgugggcuaucagcccuacagagugguggugcugagcuucgaacugcugcaugccccugccacagugugcggcccuaagaaaagcaccaaucucgugaagaacaaaugcgugaacuucaacuucaacggccugaccggcaccggcgugcugacagagagcaacaagaaguuccugccauuccagcaguuuggccgggauaucgccgauaccacagacgccguuagagauccccagacacuggaaauccuggacaucaccccuugcagcuucggcggagugucugugaucaccccuggcaccaacaccagcaaucagguggcagugcuguaccagggcgugaacuguaccgaagugcccguggccauucacgccgaucagcugacaccuacauggcggguguacuccaccggcagcaauguguuucagaccagagccggcugucugaucggagccgagcacgugaacaauagcuacgagugcgacauccccaucggcgcuggaaucugcgccagcuaccagacacagacaaacagcccucggagagccagaagcguggccagccagagcaucauugccuacacaaugucucugggcguggagaacagcguggccuacuccaacaacucuaucgcuauccccaccaacuucaccaucagcgugaccacagagauccugccuguguccaugaccaagaccagcguggacugcaccauguacaucugcggcgauuccaccgagugcuccaaccugcugcugcaguacggcagcuucugcacccagcugaauagagcccugacagggaucgccguggaacaggacaagaacacccaagagguguucgcccaagugaagcagaucuacaagaccccuccuaucaaggacuucggcggcuucaauuucagccagauucugcccgauccuagcaagcccagcaagcggagcuucaucgaggaccugcuguucaacaaagugacacuggccgacgccggcuucaucaagcaguauggcgauugucugggcgacauugccgccagggaucugauuugcgcccagaaguuuaacggacugacagugcugccuccucugcugaccgaugagaugaucgcccaguacacaucugcccugcuggccggcacaaucacaagcggcuggacauuuggagcaggcgccgcucugcagauccccuuugcuaugcagauggccuaccgguucaacggcaucggagugacccagaaugugcuguacgagaaccagaagcugaucgccaaccaguucaacagcgccaucggcaagauccaggacagccugagcagcacagcaagcgcccugggaaagcugcaggacguggucaaccagaaugcccaggcacugaacacccuggucaagcagcuguccuccaacuucggcgccaucagcucugugcugaacgauauccugagcagacuggacccuccugaggccgaggugcagaucgacagacugaucacaggcagacugcagagccuccagacauacgugacccagcagcugaucagagccgccgagauuagagccucugccaaucuggccgccaccaagaugucugagugugugcugggccagagcaagagaguggacuuuugcggcaagggcuaccaccugaugagcuucccucagucugccccucacggcgugguguuucugcacgugacauaugugcccgcucaagagaagaauuucaccaccgcuccagccaucugccacgacggcaaagcccacuuuccuagagaaggcguguucguguccaacggcacccauugguucgugacacagcggaacuucuacgagccccagaucaucaccaccgacaacaccuucgugucuggcaacugcgacgucgugaucggcauugugaacaauaccguguacgacccucugcagcccgagcuggacagcuucaaagaggaacuggacaaguacuuuaagaaccacacaagccccgacguggaccugggcgauaucagcggaaucaaugccagcgucgugaacauccagaaagagaucgaccggcugaacgagguggccaagaaucugaacgagagccugaucgaccugcaagaacuggggaaguacgagcaguacaucaaguggcccugguacaucuggcugggcuuuaucgccggacugauugccaucgugauggucacaaucaugcuguguugcaugaccagcugcuguagcugccugaagggcuguuguagcuguggcagcugcugcaaguucgacgaggacgauucugagcccgugcugaagggcgugaaacugcacuacacaugauaauaggcuggagccucgguggccuagcuucuugccccuugggccuccccccagccccuccuccccuuccugcacccguacccccguggucuuugaauaaagucugagugggcggcaaaaaaaaaaaaaaaaaaaaaaaaaaaaaaaaaaaaaaaaaaaaaaaaaaaaaaaaaaaaaaaaaaaaaaaaaaaaaaaaaaaaaaaaaaaaaaaaaaaa

SEQ ID NO: 26262 - RNA, 4095 nt, Artificial Sequence
  SARS-CoV-2/Wuhan/WIV05/2019__EPI_ISL_402128 spike protein mRNA gc mod (1-1273)(K986P_V987P_K986P_V987P_E484K_D614G)
gggaaauaagagagaaaagaagaguaagaagaaauauaagaccccggcgccgccaccauguucguguuccuggugcugcugccucugguguccagccagugugugaaccugaccaccagaacacagcugccuccagccuacaccaacagcuuuaccagaggcguguacuaccccgacaagguguucagauccagcgugcugcacucuacccaggaccuguuccugccuuucuucagcaacgugaccugguuccacgccauccacguguccggcaccaauggcaccaagagauucgacaaccccgugcugcccuucaacgacgggguguacuuugccagcaccgagaaguccaacaucaucagaggcuggaucuucggcaccacacuggacagcaagacccagagccugcugaucgugaacaacgccaccaacguggucaucaaagugugcgaguuccaguucugcaacgaccccuuccugggcgucuacuaccacaagaacaacaagagcuggauggaaagcgaguuccggguguacagcagcgccaacaacugcaccuucgaguacgugucccagccuuuccugauggaccuggaaggcaagcagggcaacuucaagaaccugcgcgaguucguguuuaagaacaucgacggcuacuucaagaucuacagcaagcacaccccuaucaaccucgugcgggaucugccucagggcuucucugcucuggaaccccugguggaucugcccaucggcaucaacaucacccgguuucagacacugcuggcccugcacagaagcuaccugacaccuggcgauagcagcagcggauggacagcuggugccgccgcuuacuaugugggcuaccugcagccuagaaccuuccugcugaaguacaacgagaacggcaccaucaccgacgccguggauugugcucuggauccucugagcgagacaaagugcacccugaaguccuucaccguggaaaagggcaucuaccagaccagcaacuuccgggugcagcccaccgaauccaucgugcgguuccccaauaucaccaaucugugccccuucggcgagguguucaaugccaccagauucgccucuguguacgccuggaaccggaagcggaucagcaauugcguggccgacuacuccgugcuguacaacuccgccagcuucagcaccuucaagugcuacggcguguccccuaccaagcugaacgaccugugcuucacaaacguguacgccgacagcuucgugauccggggagaugaagugcggcagauugccccuggacagacaggcaagaucgccgacuacaacuacaagcugcccgacgacuucaccggcugugugauugccuggaacagcaacaaccuggacuccaaagucggcggcaacuacaauuaccuguaccggcuguuccggaaguccaaucugaagcccuucgagcgggacaucuccaccgagaucuaucaggccggcagcaccccuuguaacggcgugaagggcuucaacugcuacuucccacugcaguccuacggcuuucagcccacaaauggcgugggcuaucagcccuacagagugguggugcugagcuucgaacugcugcaugccccugccacagugugcggcccuaagaaaagcaccaaucucgugaagaacaaaugcgugaacuucaacuucaacggccugaccggcaccggcgugcugacagagagcaacaagaaguuccugccauuccagcaguuuggccgggauaucgccgauaccacagacgccguuagagauccccagacacuggaaauccuggacaucaccccuugcagcuucggcggagugucugugaucaccccuggcaccaacaccagcaaucagguggcagugcuguaccagggcgugaacuguaccgaagugcccguggccauucacgccgaucagcugacaccuacauggcggguguacuccaccggcagcaauguguuucagaccagagccggcugucugaucggagccgagcacgugaacaauagcuacgagugcgacauccccaucggcgcuggaaucugcgccagcuaccagacacagacaaacagcccucggagagccagaagcguggccagccagagcaucauugccuacacaaugucucugggcgccgagaacagcguggccuacuccaacaacucuaucgcuauccccaccaacuucaccaucagcgugaccacagagauccugccuguguccaugaccaagaccagcguggacugcaccauguacaucugcggcgauuccaccgagugcuccaaccugcugcugcaguacggcagcuucugcacccagcugaauagagcccugacagggaucgccguggaacaggacaagaacacccaagagguguucgcccaagugaagcagaucuacaagaccccuccuaucaaggacuucggcggcuucaauuucagccagauucugcccgauccuagcaagcccagcaagcggagcuucaucgaggaccugcuguucaacaaagugacacuggccgacgccggcuucaucaagcaguauggcgauugucugggcgacauugccgccagggaucugauuugcgcccagaaguuuaacggacugacagugcugccuccucugcugaccgaugagaugaucgcccaguacacaucugcccugcuggccggcacaaucacaagcggcuggacauuuggagcaggcgccgcucugcagauccccuuugcuaugcagauggccuaccgguucaacggcaucggagugacccagaaugugcuguacgagaaccagaagcugaucgccaaccaguucaacagcgccaucggcaagauccaggacagccugagcagcacagcaagcgcccugggaaagcugcaggacguggucaaccagaaugcccaggcacugaacacccuggucaagcagcuguccuccaacuucggcgccaucagcucugugcugaacgauauccugagcagacuggacccuccugaggccgaggugcagaucgacagacugaucacaggcagacugcagagccuccagacauacgugacccagcagcugaucagagccgccgagauuagagccucugccaaucuggccgccaccaagaugucugagugugugcugggccagagcaagagaguggacuuuugcggcaagggcuaccaccugaugagcuucccucagucugccccucacggcgugguguuucugcacgugacauaugugcccgcucaagagaagaauuucaccaccgcuccagccaucugccacgacggcaaagcccacuuuccuagagaaggcguguucguguccaacggcacccauugguucgugacacagcggaacuucuacgagccccagaucaucaccaccgacaacaccuucgugucuggcaacugcgacgucgugaucggcauugugaacaauaccguguacgacccucugcagcccgagcuggacagcuucaaagaggaacuggacaaguacuuuaagaaccacacaagccccgacguggaccugggcgauaucagcggaaucaaugccagcgucgugaacauccagaaagagaucgaccggcugaacgagguggccaagaaucugaacgagagccugaucgaccugcaagaacuggggaaguacgagcaguacaucaaguggcccugguacaucuggcugggcuuuaucgccggacugauugccaucgugauggucacaaucaugcuguguugcaugaccagcugcuguagcugccugaagggcuguuguagcuguggcagcugcugcaaguucgacgaggacgauucugagcccgugcugaagggcgugaaacugcacuacacaugauaauaggcuggagccucgguggccuagcuucuugccccuugggccuccccccagccccuccuccccuuccugcacccguacccccguggucuuugaauaaagucugagugggcggcaaaaaaaaaaaaaaaaaaaaaaaaaaaaaaaaaaaaaaaaaaaaaaaaaaaaaaaaaaaaaaaaaaaaaaaaaaaaaaaaaaaaaaaaaaaaaaaaaaaa

SEQ ID NO: 26263 - RNA, 4095 nt, Artificial Sequence
  SARS-CoV-2/Wuhan/WIV05/2019__EPI_ISL_402128 spike protein mRNA gc mod (1-1273)(K986P_V987P_K986P_V987P_L18F_T20N_P26S_D138Y_R190S_K417T _E484K_N501Y_D614G_H655Y_T1027I)
gggaaauaagagagaaaagaagaguaagaagaaauauaagaccccggcgccgccaccauguucguguuccuggugcugcugccucugguguccagccagugugugaacuucaccaacagaacacagcugccuagcgccuacaccaacagcuuuaccagaggcguguacuaccccgacaagguguucagauccagcgugcugcacucuacccaggaccuguuccugccuuucuucagcaacgugaccugguuccacgccauccacguguccggcaccaauggcaccaagagauucgacaaccccgugcugcccuucaacgacgggguguacuuugccagcaccgagaaguccaacaucaucagaggcuggaucuucggcaccacacuggacagcaagacccagagccugcugaucgugaacaacgccaccaacguggucaucaaagugugcgaguuccaguucugcaacuaccccuuccugggcgucuacuaccacaagaacaacaagagcuggauggaaagcgaguuccggguguacagcagcgccaacaacugcaccuucgaguacgugucccagccuuuccugauggaccuggaaggcaagcagggcaacuucaagaaccugagcgaguucguguuuaagaacaucgacggcuacuucaagaucuacagcaagcacaccccuaucaaccucgugcgggaucugccucagggcuucucugcucuggaaccccugguggaucugcccaucggcaucaacaucacccgguuucagacacugcuggcccugcacagaagcuaccugacaccuggcgauagcagcagcggauggacagcuggugccgccgcuuacuaugugggcuaccugcagccuagaaccuuccugcugaaguacaacgagaacggcaccaucaccgacgccguggauugugcucuggauccucugagcgagacaaagugcacccugaaguccuucaccguggaaaagggcaucuaccagaccagcaacuuccgggugcagcccaccgaauccaucgugcgguuccccaauaucaccaaucugugccccuucggcgagguguucaaugccaccagauucgccucuguguacgccuggaaccggaagcggaucagcaauugcguggccgacuacuccgugcuguacaacuccgccagcuucagcaccuucaagugcuacggcguguccccuaccaagcugaacgaccugugcuucacaaacguguacgccgacagcuucgugauccggggagaugaagugcggcagauugccccuggacagacaggcaccaucgccgacuacaacuacaagcugcccgacgacuucaccggcugugugauugccuggaacagcaacaaccuggacuccaaagucggcggcaacuacaauuaccuguaccggcuguuccggaaguccaaucugaagcccuucgagcgggacaucuccaccgagaucuaucaggccggcagcaccccuuguaacggcgugaagggcuucaacugcuacuucccacugcaguccuacggcuuucagcccacauacggcgugggcuaucagcccuacagagugguggugcugagcuucgaacugcugcaugccccugccacagugugcggcccuaagaaaagcaccaaucucgugaagaacaaaugcgugaacuucaacuucaacggccugaccggcaccggcgugcugacagagagcaacaagaaguuccugccauuccagcaguuuggccgggauaucgccgauaccacagacgccguuagagauccccagacacuggaaauccuggacaucaccccuugcagcuucggcggagugucugugaucaccccuggcaccaacaccagcaaucagguggcagugcuguaccagggcgugaacuguaccgaagugcccguggccauucacgccgaucagcugacaccuacauggcggguguacuccaccggcagcaauguguuucagaccagagccggcugucugaucggagccgaguacgugaacaauagcuacgagugcgacauccccaucggcgcuggaaucugcgccagcuaccagacacagacaaacagcccucggagagccagaagcguggccagccagagcaucauugccuacacaaugucucugggcgccgagaacagcguggccuacuccaacaacucuaucgcuauccccaccaacuucaccaucagcgugaccacagagauccugccuguguccaugaccaagaccagcguggacugcaccauguacaucugcggcgauuccaccgagugcuccaaccugcugcugcaguacggcagcuucugcacccagcugaauagagcccugacagggaucgccguggaacaggacaagaacacccaagagguguucgcccaagugaagcagaucuacaagaccccuccuaucaaggacuucggcggcuucaauuucagccagauucugcccgauccuagcaagcccagcaagcggagcuucaucgaggaccugcuguucaacaaagugacacuggccgacgccggcuucaucaagcaguauggcgauugucugggcgacauugccgccagggaucugauuugcgcccagaaguuuaacggacugacagugcugccuccucugcugaccgaugagaugaucgcccaguacacaucugcccugcuggccggcacaaucacaagcggcuggacauuuggagcaggcgccgcucugcagauccccuuugcuaugcagauggccuaccgguucaacggcaucggagugacccagaaugugcuguacgagaaccagaagcugaucgccaaccaguucaacagcgccaucggcaagauccaggacagccugagcagcacagcaagcgcccugggaaagcugcaggacguggucaaccagaaugcccaggcacugaacacccuggucaagcagcuguccuccaacuucggcgccaucagcucugugcugaacgauauccugagcagacuggacccuccugaggccgaggugcagaucgacagacugaucacaggcagacugcagagccuccagacauacgugacccagcagcugaucagagccgccgagauuagagccucugccaaucuggccgccaucaagaugucugagugugugcugggccagagcaagagaguggacuuuugcggcaagggcuaccaccugaugagcuucccucagucugccccucacggcgugguguuucugcacgugacauaugugcccgcucaagagaagaauuucaccaccgcuccagccaucugccacgacggcaaagcccacuuuccuagagaaggcguguucguguccaacggcacccauugguucgugacacagcggaacuucuacgagccccagaucaucaccaccgacaacaccuucgugucuggcaacugcgacgucgugaucggcauugugaacaauaccguguacgacccucugcagcccgagcuggacagcuucaaagaggaacuggacaaguacuuuaagaaccacacaagccccgacguggaccugggcgauaucagcggaaucaaugccagcgucgugaacauccagaaagagaucgaccggcugaacgagguggccaagaaucugaacgagagccugaucgaccugcaagaacuggggaaguacgagcaguacaucaaguggcccugguacaucuggcugggcuuuaucgccggacugauugccaucgugauggucacaaucaugcuguguugcaugaccagcugcuguagcugccugaagggcuguuguagcuguggcagcugcugcaaguucgacgaggacgauucugagcccgugcugaagggcgugaaacugcacuacacaugauaauaggcuggagccucgguggccuagcuucuugccccuugggccuccccccagccccuccuccccuuccugcacccguacccccguggucuuugaauaaagucugagugggcggcaaaaaaaaaaaaaaaaaaaaaaaaaaaaaaaaaaaaaaaaaaaaaaaaaaaaaaaaaaaaaaaaaaaaaaaaaaaaaaaaaaaaaaaaaaaaaaaaaaaa

SEQ ID NO: 26264 - RNA, 4095 nt, Artificial Sequence
  SARS-CoV-2/Wuhan/WIV05/2019__EPI_ISL_402128 spike protein mRNA gc mod (1-1273)(K986P_V987P_K986P_V987P_S13I_W152C_L452R_D614G)
gggaaauaagagagaaaagaagaguaagaagaaauauaagaccccggcgccgccaccauguucguguuccuggugcugcugccucugguguccauccagugugugaaccugaccaccagaacacagcugccuccagccuacaccaacagcuuuaccagaggcguguacuaccccgacaagguguucagauccagcgugcugcacucuacccaggaccuguuccugccuuucuucagcaacgugaccugguuccacgccauccacguguccggcaccaauggcaccaagagauucgacaaccccgugcugcccuucaacgacgggguguacuuugccagcaccgagaaguccaacaucaucagaggcuggaucuucggcaccacacuggacagcaagacccagagccugcugaucgugaacaacgccaccaacguggucaucaaagugugcgaguuccaguucugcaacgaccccuuccugggcgucuacuaccacaagaacaacaagagcugcauggaaagcgaguuccggguguacagcagcgccaacaacugcaccuucgaguacgugucccagccuuuccugauggaccuggaaggcaagcagggcaacuucaagaaccugcgcgaguucguguuuaagaacaucgacggcuacuucaagaucuacagcaagcacaccccuaucaaccucgugcgggaucugccucagggcuucucugcucuggaaccccugguggaucugcccaucggcaucaacaucacccgguuucagacacugcuggcccugcacagaagcuaccugacaccuggcgauagcagcagcggauggacagcuggugccgccgcuuacuaugugggcuaccugcagccuagaaccuuccugcugaaguacaacgagaacggcaccaucaccgacgccguggauugugcucuggauccucugagcgagacaaagugcacccugaaguccuucaccguggaaaagggcaucuaccagaccagcaacuuccgggugcagcccaccgaauccaucgugcgguuccccaauaucaccaaucugugccccuucggcgagguguucaaugccaccagauucgccucuguguacgccuggaaccggaagcggaucagcaauugcguggccgacuacuccgugcuguacaacuccgccagcuucagcaccuucaagugcuacggcguguccccuaccaagcugaacgaccugugcuucacaaacguguacgccgacagcuucgugauccggggagaugaagugcggcagauugccccuggacagacaggcaagaucgccgacuacaacuacaagcugcccgacgacuucaccggcugugugauugccuggaacagcaacaaccuggacuccaaagucggcggcaacuacaauuaccgcuaccggcuguuccggaaguccaaucugaagcccuucgagcgggacaucuccaccgagaucuaucaggccggcagcaccccuuguaacggcguggaaggcuucaacugcuacuucccacugcaguccuacggcuuucagcccacaaauggcgugggcuaucagcccuacagagugguggugcugagcuucgaacugcugcaugccccugccacagugugcggcccuaagaaaagcaccaaucucgugaagaacaaaugcgugaacuucaacuucaacggccugaccggcaccggcgugcugacagagagcaacaagaaguuccugccauuccagcaguuuggccgggauaucgccgauaccacagacgccguuagagauccccagacacuggaaauccuggacaucaccccuugcagcuucggcggagugucugugaucaccccuggcaccaacaccagcaaucagguggcagugcuguaccagggcgugaacuguaccgaagugcccguggccauucacgccgaucagcugacaccuacauggcggguguacuccaccggcagcaauguguuucagaccagagccggcugucugaucggagccgagcacgugaacaauagcuacgagugcgacauccccaucggcgcuggaaucugcgccagcuaccagacacagacaaacagcccucggagagccagaagcguggccagccagagcaucauugccuacacaaugucucugggcgccgagaacagcguggccuacuccaacaacucuaucgcuauccccaccaacuucaccaucagcgugaccacagagauccugccuguguccaugaccaagaccagcguggacugcaccauguacaucugcggcgauuccaccgagugcuccaaccugcugcugcaguacggcagcuucugcacccagcugaauagagcccugacagggaucgccguggaacaggacaagaacacccaagagguguucgcccaagugaagcagaucuacaagaccccuccuaucaaggacuucggcggcuucaauuucagccagauucugcccgauccuagcaagcccagcaagcggagcuucaucgaggaccugcuguucaacaaagugacacuggccgacgccggcuucaucaagcaguauggcgauugucugggcgacauugccgccagggaucugauuugcgcccagaaguuuaacggacugacagugcugccuccucugcugaccgaugagaugaucgcccaguacacaucugcccugcuggccggcacaaucacaagcggcuggacauuuggagcaggcgccgcucugcagauccccuuugcuaugcagauggccuaccgguucaacggcaucggagugacccagaaugugcuguacgagaaccagaagcugaucgccaaccaguucaacagcgccaucggcaagauccaggacagccugagcagcacagcaagcgcccugggaaagcugcaggacguggucaaccagaaugcccaggcacugaacacccuggucaagcagcuguccuccaacuucggcgccaucagcucugugcugaacgauauccugagcagacuggacccuccugaggccgaggugcagaucgacagacugaucacaggcagacugcagagccuccagacauacgugacccagcagcugaucagagccgccgagauuagagccucugccaaucuggccgccaccaagaugucugagugugugcugggccagagcaagagaguggacuuuugcggcaagggcuaccaccugaugagcuucccucagucugccccucacggcgugguguuucugcacgugacauaugugcccgcucaagagaagaauuucaccaccgcuccagccaucugccacgacggcaaagcccacuuuccuagagaaggcguguucguguccaacggcacccauugguucgugacacagcggaacuucuacgagccccagaucaucaccaccgacaacaccuucgugucuggcaacugcgacgucgugaucggcauugugaacaauaccguguacgacccucugcagcccgagcuggacagcuucaaagaggaacuggacaaguacuuuaagaaccacacaagccccgacguggaccugggcgauaucagcggaaucaaugccagcgucgugaacauccagaaagagaucgaccggcugaacgagguggccaagaaucugaacgagagccugaucgaccugcaagaacuggggaaguacgagcaguacaucaaguggcccugguacaucuggcugggcuuuaucgccggacugauugccaucgugauggucacaaucaugcuguguugcaugaccagcugcuguagcugccugaagggcuguuguagcuguggcagcugcugcaaguucgacgaggacgauucugagcccgugcugaagggcgugaaacugcacuacacaugauaauaggcuggagccucgguggccuagcuucuugccccuugggccuccccccagccccuccuccccuuccugcacccguacccccguggucuuugaauaaagucugagugggcggcaaaaaaaaaaaaaaaaaaaaaaaaaaaaaaaaaaaaaaaaaaaaaaaaaaaaaaaaaaaaaaaaaaaaaaaaaaaaaaaaaaaaaaaaaaaaaaaaaaaa

SEQ ID NO: 26265 - RNA, 1603 nt, Artificial Sequence
  SARS-CoV-2/Wuhan/WIV05/2019__EPI_ISL_402128 spike protein mRNA gc (1-15,334-528) Ferritin construct
agaauaaacuaguauucuucugguccccacagacucagagagaacccgccaccauguucguguuccugguccuccugccccuggugagcucccagugcaaccugugccccuucggcgagguguucaacgccacccgguucgccagcgucuacgccuggaaccgcaagcggaucuccaacugcguggcggacuacagcgugcuguacaacuccgccagcuucuccacguucaagugcuacggcgucagccccaccaagcucaacgaccugugcuucaccaacguguacgccgacuccuucgugauccgcggggacgagguccggcagaucgcccccggccagaccgggaagaucgccgacuacaacuacaagcugccggacgacuucacgggcugcgugaucgcguggaacagcaacaaccucgacuccaaggucgggggcaacuacaacuaccuguaccgccuguuccgcaagagcaaccucaagcccuucgagcgggacaucuccaccgagaucuaccaggccggcagcacccccugcaacgggguggagggcuucaacugcuacuucccccugcaguccuacggguuccagccgaccaacggcgugggguaccagcccuaccggguggucgugcugagcuucgagcuccugcacgcccccgccacggugugcggccccaagggcggggguggaagcggcggggguggaagugacaucaucaagcuccugaacgagcaggucaacaaggagaugcaguccagcaaccuguacauguccaugagcuccuggugcuacacccacagccucgacggcgccgggcuguuccuguucgaccacgccgcggaggaguacgagcacgccaagaagcucaucaucuuccugaacgagaacaacgugcccgugcagcugaccuccaucagcgccccggagcacaaguucgagggccucacgcagaucuuccagaaggccuacgagcacgagcagcacaucuccgagagcaucaacaacaucguggaccacgccaucaaguccaaggaccacgcgaccuucaacuuccugcagugguacgucgccgagcagcacgaggaggaggugcuguucaaggacauccucgacaagaucgagcugaucgggaacgagaaccacggccuguaccucgccgaccaguacgugaaggggaucgccaagagccgcaaguccugaugacucgagcugguacugcaugcacgcaaugcuagcugccccuuucccguccuggguaccccgagucucccccgaccucgggucccagguaugcucccaccuccaccugccccacucaccaccucugcuaguuccagacaccucccaagcacgcagcaaugcagcucaaaacgcuuagccuagccacacccccacgggaaacagcagugauuaaccuuuagcaauaaacgaaaguuuaacuaagcuauacuaaccccaggguuggucaauuucgugccagccacacccuggagcuagcaaaaaaaaaaaaaaaaaaaaaaaaaaaaaaaaaaaaaaaaaaaaaaaaaaaaaaaaaaaaaaaaaaaaaaaaaaaaaaaaaaaaaaaaaaaaaaaaaaaa

SEQ ID NO: 26266 - RNA, 1201 nt, Artificial Sequence
  SARS-CoV-2/Wuhan/WIV05/2019__EPI_ISL_402128 spike protein mRNA gc (334-528) Foldon construct
agaauaaacuaguauucuucugguccccacagacucagagagaacccgccaccaugcccaugggcagccugcagccgcucgccacccuguaccugcucgggaugcugguggccuccguccuggcgaaccugugccccuucggcgagguguucaacgccacccgguucgccagcgucuacgccuggaaccgcaagcggaucuccaacugcguggcggacuacagcgugcuguacaacuccgccagcuucuccacguucaagugcuacggcgucagccccaccaagcucaacgaccugugcuucaccaacguguacgccgacuccuucgugauccgcggggacgagguccggcagaucgcccccggccagaccgggaagaucgccgacuacaacuacaagcugccggacgacuucacgggcugcgugaucgcguggaacagcaacaaccucgacuccaaggucgggggcaacuacaacuaccuguaccgccuguuccgcaagagcaaccucaagcccuucgagcgggacaucuccaccgagaucuaccaggccggcagcacccccugcaacgggguggagggcuucaacugcuacuucccccugcaguccuacggguuccagccgaccaacggcgugggguaccagcccuaccggguggucgugcugagcuucgagcuccugcacgcccccgccacggugugcggccccaagggcagcggcggguacauccccgaggccccgcgcgacggccaggccuacgugcggaaggacggcgaguggguccugcugagcaccuuccucugaugacucgagcugguacugcaugcacgcaaugcuagcugccccuuucccguccuggguaccccgagucucccccgaccucgggucccagguaugcucccaccuccaccugccccacucaccaccucugcuaguuccagacaccucccaagcacgcagcaaugcagcucaaaacgcuuagccuagccacacccccacgggaaacagcagugauuaaccuuuagcaauaaacgaaaguuuaacuaagcuauacuaaccccaggguuggucaauuucgugccagccacacccuggagcuagcaaaaaaaaaaaaaaaaaaaaaaaaaaaaaaaaaaaaaaaaaaaaaaaaaaaaaaaaaaaaaaaaaaaaaaaaaaaaaaaaaaaaaaaaaaaaaaaaaaaa

SEQ ID NO: 26267 - RNA, 1579 nt, Artificial Sequence
  SARS-CoV-2/Wuhan/WIV05/2019__EPI_ISL_402128 spike protein mRNA gc (1-15,334-528) LumSynth construct
agaauaaacuaguauucuucugguccccacagacucagagagaacccgccaccauguucguguuccugguccuccugccccuggugagcucccagugcaaccugugccccuucggcgagguguucaacgccacccgguucgccagcgucuacgccuggaaccgcaagcggaucuccaacugcguggcggacuacagcgugcuguacaacuccgccagcuucuccacguucaagugcuacggcgucagccccaccaagcucaacgaccugugcuucaccaacguguacgccgacuccuucgugauccgcggggacgagguccggcagaucgcccccggccagaccgggaagaucgccgacuacaacuacaagcugccggacgacuucacgggcugcgugaucgcguggaacagcaacaaccucgacuccaaggucgggggcaacuacaacuaccuguaccgccuguuccgcaagagcaaccucaagcccuucgagcgggacaucuccaccgagaucuaccaggccggcagcacccccugcaacgggguggagggcuucaacugcuacuucccccugcaguccuacggguuccagccgaccaacggcgugggguaccagcccuaccggguggucgugcugagcuucgagcuccugcacgcccccgccacggugugcggccccaagggcggcggcggcuccggaggcggagguagcgggggacagaucuacgagggcaagcugaccgccgaggggcuccgcuucggcaucguggccagccgguucaaccacgcgcuggucgaccgccugguggagggggccaucgacgccaucgugcggcacggcgggcgcgaggaggacaucacccucguccgggugcccggcuccugggagaucccgguggccgccggcgagcuggcccgcaaggaggacaucgacgcggucaucgccaucggggugcugauccggggcgccacgccccacuucgacuacaucgccagcgagguguccaaggggcucgcggaccugagccuggagcuccgcaagcccaucaccuucggcgucaucaccgccgacacccuggagcaggccaucgagcgggccgggacgaagcacggcaacaagggcugggaggccgcgcuguccgccaucgagauggccaaccucuucaagagccugcgcugaugacucgagcugguacugcaugcacgcaaugcuagcugccccuuucccguccuggguaccccgagucucccccgaccucgggucccagguaugcucccaccuccaccugccccacucaccaccucugcuaguuccagacaccucccaagcacgcagcaaugcagcucaaaacgcuuagccuagccacacccccacgggaaacagcagugauuaaccuuuagcaauaaacgaaaguuuaacuaagcuauacuaaccccaggguuggucaauuucgugccagccacacccuggagcuagcaaaaaaaaaaaaaaaaaaaaaaaaaaaaaaaaaaaaaaaaaaaaaaaaaaaaaaaaaaaaaaaaaaaaaaaaaaaaaaaaaaaaaaaaaaaaaaaaaaaa

SEQ ID NO: 26268 - RNA, 1540 nt, Artificial Sequence
  SARS-CoV-2/Wuhan/WIV05/2019__EPI_ISL_402128 spike protein mRNA gc (334-528) LumSynth construct
agaauaaacuaguauucuucugguccccacagacucagagagaacccgccaccaugcagaucuacgagggcaagcugaccgccgaggggcuccgcuucggcaucguggccagccgguucaaccacgcgcuggucgaccgccugguggagggggccaucgacgccaucgugcggcacggcgggcgcgaggaggacaucacccucguccgggugcccggcuccugggagaucccgguggccgccggcgagcuggcccgcaaggaggacaucgacgcggucaucgccaucggggugcugauccggggcgccacgccccacuucgacuacaucgccagcgagguguccaaggggcucgcggaccugagccuggagcuccgcaagcccaucaccuucggcgucaucaccgccgacacccuggagcaggccaucgagcgggccgggacgaagcacggcaacaagggcugggaggccgcgcuguccgccaucgagauggccaaccucuucaagagccugcgcggcgggggcgggagcggcgggggcggcuccgggggcgggaaccugugccccuucggcgagguguucaacgccacccgguucgccagcgucuacgccuggaaccgcaagcggaucuccaacugcguggcggacuacagcgugcuguacaacuccgccagcuucuccacguucaagugcuacggcgucagccccaccaagcucaacgaccugugcuucaccaacguguacgccgacuccuucgugauccgcggggacgagguccggcagaucgcccccggccagaccgggaagaucgccgacuacaacuacaagcugccggacgacuucacgggcugcgugaucgcguggaacagcaacaaccucgacuccaaggucgggggcaacuacaacuaccuguaccgccuguuccgcaagagcaaccucaagcccuucgagcgggacaucuccaccgagaucuaccaggccggcagcacccccugcaacgggguggagggcuucaacugcuacuucccccugcaguccuacggguuccagccgaccaacggcgugggguaccagcccuaccggguggucgugcugagcuucgagcuccugcacgcccccgccacggugugcggccccaagugaugacucgagcugguacugcaugcacgcaaugcuagcugccccuuucccguccuggguaccccgagucucccccgaccucgggucccagguaugcucccaccuccaccugccccacucaccaccucugcuaguuccagacaccucccaagcacgcagcaaugcagcucaaaacgcuuagccuagccacacccccacgggaaacagcagugauuaaccuuuagcaauaaacgaaaguuuaacuaagcuauacuaaccccaggguuggucaauuucgugccagccacacccuggagcuagcaaaaaaaaaaaaaaaaaaaaaaaaaaaaaaaaaaaaaaaaaaaaaaaaaaaaaaaaaaaaaaaaaaaaaaaaaaaaaaaaaaaaaaaaaaaaaaaaaaaa

SEQ ID NO: 26269 - RNA, 4273 nt, Artificial Sequence
  SARS-CoV-2/Wuhan/WIV05/2019__EPI_ISL_402128 spike protein mRNA gc (1-1273)
agaauaaacuaguauucuucugguccccacagacucagagagaacccgccaccauguucguguuccugguccuccugccccuggugagcucccagugcgugaaccucaccacccgcacgcagcugccgcccgccuacaccaacagcuucacccggggcgucuacuaccccgacaagguguuccgcuccagcgugcugcacuccacccaggaccucuuccugcccuucuucagcaacgucacgugguuccacgccauccacguguccgggaccaacggcaccaagcgguucgacaacccggugcugcccuucaacgacggggucuacuucgcgagcaccgagaaguccaacaucauccgcggcuggaucuucgggacgacccucgacagcaagacccagucccugcugaucgugaacaacgccaccaacguggucaucaaggugugcgaguuccaguucugcaacgaccccuuccucggcguguacuaccacaagaacaacaagagcuggauggaguccgaguuccgggucuacagcuccgccaacaacugcacguucgaguacgugagccagcccuuccugauggaccuggagggcaagcaggggaacuucaagaaccuccgcgaguucguguucaagaacaucgacggcuacuucaagaucuacuccaagcacaccccgaucaaccugguccgggaccugccccagggguucagcgcccucgagccccugguggaccugcccaucggcaucaacaucacccgcuuccagacccuccuggcccugcaccgguccuaccucacgccgggggacagcagcuccggcuggaccgcgggcgccgccgccuacuacgugggguaccugcagccccgcaccuuccugcucaaguacaacgagaacggcaccaucacggacgcggucgacugcgcccuggacccccugagcgagaccaagugcacccucaaguccuucaccguggagaaggggaucuaccagacgagcaacuuccgggugcagcccaccgaguccaucguccgcuucccgaacaucaccaaccugugccccuucggcgagguguucaacgccacccgguucgccagcgucuacgccuggaaccgcaagcggaucuccaacugcguggcggacuacagcgugcuguacaacuccgccagcuucuccacguucaagugcuacggcgucagccccaccaagcucaacgaccugugcuucaccaacguguacgccgacuccuucgugauccgcggggacgagguccggcagaucgcccccggccagaccgggaagaucgccgacuacaacuacaagcugccggacgacuucacgggcugcgugaucgcguggaacagcaacaaccucgacuccaaggucgggggcaacuacaacuaccuguaccgccuguuccgcaagagcaaccucaagcccuucgagcgggacaucuccaccgagaucuaccaggccggcagcacccccugcaacgggguggagggcuucaacugcuacuucccccugcaguccuacggguuccagccgaccaacggcgugggguaccagcccuaccggguggucgugcugagcuucgagcuccugcacgcccccgccacggugugcggccccaagaaguccaccaaccuggucaagaacaagugcgugaacuucaacuucaacggccucaccgggaccggcgugcugaccgagagcaacaagaaguuccugccguuccagcaguucgggcgcgacaucgccgacacgaccgacgcgguccgcgacccccagacccuggagauccucgacaucacccccugcagcuucggcgggguguccgugaucacgccgggcaccaacaccagcaaccaggucgccgugcuguaccaggacgugaacugcaccgagguccccguggccauccacgccgaccagcugacgcccaccuggcggguguacuccaccggcagcaacgucuuccagacccgcgccgggugccucaucggcgcggagcacgugaacaacuccuacgagugcgacauccccaucggggccggcaucugcgccagcuaccagacgcagaccaacuccccgcggcgcgcccggagcguggcgucccagagcaucaucgccuacaccaugucccugggcgccgagaacagcgucgccuacuccaacaacagcaucgccauccccaccaacuucacgaucuccgugaccaccgagauccugcccgugagcaugaccaagacgagcgucgacugcaccauguacaucugcggggacuccaccgagugcagcaaccuccugcugcaguacggcuccuucugcacccagcucaaccgcgcgcugacggggaucgccguggagcaggacaagaacacccaggagguguucgcccaggucaagcagaucuacaagacgcccccgaucaaggacuucggcggguucaacuucagccagauccugcccgaccccuccaagcccagcaagcgguccuucaucgaggaccuccuguucaacaaggugacccuggccgacgccggcuucaucaagcaguacggcgacugccucggggacaucgcggcccgcgaccugaucugcgcccagaaguucaacggccugaccgugcucccgccccugcugaccgacgagaugaucgcccaguacaccagcgcccuccuggcggggaccaucacguccggcuggaccuucggggccggcgccgcccugcagauccccuucgcgaugcagauggccuaccgguucaacggcaucggggucacccagaacgugcucuacgagaaccagaagcugaucgccaaccaguucaacagcgccaucggcaagauccaggacucccugagcuccaccgccagcgcgcucgggaagcugcaggacguggucaaccagaacgcccaggcccugaacacgcucgugaagcagcuguccagcaacuucggcgccaucuccagcgugcugaacgacauccucucccgccuggacaaggucgaggccgaggugcagaucgaccggcugaucaccgggcgccuccagagccugcagaccuacgugacccagcagcugauccgggcggccgagauccgcgccagcgccaaccucgccgcgaccaagauguccgagugcguccugggccagagcaagcggguggacuucugcggcaagggguaccaccugauguccuucccccagagcgccccgcacggcguggucuuccuccacgugacguacguccccgcccaggagaagaacuucaccaccgcccccgcgaucugccacgacgggaaggcccacuucccccgcgagggcguguucguguccaacgggacccacugguucgucacgcagcggaacuucuacgagccgcagaucaucaccaccgacaacaccuucgugagcggcaacugcgacguggucaucggcaucgugaacaacacgguguacgacccccugcagcccgagcuggacuccuucaaggaggagcucgacaaguacuucaagaaccacaccagccccgacgucgaccugggggacaucuccggcaucaacgccagcguggugaacauccagaaggagaucgaccgccugaacgaggucgccaagaaccucaacgagucccugaucgaccugcaggagcucgggaaguacgagcaguacaucaaguggccgugguacaucuggcugggcuucaucgccggccugaucgcgaucgugauggugaccaucaugcucugcugcaugaccagcugcugcuccugccugaaggggugcugcagcugcggcuccugcugcaaguucgacgaggacgacagcgagcccguccugaagggggugaagcuccacuacacgugaugacucgagcugguacugcaugcacgcaaugcuagcugccccuuucccguccuggguaccccgagucucccccgaccucgggucccagguaugcucccaccuccaccugccccacucaccaccucugcuaguuccagacaccucccaagcacgcagcaaugcagcucaaaacgcuuagccuagccacacccccacgggaaacagcagugauuaaccuuuagcaauaaacgaaaguuuaacuaagcuauacuaaccccaggguuggucaauuucgugccagccacacccuggagcuagcaaaaaaaaaaaaaaaaaaaaaaaaaaaaaaaaaaaaaaaaaaaaaaaaaaaaaaaaaaaaaaaaaaaaaaaaaaaaaaaaaaaaaaaaaaaaaaaaaaaa

SEQ ID NO: 26270 - RNA, 4273 nt, Artificial Sequence
  SARS-CoV-2/Wuhan/WIV05/2019__EPI_ISL_402128 spike protein mRNA gc (1-1273)(D614G)
agaauaaacuaguauucuucugguccccacagacucagagagaacccgccaccauguucguguuccugguccuccugccccuggugagcucccagugcgugaaccucaccacccgcacgcagcugccgcccgccuacaccaacagcuucacccggggcgucuacuaccccgacaagguguuccgcuccagcgugcugcacuccacccaggaccucuuccugcccuucuucagcaacgucacgugguuccacgccauccacguguccgggaccaacggcaccaagcgguucgacaacccggugcugcccuucaacgacggggucuacuucgcgagcaccgagaaguccaacaucauccgcggcuggaucuucgggacgacccucgacagcaagacccagucccugcugaucgugaacaacgccaccaacguggucaucaaggugugcgaguuccaguucugcaacgaccccuuccucggcguguacuaccacaagaacaacaagagcuggauggaguccgaguuccgggucuacagcuccgccaacaacugcacguucgaguacgugagccagcccuuccugauggaccuggagggcaagcaggggaacuucaagaaccuccgcgaguucguguucaagaacaucgacggcuacuucaagaucuacuccaagcacaccccgaucaaccugguccgggaccugccccagggguucagcgcccucgagccccugguggaccugcccaucggcaucaacaucacccgcuuccagacccuccuggcccugcaccgguccuaccucacgccgggggacagcagcuccggcuggaccgcgggcgccgccgccuacuacgugggguaccugcagccccgcaccuuccugcucaaguacaacgagaacggcaccaucacggacgcggucgacugcgcccuggacccccugagcgagaccaagugcacccucaaguccuucaccguggagaaggggaucuaccagacgagcaacuuccgggugcagcccaccgaguccaucguccgcuucccgaacaucaccaaccugugccccuucggcgagguguucaacgccacccgguucgccagcgucuacgccuggaaccgcaagcggaucuccaacugcguggcggacuacagcgugcuguacaacuccgccagcuucuccacguucaagugcuacggcgucagccccaccaagcucaacgaccugugcuucaccaacguguacgccgacuccuucgugauccgcggggacgagguccggcagaucgcccccggccagaccgggaagaucgccgacuacaacuacaagcugccggacgacuucacgggcugcgugaucgcguggaacagcaacaaccucgacuccaaggucgggggcaacuacaacuaccuguaccgccuguuccgcaagagcaaccucaagcccuucgagcgggacaucuccaccgagaucuaccaggccggcagcacccccugcaacgggguggagggcuucaacugcuacuucccccugcaguccuacggguuccagccgaccaacggcgugggguaccagcccuaccggguggucgugcugagcuucgagcuccugcacgcccccgccacggugugcggccccaagaaguccaccaaccuggucaagaacaagugcgugaacuucaacuucaacggccucaccgggaccggcgugcugaccgagagcaacaagaaguuccugccguuccagcaguucgggcgcgacaucgccgacacgaccgacgcgguccgcgacccccagacccuggagauccucgacaucacccccugcagcuucggcgggguguccgugaucacgccgggcaccaacaccagcaaccaggucgccgugcuguaccagggcgugaacugcaccgagguccccguggccauccacgccgaccagcugacgcccaccuggcggguguacuccaccggcagcaacgucuuccagacccgcgccgggugccucaucggcgcggagcacgugaacaacuccuacgagugcgacauccccaucggggccggcaucugcgccagcuaccagacgcagaccaacuccccgcggcgcgcccggagcguggcgucccagagcaucaucgccuacaccaugucccugggcgccgagaacagcgucgccuacuccaacaacagcaucgccauccccaccaacuucacgaucuccgugaccaccgagauccugcccgugagcaugaccaagacgagcgucgacugcaccauguacaucugcggggacuccaccgagugcagcaaccuccugcugcaguacggcuccuucugcacccagcucaaccgcgcgcugacggggaucgccguggagcaggacaagaacacccaggagguguucgcccaggucaagcagaucuacaagacgcccccgaucaaggacuucggcggguucaacuucagccagauccugcccgaccccuccaagcccagcaagcgguccuucaucgaggaccuccuguucaacaaggugacccuggccgacgccggcuucaucaagcaguacggcgacugccucggggacaucgcggcccgcgaccugaucugcgcccagaaguucaacggccugaccgugcucccgccccugcugaccgacgagaugaucgcccaguacaccagcgcccuccuggcggggaccaucacguccggcuggaccuucggggccggcgccgcccugcagauccccuucgcgaugcagauggccuaccgguucaacggcaucggggucacccagaacgugcucuacgagaaccagaagcugaucgccaaccaguucaacagcgccaucggcaagauccaggacucccugagcuccaccgccagcgcgcucgggaagcugcaggacguggucaaccagaacgcccaggcccugaacacgcucgugaagcagcuguccagcaacuucggcgccaucuccagcgugcugaacgacauccucucccgccuggacaaggucgaggccgaggugcagaucgaccggcugaucaccgggcgccuccagagccugcagaccuacgugacccagcagcugauccgggcggccgagauccgcgccagcgccaaccucgccgcgaccaagauguccgagugcguccugggccagagcaagcggguggacuucugcggcaagggguaccaccugauguccuucccccagagcgccccgcacggcguggucuuccuccacgugacguacguccccgcccaggagaagaacuucaccaccgcccccgcgaucugccacgacgggaaggcccacuucccccgcgagggcguguucguguccaacgggacccacugguucgucacgcagcggaacuucuacgagccgcagaucaucaccaccgacaacaccuucgugagcggcaacugcgacguggucaucggcaucgugaacaacacgguguacgacccccugcagcccgagcuggacuccuucaaggaggagcucgacaaguacuucaagaaccacaccagccccgacgucgaccugggggacaucuccggcaucaacgccagcguggugaacauccagaaggagaucgaccgccugaacgaggucgccaagaaccucaacgagucccugaucgaccugcaggagcucgggaaguacgagcaguacaucaaguggccgugguacaucuggcugggcuucaucgccggccugaucgcgaucgugauggugaccaucaugcucugcugcaugaccagcugcugcuccugccugaaggggugcugcagcugcggcuccugcugcaaguucgacgaggacgacagcgagcccguccugaagggggugaagcuccacuacacgugaugacucgagcugguacugcaugcacgcaaugcuagcugccccuuucccguccuggguaccccgagucucccccgaccucgggucccagguaugcucccaccuccaccugccccacucaccaccucugcuaguuccagacaccucccaagcacgcagcaaugcagcucaaaacgcuuagccuagccacacccccacgggaaacagcagugauuaaccuuuagcaauaaacgaaaguuuaacuaagcuauacuaaccccaggguuggucaauuucgugccagccacacccuggagcuagcaaaaaaaaaaaaaaaaaaaaaaaaaaaaaaaaaaaaaaaaaaaaaaaaaaaaaaaaaaaaaaaaaaaaaaaaaaaaaaaaaaaaaaaaaaaaaaaaaaaa

SEQ ID NO: 26271 - RNA, 4273 nt, Artificial Sequence
  SARS-CoV-2/Wuhan/WIV05/2019__EPI_ISL_402128 spike protein mRNA gc (1-1273)(A222V_D614G)
agaauaaacuaguauucuucugguccccacagacucagagagaacccgccaccauguucguguuccugguccuccugccccuggugagcucccagugcgugaaccucaccacccgcacgcagcugccgcccgccuacaccaacagcuucacccggggcgucuacuaccccgacaagguguuccgcuccagcgugcugcacuccacccaggaccucuuccugcccuucuucagcaacgucacgugguuccacgccauccacguguccgggaccaacggcaccaagcgguucgacaacccggugcugcccuucaacgacggggucuacuucgcgagcaccgagaaguccaacaucauccgcggcuggaucuucgggacgacccucgacagcaagacccagucccugcugaucgugaacaacgccaccaacguggucaucaaggugugcgaguuccaguucugcaacgaccccuuccucggcguguacuaccacaagaacaacaagagcuggauggaguccgaguuccgggucuacagcuccgccaacaacugcacguucgaguacgugagccagcccuuccugauggaccuggagggcaagcaggggaacuucaagaaccuccgcgaguucguguucaagaacaucgacggcuacuucaagaucuacuccaagcacaccccgaucaaccugguccgggaccugccccagggguucagcguccucgagccccugguggaccugcccaucggcaucaacaucacccgcuuccagacccuccuggcccugcaccgguccuaccucacgccgggggacagcagcuccggcuggaccgcgggcgccgccgccuacuacgugggguaccugcagccccgcaccuuccugcucaaguacaacgagaacggcaccaucacggacgcggucgacugcgcccuggacccccugagcgagaccaagugcacccucaaguccuucaccguggagaaggggaucuaccagacgagcaacuuccgggugcagcccaccgaguccaucguccgcuucccgaacaucaccaaccugugccccuucggcgagguguucaacgccacccgguucgccagcgucuacgccuggaaccgcaagcggaucuccaacugcguggcggacuacagcgugcuguacaacuccgccagcuucuccacguucaagugcuacggcgucagccccaccaagcucaacgaccugugcuucaccaacguguacgccgacuccuucgugauccgcggggacgagguccggcagaucgcccccggccagaccgggaagaucgccgacuacaacuacaagcugccggacgacuucacgggcugcgugaucgcguggaacagcaacaaccucgacuccaaggucgggggcaacuacaacuaccuguaccgccuguuccgcaagagcaaccucaagcccuucgagcgggacaucuccaccgagaucuaccaggccggcagcacccccugcaacgggguggagggcuucaacugcuacuucccccugcaguccuacggguuccagccgaccaacggcgugggguaccagcccuaccggguggucgugcugagcuucgagcuccugcacgcccccgccacggugugcggccccaagaaguccaccaaccuggucaagaacaagugcgugaacuucaacuucaacggccucaccgggaccggcgugcugaccgagagcaacaagaaguuccugccguuccagcaguucgggcgcgacaucgccgacacgaccgacgcgguccgcgacccccagacccuggagauccucgacaucacccccugcagcuucggcgggguguccgugaucacgccgggcaccaacaccagcaaccaggucgccgugcuguaccagggcgugaacugcaccgagguccccguggccauccacgccgaccagcugacgcccaccuggcggguguacuccaccggcagcaacgucuuccagacccgcgccgggugccucaucggcgcggagcacgugaacaacuccuacgagugcgacauccccaucggggccggcaucugcgccagcuaccagacgcagaccaacuccccgcggcgcgcccggagcguggcgucccagagcaucaucgccuacaccaugucccugggcgccgagaacagcgucgccuacuccaacaacagcaucgccauccccaccaacuucacgaucuccgugaccaccgagauccugcccgugagcaugaccaagacgagcgucgacugcaccauguacaucugcggggacuccaccgagugcagcaaccuccugcugcaguacggcuccuucugcacccagcucaaccgcgcgcugacggggaucgccguggagcaggacaagaacacccaggagguguucgcccaggucaagcagaucuacaagacgcccccgaucaaggacuucggcggguucaacuucagccagauccugcccgaccccuccaagcccagcaagcgguccuucaucgaggaccuccuguucaacaaggugacccuggccgacgccggcuucaucaagcaguacggcgacugccucggggacaucgcggcccgcgaccugaucugcgcccagaaguucaacggccugaccgugcucccgccccugcugaccgacgagaugaucgcccaguacaccagcgcccuccuggcggggaccaucacguccggcuggaccuucggggccggcgccgcccugcagauccccuucgcgaugcagauggccuaccgguucaacggcaucggggucacccagaacgugcucuacgagaaccagaagcugaucgccaaccaguucaacagcgccaucggcaagauccaggacucccugagcuccaccgccagcgcgcucgggaagcugcaggacguggucaaccagaacgcccaggcccugaacacgcucgugaagcagcuguccagcaacuucggcgccaucuccagcgugcugaacgacauccucucccgccuggacaaggucgaggccgaggugcagaucgaccggcugaucaccgggcgccuccagagccugcagaccuacgugacccagcagcugauccgggcggccgagauccgcgccagcgccaaccucgccgcgaccaagauguccgagugcguccugggccagagcaagcggguggacuucugcggcaagggguaccaccugauguccuucccccagagcgccccgcacggcguggucuuccuccacgugacguacguccccgcccaggagaagaacuucaccaccgcccccgcgaucugccacgacgggaaggcccacuucccccgcgagggcguguucguguccaacgggacccacugguucgucacgcagcggaacuucuacgagccgcagaucaucaccaccgacaacaccuucgugagcggcaacugcgacguggucaucggcaucgugaacaacacgguguacgacccccugcagcccgagcuggacuccuucaaggaggagcucgacaaguacuucaagaaccacaccagccccgacgucgaccugggggacaucuccggcaucaacgccagcguggugaacauccagaaggagaucgaccgccugaacgaggucgccaagaaccucaacgagucccugaucgaccugcaggagcucgggaaguacgagcaguacaucaaguggccgugguacaucuggcugggcuucaucgccggccugaucgcgaucgugauggugaccaucaugcucugcugcaugaccagcugcugcuccugccugaaggggugcugcagcugcggcuccugcugcaaguucgacgaggacgacagcgagcccguccugaagggggugaagcuccacuacacgugaugacucgagcugguacugcaugcacgcaaugcuagcugccccuuucccguccuggguaccccgagucucccccgaccucgggucccagguaugcucccaccuccaccugccccacucaccaccucugcuaguuccagacaccucccaagcacgcagcaaugcagcucaaaacgcuuagccuagccacacccccacgggaaacagcagugauuaaccuuuagcaauaaacgaaaguuuaacuaagcuauacuaaccccaggguuggucaauuucgugccagccacacccuggagcuagcaaaaaaaaaaaaaaaaaaaaaaaaaaaaaaaaaaaaaaaaaaaaaaaaaaaaaaaaaaaaaaaaaaaaaaaaaaaaaaaaaaaaaaaaaaaaaaaaaaaa

SEQ ID NO: 26272 - RNA, 4273 nt, Artificial Sequence
  SARS-CoV-2/Wuhan/WIV05/2019__EPI_ISL_402128 spike protein mRNA gc (1-1273)(N439K_D614G)
agaauaaacuaguauucuucugguccccacagacucagagagaacccgccaccauguucguguuccugguccuccugccccuggugagcucccagugcgugaaccucaccacccgcacgcagcugccgcccgccuacaccaacagcuucacccggggcgucuacuaccccgacaagguguuccgcuccagcgugcugcacuccacccaggaccucuuccugcccuucuucagcaacgucacgugguuccacgccauccacguguccgggaccaacggcaccaagcgguucgacaacccggugcugcccuucaacgacggggucuacuucgcgagcaccgagaaguccaacaucauccgcggcuggaucuucgggacgacccucgacagcaagacccagucccugcugaucgugaacaacgccaccaacguggucaucaaggugugcgaguuccaguucugcaacgaccccuuccucggcguguacuaccacaagaacaacaagagcuggauggaguccgaguuccgggucuacagcuccgccaacaacugcacguucgaguacgugagccagcccuuccugauggaccuggagggcaagcaggggaacuucaagaaccuccgcgaguucguguucaagaacaucgacggcuacuucaagaucuacuccaagcacaccccgaucaaccugguccgggaccugccccagggguucagcgcccucgagccccugguggaccugcccaucggcaucaacaucacccgcuuccagacccuccuggcccugcaccgguccuaccucacgccgggggacagcagcuccggcuggaccgcgggcgccgccgccuacuacgugggguaccugcagccccgcaccuuccugcucaaguacaacgagaacggcaccaucacggacgcggucgacugcgcccuggacccccugagcgagaccaagugcacccucaaguccuucaccguggagaaggggaucuaccagacgagcaacuuccgggugcagcccaccgaguccaucguccgcuucccgaacaucaccaaccugugccccuucggcgagguguucaacgccacccgguucgccagcgucuacgccuggaaccgcaagcggaucuccaacugcguggcggacuacagcgugcuguacaacuccgccagcuucuccacguucaagugcuacggcgucagccccaccaagcucaacgaccugugcuucaccaacguguacgccgacuccuucgugauccgcggggacgagguccggcagaucgcccccggccagaccgggaagaucgccgacuacaacuacaagcugccggacgacuucacgggcugcgugaucgcguggaacagcaagaaccucgacuccaaggucgggggcaacuacaacuaccuguaccgccuguuccgcaagagcaaccucaagcccuucgagcgggacaucuccaccgagaucuaccaggccggcagcacccccugcaacgggguggagggcuucaacugcuacuucccccugcaguccuacggguuccagccgaccaacggcgugggguaccagcccuaccggguggucgugcugagcuucgagcuccugcacgcccccgccacggugugcggccccaagaaguccaccaaccuggucaagaacaagugcgugaacuucaacuucaacggccucaccgggaccggcgugcugaccgagagcaacaagaaguuccugccguuccagcaguucgggcgcgacaucgccgacacgaccgacgcgguccgcgacccccagacccuggagauccucgacaucacccccugcagcuucggcgggguguccgugaucacgccgggcaccaacaccagcaaccaggucgccgugcuguaccagggcgugaacugcaccgagguccccguggccauccacgccgaccagcugacgcccaccuggcggguguacuccaccggcagcaacgucuuccagacccgcgccgggugccucaucggcgcggagcacgugaacaacuccuacgagugcgacauccccaucggggccggcaucugcgccagcuaccagacgcagaccaacuccccgcggcgcgcccggagcguggcgucccagagcaucaucgccuacaccaugucccugggcgccgagaacagcgucgccuacuccaacaacagcaucgccauccccaccaacuucacgaucuccgugaccaccgagauccugcccgugagcaugaccaagacgagcgucgacugcaccauguacaucugcggggacuccaccgagugcagcaaccuccugcugcaguacggcuccuucugcacccagcucaaccgcgcgcugacggggaucgccguggagcaggacaagaacacccaggagguguucgcccaggucaagcagaucuacaagacgcccccgaucaaggacuucggcggguucaacuucagccagauccugcccgaccccuccaagcccagcaagcgguccuucaucgaggaccuccuguucaacaaggugacccuggccgacgccggcuucaucaagcaguacggcgacugccucggggacaucgcggcccgcgaccugaucugcgcccagaaguucaacggccugaccgugcucccgccccugcugaccgacgagaugaucgcccaguacaccagcgcccuccuggcggggaccaucacguccggcuggaccuucggggccggcgccgcccugcagauccccuucgcgaugcagauggccuaccgguucaacggcaucggggucacccagaacgugcucuacgagaaccagaagcugaucgccaaccaguucaacagcgccaucggcaagauccaggacucccugagcuccaccgccagcgcgcucgggaagcugcaggacguggucaaccagaacgcccaggcccugaacacgcucgugaagcagcuguccagcaacuucggcgccaucuccagcgugcugaacgacauccucucccgccuggacaaggucgaggccgaggugcagaucgaccggcugaucaccgggcgccuccagagccugcagaccuacgugacccagcagcugauccgggcggccgagauccgcgccagcgccaaccucgccgcgaccaagauguccgagugcguccugggccagagcaagcggguggacuucugcggcaagggguaccaccugauguccuucccccagagcgccccgcacggcguggucuuccuccacgugacguacguccccgcccaggagaagaacuucaccaccgcccccgcgaucugccacgacgggaaggcccacuucccccgcgagggcguguucguguccaacgggacccacugguucgucacgcagcggaacuucuacgagccgcagaucaucaccaccgacaacaccuucgugagcggcaacugcgacguggucaucggcaucgugaacaacacgguguacgacccccugcagcccgagcuggacuccuucaaggaggagcucgacaaguacuucaagaaccacaccagccccgacgucgaccugggggacaucuccggcaucaacgccagcguggugaacauccagaaggagaucgaccgccugaacgaggucgccaagaaccucaacgagucccugaucgaccugcaggagcucgggaaguacgagcaguacaucaaguggccgugguacaucuggcugggcuucaucgccggccugaucgcgaucgugauggugaccaucaugcucugcugcaugaccagcugcugcuccugccugaaggggugcugcagcugcggcuccugcugcaaguucgacgaggacgacagcgagcccguccugaagggggugaagcuccacuacacgugaugacucgagcugguacugcaugcacgcaaugcuagcugccccuuucccguccuggguaccccgagucucccccgaccucgggucccagguaugcucccaccuccaccugccccacucaccaccucugcuaguuccagacaccucccaagcacgcagcaaugcagcucaaaacgcuuagccuagccacacccccacgggaaacagcagugauuaaccuuuagcaauaaacgaaaguuuaacuaagcuauacuaaccccaggguuggucaauuucgugccagccacacccuggagcuagcaaaaaaaaaaaaaaaaaaaaaaaaaaaaaaaaaaaaaaaaaaaaaaaaaaaaaaaaaaaaaaaaaaaaaaaaaaaaaaaaaaaaaaaaaaaaaaaaaaaa

SEQ ID NO: 26273 - RNA, 4273 nt, Artificial Sequence
  SARS-CoV-2/Wuhan/WIV05/2019__EPI_ISL_402128 spike protein mRNA gc (1-1273)(S477N_D614G)
agaauaaacuaguauucuucugguccccacagacucagagagaacccgccaccauguucguguuccugguccuccugccccuggugagcucccagugcgugaaccucaccacccgcacgcagcugccgcccgccuacaccaacagcuucacccggggcgucuacuaccccgacaagguguuccgcuccagcgugcugcacuccacccaggaccucuuccugcccuucuucagcaacgucacgugguuccacgccauccacguguccgggaccaacggcaccaagcgguucgacaacccggugcugcccuucaacgacggggucuacuucgcgagcaccgagaaguccaacaucauccgcggcuggaucuucgggacgacccucgacagcaagacccagucccugcugaucgugaacaacgccaccaacguggucaucaaggugugcgaguuccaguucugcaacgaccccuuccucggcguguacuaccacaagaacaacaagagcuggauggaguccgaguuccgggucuacagcuccgccaacaacugcacguucgaguacgugagccagcccuuccugauggaccuggagggcaagcaggggaacuucaagaaccuccgcgaguucguguucaagaacaucgacggcuacuucaagaucuacuccaagcacaccccgaucaaccugguccgggaccugccccagggguucagcgcccucgagccccugguggaccugcccaucggcaucaacaucacccgcuuccagacccuccuggcccugcaccgguccuaccucacgccgggggacagcagcuccggcuggaccgcgggcgccgccgccuacuacgugggguaccugcagccccgcaccuuccugcucaaguacaacgagaacggcaccaucacggacgcggucgacugcgcccuggacccccugagcgagaccaagugcacccucaaguccuucaccguggagaaggggaucuaccagacgagcaacuuccgggugcagcccaccgaguccaucguccgcuucccgaacaucaccaaccugugccccuucggcgagguguucaacgccacccgguucgccagcgucuacgccuggaaccgcaagcggaucuccaacugcguggcggacuacagcgugcuguacaacuccgccagcuucuccacguucaagugcuacggcgucagccccaccaagcucaacgaccugugcuucaccaacguguacgccgacuccuucgugauccgcggggacgagguccggcagaucgcccccggccagaccgggaagaucgccgacuacaacuacaagcugccggacgacuucacgggcugcgugaucgcguggaacagcaacaaccucgacuccaaggucgggggcaacuacaacuaccuguaccgccuguuccgcaagagcaaccucaagcccuucgagcgggacaucuccaccgagaucuaccaggccggcaacacccccugcaacgggguggagggcuucaacugcuacuucccccugcaguccuacggguuccagccgaccaacggcgugggguaccagcccuaccggguggucgugcugagcuucgagcuccugcacgcccccgccacggugugcggccccaagaaguccaccaaccuggucaagaacaagugcgugaacuucaacuucaacggccucaccgggaccggcgugcugaccgagagcaacaagaaguuccugccguuccagcaguucgggcgcgacaucgccgacacgaccgacgcgguccgcgacccccagacccuggagauccucgacaucacccccugcagcuucggcgggguguccgugaucacgccgggcaccaacaccagcaaccaggucgccgugcuguaccagggcgugaacugcaccgagguccccguggccauccacgccgaccagcugacgcccaccuggcggguguacuccaccggcagcaacgucuuccagacccgcgccgggugccucaucggcgcggagcacgugaacaacuccuacgagugcgacauccccaucggggccggcaucugcgccagcuaccagacgcagaccaacuccccgcggcgcgcccggagcguggcgucccagagcaucaucgccuacaccaugucccugggcgccgagaacagcgucgccuacuccaacaacagcaucgccauccccaccaacuucacgaucuccgugaccaccgagauccugcccgugagcaugaccaagacgagcgucgacugcaccauguacaucugcggggacuccaccgagugcagcaaccuccugcugcaguacggcuccuucugcacccagcucaaccgcgcgcugacggggaucgccguggagcaggacaagaacacccaggagguguucgcccaggucaagcagaucuacaagacgcccccgaucaaggacuucggcggguucaacuucagccagauccugcccgaccccuccaagcccagcaagcgguccuucaucgaggaccuccuguucaacaaggugacccuggccgacgccggcuucaucaagcaguacggcgacugccucggggacaucgcggcccgcgaccugaucugcgcccagaaguucaacggccugaccgugcucccgccccugcugaccgacgagaugaucgcccaguacaccagcgcccuccuggcggggaccaucacguccggcuggaccuucggggccggcgccgcccugcagauccccuucgcgaugcagauggccuaccgguucaacggcaucggggucacccagaacgugcucuacgagaaccagaagcugaucgccaaccaguucaacagcgccaucggcaagauccaggacucccugagcuccaccgccagcgcgcucgggaagcugcaggacguggucaaccagaacgcccaggcccugaacacgcucgugaagcagcuguccagcaacuucggcgccaucuccagcgugcugaacgacauccucucccgccuggacaaggucgaggccgaggugcagaucgaccggcugaucaccgggcgccuccagagccugcagaccuacgugacccagcagcugauccgggcggccgagauccgcgccagcgccaaccucgccgcgaccaagauguccgagugcguccugggccagagcaagcggguggacuucugcggcaagggguaccaccugauguccuucccccagagcgccccgcacggcguggucuuccuccacgugacguacguccccgcccaggagaagaacuucaccaccgcccccgcgaucugccacgacgggaaggcccacuucccccgcgagggcguguucguguccaacgggacccacugguucgucacgcagcggaacuucuacgagccgcagaucaucaccaccgacaacaccuucgugagcggcaacugcgacguggucaucggcaucgugaacaacacgguguacgacccccugcagcccgagcuggacuccuucaaggaggagcucgacaaguacuucaagaaccacaccagccccgacgucgaccugggggacaucuccggcaucaacgccagcguggugaacauccagaaggagaucgaccgccugaacgaggucgccaagaaccucaacgagucccugaucgaccugcaggagcucgggaaguacgagcaguacaucaaguggccgugguacaucuggcugggcuucaucgccggccugaucgcgaucgugauggugaccaucaugcucugcugcaugaccagcugcugcuccugccugaaggggugcugcagcugcggcuccugcugcaaguucgacgaggacgacagcgagcccguccugaagggggugaagcuccacuacacgugaugacucgagcugguacugcaugcacgcaaugcuagcugccccuuucccguccuggguaccccgagucucccccgaccucgggucccagguaugcucccaccuccaccugccccacucaccaccucugcuaguuccagacaccucccaagcacgcagcaaugcagcucaaaacgcuuagccuagccacacccccacgggaaacagcagugauuaaccuuuagcaauaaacgaaaguuuaacuaagcuauacuaaccccaggguuggucaauuucgugccagccacacccuggagcuagcaaaaaaaaaaaaaaaaaaaaaaaaaaaaaaaaaaaaaaaaaaaaaaaaaaaaaaaaaaaaaaaaaaaaaaaaaaaaaaaaaaaaaaaaaaaaaaaaaaaa

SEQ ID NO: 26274 - RNA, 4273 nt, Artificial Sequence
  SARS-CoV-2/Wuhan/WIV05/2019__EPI_ISL_402128 spike protein mRNA gc (1-1273)(N501Y_D614G)
agaauaaacuaguauucuucugguccccacagacucagagagaacccgccaccauguucguguuccugguccuccugccccuggugagcucccagugcgugaaccucaccacccgcacgcagcugccgcccgccuacaccaacagcuucacccggggcgucuacuaccccgacaagguguuccgcuccagcgugcugcacuccacccaggaccucuuccugcccuucuucagcaacgucacgugguuccacgccauccacguguccgggaccaacggcaccaagcgguucgacaacccggugcugcccuucaacgacggggucuacuucgcgagcaccgagaaguccaacaucauccgcggcuggaucuucgggacgacccucgacagcaagacccagucccugcugaucgugaacaacgccaccaacguggucaucaaggugugcgaguuccaguucugcaacgaccccuuccucggcguguacuaccacaagaacaacaagagcuggauggaguccgaguuccgggucuacagcuccgccaacaacugcacguucgaguacgugagccagcccuuccugauggaccuggagggcaagcaggggaacuucaagaaccuccgcgaguucguguucaagaacaucgacggcuacuucaagaucuacuccaagcacaccccgaucaaccugguccgggaccugccccagggguucagcgcccucgagccccugguggaccugcccaucggcaucaacaucacccgcuuccagacccuccuggcccugcaccgguccuaccucacgccgggggacagcagcuccggcuggaccgcgggcgccgccgccuacuacgugggguaccugcagccccgcaccuuccugcucaaguacaacgagaacggcaccaucacggacgcggucgacugcgcccuggacccccugagcgagaccaagugcacccucaaguccuucaccguggagaaggggaucuaccagacgagcaacuuccgggugcagcccaccgaguccaucguccgcuucccgaacaucaccaaccugugccccuucggcgagguguucaacgccacccgguucgccagcgucuacgccuggaaccgcaagcggaucuccaacugcguggcggacuacagcgugcuguacaacuccgccagcuucuccacguucaagugcuacggcgucagccccaccaagcucaacgaccugugcuucaccaacguguacgccgacuccuucgugauccgcggggacgagguccggcagaucgcccccggccagaccgggaagaucgccgacuacaacuacaagcugccggacgacuucacgggcugcgugaucgcguggaacagcaacaaccucgacuccaaggucgggggcaacuacaacuaccuguaccgccuguuccgcaagagcaaccucaagcccuucgagcgggacaucuccaccgagaucuaccaggccggcagcacccccugcaacgggguggagggcuucaacugcuacuucccccugcaguccuacggguuccagccgaccuacggcgugggguaccagcccuaccggguggucgugcugagcuucgagcuccugcacgcccccgccacggugugcggccccaagaaguccaccaaccuggucaagaacaagugcgugaacuucaacuucaacggccucaccgggaccggcgugcugaccgagagcaacaagaaguuccugccguuccagcaguucgggcgcgacaucgccgacacgaccgacgcgguccgcgacccccagacccuggagauccucgacaucacccccugcagcuucggcgggguguccgugaucacgccgggcaccaacaccagcaaccaggucgccgugcuguaccagggcgugaacugcaccgagguccccguggccauccacgccgaccagcugacgcccaccuggcggguguacuccaccggcagcaacgucuuccagacccgcgccgggugccucaucggcgcggagcacgugaacaacuccuacgagugcgacauccccaucggggccggcaucugcgccagcuaccagacgcagaccaacuccccgcggcgcgcccggagcguggcgucccagagcaucaucgccuacaccaugucccugggcgccgagaacagcgucgccuacuccaacaacagcaucgccauccccaccaacuucacgaucuccgugaccaccgagauccugcccgugagcaugaccaagacgagcgucgacugcaccauguacaucugcggggacuccaccgagugcagcaaccuccugcugcaguacggcuccuucugcacccagcucaaccgcgcgcugacggggaucgccguggagcaggacaagaacacccaggagguguucgcccaggucaagcagaucuacaagacgcccccgaucaaggacuucggcggguucaacuucagccagauccugcccgaccccuccaagcccagcaagcgguccuucaucgaggaccuccuguucaacaaggugacccuggccgacgccggcuucaucaagcaguacggcgacugccucggggacaucgcggcccgcgaccugaucugcgcccagaaguucaacggccugaccgugcucccgccccugcugaccgacgagaugaucgcccaguacaccagcgcccuccuggcggggaccaucacguccggcuggaccuucggggccggcgccgcccugcagauccccuucgcgaugcagauggccuaccgguucaacggcaucggggucacccagaacgugcucuacgagaaccagaagcugaucgccaaccaguucaacagcgccaucggcaagauccaggacucccugagcuccaccgccagcgcgcucgggaagcugcaggacguggucaaccagaacgcccaggcccugaacacgcucgugaagcagcuguccagcaacuucggcgccaucuccagcgugcugaacgacauccucucccgccuggacaaggucgaggccgaggugcagaucgaccggcugaucaccgggcgccuccagagccugcagaccuacgugacccagcagcugauccgggcggccgagauccgcgccagcgccaaccucgccgcgaccaagauguccgagugcguccugggccagagcaagcggguggacuucugcggcaagggguaccaccugauguccuucccccagagcgccccgcacggcguggucuuccuccacgugacguacguccccgcccaggagaagaacuucaccaccgcccccgcgaucugccacgacgggaaggcccacuucccccgcgagggcguguucguguccaacgggacccacugguucgucacgcagcggaacuucuacgagccgcagaucaucaccaccgacaacaccuucgugagcggcaacugcgacguggucaucggcaucgugaacaacacgguguacgacccccugcagcccgagcuggacuccuucaaggaggagcucgacaaguacuucaagaaccacaccagccccgacgucgaccugggggacaucuccggcaucaacgccagcguggugaacauccagaaggagaucgaccgccugaacgaggucgccaagaaccucaacgagucccugaucgaccugcaggagcucgggaaguacgagcaguacaucaaguggccgugguacaucuggcugggcuucaucgccggccugaucgcgaucgugauggugaccaucaugcucugcugcaugaccagcugcugcuccugccugaaggggugcugcagcugcggcuccugcugcaaguucgacgaggacgacagcgagcccguccugaagggggugaagcuccacuacacgugaugacucgagcugguacugcaugcacgcaaugcuagcugccccuuucccguccuggguaccccgagucucccccgaccucgggucccagguaugcucccaccuccaccugccccacucaccaccucugcuaguuccagacaccucccaagcacgcagcaaugcagcucaaaacgcuuagccuagccacacccccacgggaaacagcagugauuaaccuuuagcaauaaacgaaaguuuaacuaagcuauacuaaccccaggguuggucaauuucgugccagccacacccuggagcuagcaaaaaaaaaaaaaaaaaaaaaaaaaaaaaaaaaaaaaaaaaaaaaaaaaaaaaaaaaaaaaaaaaaaaaaaaaaaaaaaaaaaaaaaaaaaaaaaaaaaa

SEQ ID NO: 26275 - RNA, 4267 nt, Artificial Sequence
  SARS-CoV-2/Wuhan/WIV05/2019__EPI_ISL_402128 spike protein mRNA gc (1-1273)(H69del_V70del_D614G)
agaauaaacuaguauucuucugguccccacagacucagagagaacccgccaccauguucguguuccugguccuccugccccuggugagcucccagugcgugaaccucaccacccgcacgcagcugccgcccgccuacaccaacagcuucacccggggcgucuacuaccccgacaagguguuccgcuccagcgugcugcacuccacccaggaccucuuccugcccuucuucagcaacgucacgugguuccacgccaucuccgggaccaacggcaccaagcgguucgacaacccggugcugcccuucaacgacggggucuacuucgcgagcaccgagaaguccaacaucauccgcggcuggaucuucgggacgacccucgacagcaagacccagucccugcugaucgugaacaacgccaccaacguggucaucaaggugugcgaguuccaguucugcaacgaccccuuccucggcguguacuaccacaagaacaacaagagcuggauggaguccgaguuccgggucuacagcuccgccaacaacugcacguucgaguacgugagccagcccuuccugauggaccuggagggcaagcaggggaacuucaagaaccuccgcgaguucguguucaagaacaucgacggcuacuucaagaucuacuccaagcacaccccgaucaaccugguccgggaccugccccagggguucagcgcccucgagccccugguggaccugcccaucggcaucaacaucacccgcuuccagacccuccuggcccugcaccgguccuaccucacgccgggggacagcagcuccggcuggaccgcgggcgccgccgccuacuacgugggguaccugcagccccgcaccuuccugcucaaguacaacgagaacggcaccaucacggacgcggucgacugcgcccuggacccccugagcgagaccaagugcacccucaaguccuucaccguggagaaggggaucuaccagacgagcaacuuccgggugcagcccaccgaguccaucguccgcuucccgaacaucaccaaccugugccccuucggcgagguguucaacgccacccgguucgccagcgucuacgccuggaaccgcaagcggaucuccaacugcguggcggacuacagcgugcuguacaacuccgccagcuucuccacguucaagugcuacggcgucagccccaccaagcucaacgaccugugcuucaccaacguguacgccgacuccuucgugauccgcggggacgagguccggcagaucgcccccggccagaccgggaagaucgccgacuacaacuacaagcugccggacgacuucacgggcugcgugaucgcguggaacagcaacaaccucgacuccaaggucgggggcaacuacaacuaccuguaccgccuguuccgcaagagcaaccucaagcccuucgagcgggacaucuccaccgagaucuaccaggccggcagcacccccugcaacgggguggagggcuucaacugcuacuucccccugcaguccuacggguuccagccgaccaacggcgugggguaccagcccuaccggguggucgugcugagcuucgagcuccugcacgcccccgccacggugugcggccccaagaaguccaccaaccuggucaagaacaagugcgugaacuucaacuucaacggccucaccgggaccggcgugcugaccgagagcaacaagaaguuccugccguuccagcaguucgggcgcgacaucgccgacacgaccgacgcgguccgcgacccccagacccuggagauccucgacaucacccccugcagcuucggcgggguguccgugaucacgccgggcaccaacaccagcaaccaggucgccgugcuguaccagggcgugaacugcaccgagguccccguggccauccacgccgaccagcugacgcccaccuggcggguguacuccaccggcagcaacgucuuccagacccgcgccgggugccucaucggcgcggagcacgugaacaacuccuacgagugcgacauccccaucggggccggcaucugcgccagcuaccagacgcagaccaacuccccgcggcgcgcccggagcguggcgucccagagcaucaucgccuacaccaugucccugggcgccgagaacagcgucgccuacuccaacaacagcaucgccauccccaccaacuucacgaucuccgugaccaccgagauccugcccgugagcaugaccaagacgagcgucgacugcaccauguacaucugcggggacuccaccgagugcagcaaccuccugcugcaguacggcuccuucugcacccagcucaaccgcgcgcugacggggaucgccguggagcaggacaagaacacccaggagguguucgcccaggucaagcagaucuacaagacgcccccgaucaaggacuucggcggguucaacuucagccagauccugcccgaccccuccaagcccagcaagcgguccuucaucgaggaccuccuguucaacaaggugacccuggccgacgccggcuucaucaagcaguacggcgacugccucggggacaucgcggcccgcgaccugaucugcgcccagaaguucaacggccugaccgugcucccgccccugcugaccgacgagaugaucgcccaguacaccagcgcccuccuggcggggaccaucacguccggcuggaccuucggggccggcgccgcccugcagauccccuucgcgaugcagauggccuaccgguucaacggcaucggggucacccagaacgugcucuacgagaaccagaagcugaucgccaaccaguucaacagcgccaucggcaagauccaggacucccugagcuccaccgccagcgcgcucgggaagcugcaggacguggucaaccagaacgcccaggcccugaacacgcucgugaagcagcuguccagcaacuucggcgccaucuccagcgugcugaacgacauccucucccgccuggacaaggucgaggccgaggugcagaucgaccggcugaucaccgggcgccuccagagccugcagaccuacgugacccagcagcugauccgggcggccgagauccgcgccagcgccaaccucgccgcgaccaagauguccgagugcguccugggccagagcaagcggguggacuucugcggcaagggguaccaccugauguccuucccccagagcgccccgcacggcguggucuuccuccacgugacguacguccccgcccaggagaagaacuucaccaccgcccccgcgaucugccacgacgggaaggcccacuucccccgcgagggcguguucguguccaacgggacccacugguucgucacgcagcggaacuucuacgagccgcagaucaucaccaccgacaacaccuucgugagcggcaacugcgacguggucaucggcaucgugaacaacacgguguacgacccccugcagcccgagcuggacuccuucaaggaggagcucgacaaguacuucaagaaccacaccagccccgacgucgaccugggggacaucuccggcaucaacgccagcguggugaacauccagaaggagaucgaccgccugaacgaggucgccaagaaccucaacgagucccugaucgaccugcaggagcucgggaaguacgagcaguacaucaaguggccgugguacaucuggcugggcuucaucgccggccugaucgcgaucgugauggugaccaucaugcucugcugcaugaccagcugcugcuccugccugaaggggugcugcagcugcggcuccugcugcaaguucgacgaggacgacagcgagcccguccugaagggggugaagcuccacuacacgugaugacucgagcugguacugcaugcacgcaaugcuagcugccccuuucccguccuggguaccccgagucucccccgaccucgggucccagguaugcucccaccuccaccugccccacucaccaccucugcuaguuccagacaccucccaagcacgcagcaaugcagcucaaaacgcuuagccuagccacacccccacgggaaacagcagugauuaaccuuuagcaauaaacgaaaguuuaacuaagcuauacuaaccccaggguuggucaauuucgugccagccacacccuggagcuagcaaaaaaaaaaaaaaaaaaaaaaaaaaaaaaaaaaaaaaaaaaaaaaaaaaaaaaaaaaaaaaaaaaaaaaaaaaaaaaaaaaaaaaaaaaaaaaaaaaaa

SEQ ID NO: 26276 - RNA, 4273 nt, Artificial Sequence
  SARS-CoV-2/Wuhan/WIV05/2019__EPI_ISL_402128 spike protein mRNA gc (1-1273)(Y453F_D614G)
agaauaaacuaguauucuucugguccccacagacucagagagaacccgccaccauguucguguuccugguccuccugccccuggugagcucccagugcgugaaccucaccacccgcacgcagcugccgcccgccuacaccaacagcuucacccggggcgucuacuaccccgacaagguguuccgcuccagcgugcugcacuccacccaggaccucuuccugcccuucuucagcaacgucacgugguuccacgccauccacguguccgggaccaacggcaccaagcgguucgacaacccggugcugcccuucaacgacggggucuacuucgcgagcaccgagaaguccaacaucauccgcggcuggaucuucgggacgacccucgacagcaagacccagucccugcugaucgugaacaacgccaccaacguggucaucaaggugugcgaguuccaguucugcaacgaccccuuccucggcguguacuaccacaagaacaacaagagcuggauggaguccgaguuccgggucuacagcuccgccaacaacugcacguucgaguacgugagccagcccuuccugauggaccuggagggcaagcaggggaacuucaagaaccuccgcgaguucguguucaagaacaucgacggcuacuucaagaucuacuccaagcacaccccgaucaaccugguccgggaccugccccagggguucagcgcccucgagccccugguggaccugcccaucggcaucaacaucacccgcuuccagacccuccuggcccugcaccgguccuaccucacgccgggggacagcagcuccggcuggaccgcgggcgccgccgccuacuacgugggguaccugcagccccgcaccuuccugcucaaguacaacgagaacggcaccaucacggacgcggucgacugcgcccuggacccccugagcgagaccaagugcacccucaaguccuucaccguggagaaggggaucuaccagacgagcaacuuccgggugcagcccaccgaguccaucguccgcuucccgaacaucaccaaccugugccccuucggcgagguguucaacgccacccgguucgccagcgucuacgccuggaaccgcaagcggaucuccaacugcguggcggacuacagcgugcuguacaacuccgccagcuucuccacguucaagugcuacggcgucagccccaccaagcucaacgaccugugcuucaccaacguguacgccgacuccuucgugauccgcggggacgagguccggcagaucgcccccggccagaccgggaagaucgccgacuacaacuacaagcugccggacgacuucacgggcugcgugaucgcguggaacagcaacaaccucgacuccaaggucgggggcaacuacaacuaccuguuccgccuguuccgcaagagcaaccucaagcccuucgagcgggacaucuccaccgagaucuaccaggccggcagcacccccugcaacgggguggagggcuucaacugcuacuucccccugcaguccuacggguuccagccgaccaacggcgugggguaccagcccuaccggguggucgugcugagcuucgagcuccugcacgcccccgccacggugugcggccccaagaaguccaccaaccuggucaagaacaagugcgugaacuucaacuucaacggccucaccgggaccggcgugcugaccgagagcaacaagaaguuccugccguuccagcaguucgggcgcgacaucgccgacacgaccgacgcgguccgcgacccccagacccuggagauccucgacaucacccccugcagcuucggcgggguguccgugaucacgccgggcaccaacaccagcaaccaggucgccgugcuguaccagggcgugaacugcaccgagguccccguggccauccacgccgaccagcugacgcccaccuggcggguguacuccaccggcagcaacgucuuccagacccgcgccgggugccucaucggcgcggagcacgugaacaacuccuacgagugcgacauccccaucggggccggcaucugcgccagcuaccagacgcagaccaacuccccgcggcgcgcccggagcguggcgucccagagcaucaucgccuacaccaugucccugggcgccgagaacagcgucgccuacuccaacaacagcaucgccauccccaccaacuucacgaucuccgugaccaccgagauccugcccgugagcaugaccaagacgagcgucgacugcaccauguacaucugcggggacuccaccgagugcagcaaccuccugcugcaguacggcuccuucugcacccagcucaaccgcgcgcugacggggaucgccguggagcaggacaagaacacccaggagguguucgcccaggucaagcagaucuacaagacgcccccgaucaaggacuucggcggguucaacuucagccagauccugcccgaccccuccaagcccagcaagcgguccuucaucgaggaccuccuguucaacaaggugacccuggccgacgccggcuucaucaagcaguacggcgacugccucggggacaucgcggcccgcgaccugaucugcgcccagaaguucaacggccugaccgugcucccgccccugcugaccgacgagaugaucgcccaguacaccagcgcccuccuggcggggaccaucacguccggcuggaccuucggggccggcgccgcccugcagauccccuucgcgaugcagauggccuaccgguucaacggcaucggggucacccagaacgugcucuacgagaaccagaagcugaucgccaaccaguucaacagcgccaucggcaagauccaggacucccugagcuccaccgccagcgcgcucgggaagcugcaggacguggucaaccagaacgcccaggcccugaacacgcucgugaagcagcuguccagcaacuucggcgccaucuccagcgugcugaacgacauccucucccgccuggacaaggucgaggccgaggugcagaucgaccggcugaucaccgggcgccuccagagccugcagaccuacgugacccagcagcugauccgggcggccgagauccgcgccagcgccaaccucgccgcgaccaagauguccgagugcguccugggccagagcaagcggguggacuucugcggcaagggguaccaccugauguccuucccccagagcgccccgcacggcguggucuuccuccacgugacguacguccccgcccaggagaagaacuucaccaccgcccccgcgaucugccacgacgggaaggcccacuucccccgcgagggcguguucguguccaacgggacccacugguucgucacgcagcggaacuucuacgagccgcagaucaucaccaccgacaacaccuucgugagcggcaacugcgacguggucaucggcaucgugaacaacacgguguacgacccccugcagcccgagcuggacuccuucaaggaggagcucgacaaguacuucaagaaccacaccagccccgacgucgaccugggggacaucuccggcaucaacgccagcguggugaacauccagaaggagaucgaccgccugaacgaggucgccaagaaccucaacgagucccugaucgaccugcaggagcucgggaaguacgagcaguacaucaaguggccgugguacaucuggcugggcuucaucgccggccugaucgcgaucgugauggugaccaucaugcucugcugcaugaccagcugcugcuccugccugaaggggugcugcagcugcggcuccugcugcaaguucgacgaggacgacagcgagcccguccugaagggggugaagcuccacuacacgugaugacucgagcugguacugcaugcacgcaaugcuagcugccccuuucccguccuggguaccccgagucucccccgaccucgggucccagguaugcucccaccuccaccugccccacucaccaccucugcuaguuccagacaccucccaagcacgcagcaaugcagcucaaaacgcuuagccuagccacacccccacgggaaacagcagugauuaaccuuuagcaauaaacgaaaguuuaacuaagcuauacuaaccccaggguuggucaauuucgugccagccacacccuggagcuagcaaaaaaaaaaaaaaaaaaaaaaaaaaaaaaaaaaaaaaaaaaaaaaaaaaaaaaaaaaaaaaaaaaaaaaaaaaaaaaaaaaaaaaaaaaaaaaaaaaaa

SEQ ID NO: 26277 - RNA, 4273 nt, Artificial Sequence
  SARS-CoV-2/Wuhan/WIV05/2019__EPI_ISL_402128 spike protein mRNA gc (1-1273)(D614G_I692V)
agaauaaacuaguauucuucugguccccacagacucagagagaacccgccaccauguucguguuccugguccuccugccccuggugagcucccagugcgugaaccucaccacccgcacgcagcugccgcccgccuacaccaacagcuucacccggggcgucuacuaccccgacaagguguuccgcuccagcgugcugcacuccacccaggaccucuuccugcccuucuucagcaacgucacgugguuccacgccauccacguguccgggaccaacggcaccaagcgguucgacaacccggugcugcccuucaacgacggggucuacuucgcgagcaccgagaaguccaacaucauccgcggcuggaucuucgggacgacccucgacagcaagacccagucccugcugaucgugaacaacgccaccaacguggucaucaaggugugcgaguuccaguucugcaacgaccccuuccucggcguguacuaccacaagaacaacaagagcuggauggaguccgaguuccgggucuacagcuccgccaacaacugcacguucgaguacgugagccagcccuuccugauggaccuggagggcaagcaggggaacuucaagaaccuccgcgaguucguguucaagaacaucgacggcuacuucaagaucuacuccaagcacaccccgaucaaccugguccgggaccugccccagggguucagcgcccucgagccccugguggaccugcccaucggcaucaacaucacccgcuuccagacccuccuggcccugcaccgguccuaccucacgccgggggacagcagcuccggcuggaccgcgggcgccgccgccuacuacgugggguaccugcagccccgcaccuuccugcucaaguacaacgagaacggcaccaucacggacgcggucgacugcgcccuggacccccugagcgagaccaagugcacccucaaguccuucaccguggagaaggggaucuaccagacgagcaacuuccgggugcagcccaccgaguccaucguccgcuucccgaacaucaccaaccugugccccuucggcgagguguucaacgccacccgguucgccagcgucuacgccuggaaccgcaagcggaucuccaacugcguggcggacuacagcgugcuguacaacuccgccagcuucuccacguucaagugcuacggcgucagccccaccaagcucaacgaccugugcuucaccaacguguacgccgacuccuucgugauccgcggggacgagguccggcagaucgcccccggccagaccgggaagaucgccgacuacaacuacaagcugccggacgacuucacgggcugcgugaucgcguggaacagcaacaaccucgacuccaaggucgggggcaacuacaacuaccuguaccgccuguuccgcaagagcaaccucaagcccuucgagcgggacaucuccaccgagaucuaccaggccggcagcacccccugcaacgggguggagggcuucaacugcuacuucccccugcaguccuacggguuccagccgaccaacggcgugggguaccagcccuaccggguggucgugcugagcuucgagcuccugcacgcccccgccacggugugcggccccaagaaguccaccaaccuggucaagaacaagugcgugaacuucaacuucaacggccucaccgggaccggcgugcugaccgagagcaacaagaaguuccugccguuccagcaguucgggcgcgacaucgccgacacgaccgacgcgguccgcgacccccagacccuggagauccucgacaucacccccugcagcuucggcgggguguccgugaucacgccgggcaccaacaccagcaaccaggucgccgugcuguaccagggcgugaacugcaccgagguccccguggccauccacgccgaccagcugacgcccaccuggcggguguacuccaccggcagcaacgucuuccagacccgcgccgggugccucaucggcgcggagcacgugaacaacuccuacgagugcgacauccccaucggggccggcaucugcgccagcuaccagacgcagaccaacuccccgcggcgcgcccggagcguggcgucccagagcgucaucgccuacaccaugucccugggcgccgagaacagcgucgccuacuccaacaacagcaucgccauccccaccaacuucacgaucuccgugaccaccgagauccugcccgugagcaugaccaagacgagcgucgacugcaccauguacaucugcggggacuccaccgagugcagcaaccuccugcugcaguacggcuccuucugcacccagcucaaccgcgcgcugacggggaucgccguggagcaggacaagaacacccaggagguguucgcccaggucaagcagaucuacaagacgcccccgaucaaggacuucggcggguucaacuucagccagauccugcccgaccccuccaagcccagcaagcgguccuucaucgaggaccuccuguucaacaaggugacccuggccgacgccggcuucaucaagcaguacggcgacugccucggggacaucgcggcccgcgaccugaucugcgcccagaaguucaacggccugaccgugcucccgccccugcugaccgacgagaugaucgcccaguacaccagcgcccuccuggcggggaccaucacguccggcuggaccuucggggccggcgccgcccugcagauccccuucgcgaugcagauggccuaccgguucaacggcaucggggucacccagaacgugcucuacgagaaccagaagcugaucgccaaccaguucaacagcgccaucggcaagauccaggacucccugagcuccaccgccagcgcgcucgggaagcugcaggacguggucaaccagaacgcccaggcccugaacacgcucgugaagcagcuguccagcaacuucggcgccaucuccagcgugcugaacgacauccucucccgccuggacaaggucgaggccgaggugcagaucgaccggcugaucaccgggcgccuccagagccugcagaccuacgugacccagcagcugauccgggcggccgagauccgcgccagcgccaaccucgccgcgaccaagauguccgagugcguccugggccagagcaagcggguggacuucugcggcaagggguaccaccugauguccuucccccagagcgccccgcacggcguggucuuccuccacgugacguacguccccgcccaggagaagaacuucaccaccgcccccgcgaucugccacgacgggaaggcccacuucccccgcgagggcguguucguguccaacgggacccacugguucgucacgcagcggaacuucuacgagccgcagaucaucaccaccgacaacaccuucgugagcggcaacugcgacguggucaucggcaucgugaacaacacgguguacgacccccugcagcccgagcuggacuccuucaaggaggagcucgacaaguacuucaagaaccacaccagccccgacgucgaccugggggacaucuccggcaucaacgccagcguggugaacauccagaaggagaucgaccgccugaacgaggucgccaagaaccucaacgagucccugaucgaccugcaggagcucgggaaguacgagcaguacaucaaguggccgugguacaucuggcugggcuucaucgccggccugaucgcgaucgugauggugaccaucaugcucugcugcaugaccagcugcugcuccugccugaaggggugcugcagcugcggcuccugcugcaaguucgacgaggacgacagcgagcccguccugaagggggugaagcuccacuacacgugaugacucgagcugguacugcaugcacgcaaugcuagcugccccuuucccguccuggguaccccgagucucccccgaccucgggucccagguaugcucccaccuccaccugccccacucaccaccucugcuaguuccagacaccucccaagcacgcagcaaugcagcucaaaacgcuuagccuagccacacccccacgggaaacagcagugauuaaccuuuagcaauaaacgaaaguuuaacuaagcuauacuaaccccaggguuggucaauuucgugccagccacacccuggagcuagcaaaaaaaaaaaaaaaaaaaaaaaaaaaaaaaaaaaaaaaaaaaaaaaaaaaaaaaaaaaaaaaaaaaaaaaaaaaaaaaaaaaaaaaaaaaaaaaaaaaa

SEQ ID NO: 26278 - RNA, 4273 nt, Artificial Sequence
  SARS-CoV-2/Wuhan/WIV05/2019__EPI_ISL_402128 spike protein mRNA gc (1-1273)(D614G_M1229I)
agaauaaacuaguauucuucugguccccacagacucagagagaacccgccaccauguucguguuccugguccuccugccccuggugagcucccagugcgugaaccucaccacccgcacgcagcugccgcccgccuacaccaacagcuucacccggggcgucuacuaccccgacaagguguuccgcuccagcgugcugcacuccacccaggaccucuuccugcccuucuucagcaacgucacgugguuccacgccauccacguguccgggaccaacggcaccaagcgguucgacaacccggugcugcccuucaacgacggggucuacuucgcgagcaccgagaaguccaacaucauccgcggcuggaucuucgggacgacccucgacagcaagacccagucccugcugaucgugaacaacgccaccaacguggucaucaaggugugcgaguuccaguucugcaacgaccccuuccucggcguguacuaccacaagaacaacaagagcuggauggaguccgaguuccgggucuacagcuccgccaacaacugcacguucgaguacgugagccagcccuuccugauggaccuggagggcaagcaggggaacuucaagaaccuccgcgaguucguguucaagaacaucgacggcuacuucaagaucuacuccaagcacaccccgaucaaccugguccgggaccugccccagggguucagcgcccucgagccccugguggaccugcccaucggcaucaacaucacccgcuuccagacccuccuggcccugcaccgguccuaccucacgccgggggacagcagcuccggcuggaccgcgggcgccgccgccuacuacgugggguaccugcagccccgcaccuuccugcucaaguacaacgagaacggcaccaucacggacgcggucgacugcgcccuggacccccugagcgagaccaagugcacccucaaguccuucaccguggagaaggggaucuaccagacgagcaacuuccgggugcagcccaccgaguccaucguccgcuucccgaacaucaccaaccugugccccuucggcgagguguucaacgccacccgguucgccagcgucuacgccuggaaccgcaagcggaucuccaacugcguggcggacuacagcgugcuguacaacuccgccagcuucuccacguucaagugcuacggcgucagccccaccaagcucaacgaccugugcuucaccaacguguacgccgacuccuucgugauccgcggggacgagguccggcagaucgcccccggccagaccgggaagaucgccgacuacaacuacaagcugccggacgacuucacgggcugcgugaucgcguggaacagcaacaaccucgacuccaaggucgggggcaacuacaacuaccuguaccgccuguuccgcaagagcaaccucaagcccuucgagcgggacaucuccaccgagaucuaccaggccggcagcacccccugcaacgggguggagggcuucaacugcuacuucccccugcaguccuacggguuccagccgaccaacggcgugggguaccagcccuaccggguggucgugcugagcuucgagcuccugcacgcccccgccacggugugcggccccaagaaguccaccaaccuggucaagaacaagugcgugaacuucaacuucaacggccucaccgggaccggcgugcugaccgagagcaacaagaaguuccugccguuccagcaguucgggcgcgacaucgccgacacgaccgacgcgguccgcgacccccagacccuggagauccucgacaucacccccugcagcuucggcgggguguccgugaucacgccgggcaccaacaccagcaaccaggucgccgugcuguaccagggcgugaacugcaccgagguccccguggccauccacgccgaccagcugacgcccaccuggcggguguacuccaccggcagcaacgucuuccagacccgcgccgggugccucaucggcgcggagcacgugaacaacuccuacgagugcgacauccccaucggggccggcaucugcgccagcuaccagacgcagaccaacuccccgcggcgcgcccggagcguggcgucccagagcaucaucgccuacaccaugucccugggcgccgagaacagcgucgccuacuccaacaacagcaucgccauccccaccaacuucacgaucuccgugaccaccgagauccugcccgugagcaugaccaagacgagcgucgacugcaccauguacaucugcggggacuccaccgagugcagcaaccuccugcugcaguacggcuccuucugcacccagcucaaccgcgcgcugacggggaucgccguggagcaggacaagaacacccaggagguguucgcccaggucaagcagaucuacaagacgcccccgaucaaggacuucggcggguucaacuucagccagauccugcccgaccccuccaagcccagcaagcgguccuucaucgaggaccuccuguucaacaaggugacccuggccgacgccggcuucaucaagcaguacggcgacugccucggggacaucgcggcccgcgaccugaucugcgcccagaaguucaacggccugaccgugcucccgccccugcugaccgacgagaugaucgcccaguacaccagcgcccuccuggcggggaccaucacguccggcuggaccuucggggccggcgccgcccugcagauccccuucgcgaugcagauggccuaccgguucaacggcaucggggucacccagaacgugcucuacgagaaccagaagcugaucgccaaccaguucaacagcgccaucggcaagauccaggacucccugagcuccaccgccagcgcgcucgggaagcugcaggacguggucaaccagaacgcccaggcccugaacacgcucgugaagcagcuguccagcaacuucggcgccaucuccagcgugcugaacgacauccucucccgccuggacaaggucgaggccgaggugcagaucgaccggcugaucaccgggcgccuccagagccugcagaccuacgugacccagcagcugauccgggcggccgagauccgcgccagcgccaaccucgccgcgaccaagauguccgagugcguccugggccagagcaagcggguggacuucugcggcaagggguaccaccugauguccuucccccagagcgccccgcacggcguggucuuccuccacgugacguacguccccgcccaggagaagaacuucaccaccgcccccgcgaucugccacgacgggaaggcccacuucccccgcgagggcguguucguguccaacgggacccacugguucgucacgcagcggaacuucuacgagccgcagaucaucaccaccgacaacaccuucgugagcggcaacugcgacguggucaucggcaucgugaacaacacgguguacgacccccugcagcccgagcuggacuccuucaaggaggagcucgacaaguacuucaagaaccacaccagccccgacgucgaccugggggacaucuccggcaucaacgccagcguggugaacauccagaaggagaucgaccgccugaacgaggucgccaagaaccucaacgagucccugaucgaccugcaggagcucgggaaguacgagcaguacaucaaguggccgugguacaucuggcugggcuucaucgccggccugaucgcgaucgugaucgugaccaucaugcucugcugcaugaccagcugcugcuccugccugaaggggugcugcagcugcggcuccugcugcaaguucgacgaggacgacagcgagcccguccugaagggggugaagcuccacuacacgugaugacucgagcugguacugcaugcacgcaaugcuagcugccccuuucccguccuggguaccccgagucucccccgaccucgggucccagguaugcucccaccuccaccugccccacucaccaccucugcuaguuccagacaccucccaagcacgcagcaaugcagcucaaaacgcuuagccuagccacacccccacgggaaacagcagugauuaaccuuuagcaauaaacgaaaguuuaacuaagcuauacuaaccccaggguuggucaauuucgugccagccacacccuggagcuagcaaaaaaaaaaaaaaaaaaaaaaaaaaaaaaaaaaaaaaaaaaaaaaaaaaaaaaaaaaaaaaaaaaaaaaaaaaaaaaaaaaaaaaaaaaaaaaaaaaaa

SEQ ID NO: 26279 - RNA, 4267 nt, Artificial Sequence
  SARS-CoV-2/Wuhan/WIV05/2019__EPI_ISL_402128 spike protein mRNA gc (1-1273)(H69del_V70del_A222V_Y453F_S477N_D614G_I692V)
agaauaaacuaguauucuucugguccccacagacucagagagaacccgccaccauguucguguuccugguccuccugccccuggugagcucccagugcgugaaccucaccacccgcacgcagcugccgcccgccuacaccaacagcuucacccggggcgucuacuaccccgacaagguguuccgcuccagcgugcugcacuccacccaggaccucuuccugcccuucuucagcaacgucacgugguuccacgccaucuccgggaccaacggcaccaagcgguucgacaacccggugcugcccuucaacgacggggucuacuucgcgagcaccgagaaguccaacaucauccgcggcuggaucuucgggacgacccucgacagcaagacccagucccugcugaucgugaacaacgccaccaacguggucaucaaggugugcgaguuccaguucugcaacgaccccuuccucggcguguacuaccacaagaacaacaagagcuggauggaguccgaguuccgggucuacagcuccgccaacaacugcacguucgaguacgugagccagcccuuccugauggaccuggagggcaagcaggggaacuucaagaaccuccgcgaguucguguucaagaacaucgacggcuacuucaagaucuacuccaagcacaccccgaucaaccugguccgggaccugccccagggguucagcguccucgagccccugguggaccugcccaucggcaucaacaucacccgcuuccagacccuccuggcccugcaccgguccuaccucacgccgggggacagcagcuccggcuggaccgcgggcgccgccgccuacuacgugggguaccugcagccccgcaccuuccugcucaaguacaacgagaacggcaccaucacggacgcggucgacugcgcccuggacccccugagcgagaccaagugcacccucaaguccuucaccguggagaaggggaucuaccagacgagcaacuuccgggugcagcccaccgaguccaucguccgcuucccgaacaucaccaaccugugccccuucggcgagguguucaacgccacccgguucgccagcgucuacgccuggaaccgcaagcggaucuccaacugcguggcggacuacagcgugcuguacaacuccgccagcuucuccacguucaagugcuacggcgucagccccaccaagcucaacgaccugugcuucaccaacguguacgccgacuccuucgugauccgcggggacgagguccggcagaucgcccccggccagaccgggaagaucgccgacuacaacuacaagcugccggacgacuucacgggcugcgugaucgcguggaacagcaacaaccucgacuccaaggucgggggcaacuacaacuaccuguuccgccuguuccgcaagagcaaccucaagcccuucgagcgggacaucuccaccgagaucuaccaggccggcaacacccccugcaacgggguggagggcuucaacugcuacuucccccugcaguccuacggguuccagccgaccaacggcgugggguaccagcccuaccggguggucgugcugagcuucgagcuccugcacgcccccgccacggugugcggccccaagaaguccaccaaccuggucaagaacaagugcgugaacuucaacuucaacggccucaccgggaccggcgugcugaccgagagcaacaagaaguuccugccguuccagcaguucgggcgcgacaucgccgacacgaccgacgcgguccgcgacccccagacccuggagauccucgacaucacccccugcagcuucggcgggguguccgugaucacgccgggcaccaacaccagcaaccaggucgccgugcuguaccagggcgugaacugcaccgagguccccguggccauccacgccgaccagcugacgcccaccuggcggguguacuccaccggcagcaacgucuuccagacccgcgccgggugccucaucggcgcggagcacgugaacaacuccuacgagugcgacauccccaucggggccggcaucugcgccagcuaccagacgcagaccaacuccccgcggcgcgcccggagcguggcgucccagagcgucaucgccuacaccaugucccugggcgccgagaacagcgucgccuacuccaacaacagcaucgccauccccaccaacuucacgaucuccgugaccaccgagauccugcccgugagcaugaccaagacgagcgucgacugcaccauguacaucugcggggacuccaccgagugcagcaaccuccugcugcaguacggcuccuucugcacccagcucaaccgcgcgcugacggggaucgccguggagcaggacaagaacacccaggagguguucgcccaggucaagcagaucuacaagacgcccccgaucaaggacuucggcggguucaacuucagccagauccugcccgaccccuccaagcccagcaagcgguccuucaucgaggaccuccuguucaacaaggugacccuggccgacgccggcuucaucaagcaguacggcgacugccucggggacaucgcggcccgcgaccugaucugcgcccagaaguucaacggccugaccgugcucccgccccugcugaccgacgagaugaucgcccaguacaccagcgcccuccuggcggggaccaucacguccggcuggaccuucggggccggcgccgcccugcagauccccuucgcgaugcagauggccuaccgguucaacggcaucggggucacccagaacgugcucuacgagaaccagaagcugaucgccaaccaguucaacagcgccaucggcaagauccaggacucccugagcuccaccgccagcgcgcucgggaagcugcaggacguggucaaccagaacgcccaggcccugaacacgcucgugaagcagcuguccagcaacuucggcgccaucuccagcgugcugaacgacauccucucccgccuggacaaggucgaggccgaggugcagaucgaccggcugaucaccgggcgccuccagagccugcagaccuacgugacccagcagcugauccgggcggccgagauccgcgccagcgccaaccucgccgcgaccaagauguccgagugcguccugggccagagcaagcggguggacuucugcggcaagggguaccaccugauguccuucccccagagcgccccgcacggcguggucuuccuccacgugacguacguccccgcccaggagaagaacuucaccaccgcccccgcgaucugccacgacgggaaggcccacuucccccgcgagggcguguucguguccaacgggacccacugguucgucacgcagcggaacuucuacgagccgcagaucaucaccaccgacaacaccuucgugagcggcaacugcgacguggucaucggcaucgugaacaacacgguguacgacccccugcagcccgagcuggacuccuucaaggaggagcucgacaaguacuucaagaaccacaccagccccgacgucgaccugggggacaucuccggcaucaacgccagcguggugaacauccagaaggagaucgaccgccugaacgaggucgccaagaaccucaacgagucccugaucgaccugcaggagcucgggaaguacgagcaguacaucaaguggccgugguacaucuggcugggcuucaucgccggccugaucgcgaucgugauggugaccaucaugcucugcugcaugaccagcugcugcuccugccugaaggggugcugcagcugcggcuccugcugcaaguucgacgaggacgacagcgagcccguccugaagggggugaagcuccacuacacgugaugacucgagcugguacugcaugcacgcaaugcuagcugccccuuucccguccuggguaccccgagucucccccgaccucgggucccagguaugcucccaccuccaccugccccacucaccaccucugcuaguuccagacaccucccaagcacgcagcaaugcagcucaaaacgcuuagccuagccacacccccacgggaaacagcagugauuaaccuuuagcaauaaacgaaaguuuaacuaagcuauacuaaccccaggguuggucaauuucgugccagccacacccuggagcuagcaaaaaaaaaaaaaaaaaaaaaaaaaaaaaaaaaaaaaaaaaaaaaaaaaaaaaaaaaaaaaaaaaaaaaaaaaaaaaaaaaaaaaaaaaaaaaaaaaaaa

SEQ ID NO: 26280 - RNA, 4267 nt, Artificial Sequence
  SARS-CoV-2/Wuhan/WIV05/2019__EPI_ISL_402128 spike protein mRNA gc (1-1273)(H69del_V70del_Y453F_D614G_I692V_M1229I)
agaauaaacuaguauucuucugguccccacagacucagagagaacccgccaccauguucguguuccugguccuccugccccuggugagcucccagugcgugaaccucaccacccgcacgcagcugccgcccgccuacaccaacagcuucacccggggcgucuacuaccccgacaagguguuccgcuccagcgugcugcacuccacccaggaccucuuccugcccuucuucagcaacgucacgugguuccacgccaucuccgggaccaacggcaccaagcgguucgacaacccggugcugcccuucaacgacggggucuacuucgcgagcaccgagaaguccaacaucauccgcggcuggaucuucgggacgacccucgacagcaagacccagucccugcugaucgugaacaacgccaccaacguggucaucaaggugugcgaguuccaguucugcaacgaccccuuccucggcguguacuaccacaagaacaacaagagcuggauggaguccgaguuccgggucuacagcuccgccaacaacugcacguucgaguacgugagccagcccuuccugauggaccuggagggcaagcaggggaacuucaagaaccuccgcgaguucguguucaagaacaucgacggcuacuucaagaucuacuccaagcacaccccgaucaaccugguccgggaccugccccagggguucagcgcccucgagccccugguggaccugcccaucggcaucaacaucacccgcuuccagacccuccuggcccugcaccgguccuaccucacgccgggggacagcagcuccggcuggaccgcgggcgccgccgccuacuacgugggguaccugcagccccgcaccuuccugcucaaguacaacgagaacggcaccaucacggacgcggucgacugcgcccuggacccccugagcgagaccaagugcacccucaaguccuucaccguggagaaggggaucuaccagacgagcaacuuccgggugcagcccaccgaguccaucguccgcuucccgaacaucaccaaccugugccccuucggcgagguguucaacgccacccgguucgccagcgucuacgccuggaaccgcaagcggaucuccaacugcguggcggacuacagcgugcuguacaacuccgccagcuucuccacguucaagugcuacggcgucagccccaccaagcucaacgaccugugcuucaccaacguguacgccgacuccuucgugauccgcggggacgagguccggcagaucgcccccggccagaccgggaagaucgccgacuacaacuacaagcugccggacgacuucacgggcugcgugaucgcguggaacagcaacaaccucgacuccaaggucgggggcaacuacaacuaccuguuccgccuguuccgcaagagcaaccucaagcccuucgagcgggacaucuccaccgagaucuaccaggccggcagcacccccugcaacgggguggagggcuucaacugcuacuucccccugcaguccuacggguuccagccgaccaacggcgugggguaccagcccuaccggguggucgugcugagcuucgagcuccugcacgcccccgccacggugugcggccccaagaaguccaccaaccuggucaagaacaagugcgugaacuucaacuucaacggccucaccgggaccggcgugcugaccgagagcaacaagaaguuccugccguuccagcaguucgggcgcgacaucgccgacacgaccgacgcgguccgcgacccccagacccuggagauccucgacaucacccccugcagcuucggcgggguguccgugaucacgccgggcaccaacaccagcaaccaggucgccgugcuguaccagggcgugaacugcaccgagguccccguggccauccacgccgaccagcugacgcccaccuggcggguguacuccaccggcagcaacgucuuccagacccgcgccgggugccucaucggcgcggagcacgugaacaacuccuacgagugcgacauccccaucggggccggcaucugcgccagcuaccagacgcagaccaacuccccgcggcgcgcccggagcguggcgucccagagcgugaucgccuacaccaugucccugggcgccgagaacagcgucgccuacuccaacaacagcaucgccauccccaccaacuucacgaucuccgugaccaccgagauccugcccgugagcaugaccaagacgagcgucgacugcaccauguacaucugcggggacuccaccgagugcagcaaccuccugcugcaguacggcuccuucugcacccagcucaaccgcgcgcugacggggaucgccguggagcaggacaagaacacccaggagguguucgcccaggucaagcagaucuacaagacgcccccgaucaaggacuucggcggguucaacuucagccagauccugcccgaccccuccaagcccagcaagcgguccuucaucgaggaccuccuguucaacaaggugacccuggccgacgccggcuucaucaagcaguacggcgacugccucggggacaucgcggcccgcgaccugaucugcgcccagaaguucaacggccugaccgugcucccgccccugcugaccgacgagaugaucgcccaguacaccagcgcccuccuggcggggaccaucacguccggcuggaccuucggggccggcgccgcccugcagauccccuucgcgaugcagauggccuaccgguucaacggcaucggggucacccagaacgugcucuacgagaaccagaagcugaucgccaaccaguucaacagcgccaucggcaagauccaggacucccugagcuccaccgccagcgcgcucgggaagcugcaggacguggucaaccagaacgcccaggcccugaacacgcucgugaagcagcuguccagcaacuucggcgccaucuccagcgugcugaacgacauccucucccgccuggacaaggucgaggccgaggugcagaucgaccggcugaucaccgggcgccuccagagccugcagaccuacgugacccagcagcugauccgggcggccgagauccgcgccagcgccaaccucgccgcgaccaagauguccgagugcguccugggccagagcaagcggguggacuucugcggcaagggguaccaccugauguccuucccccagagcgccccgcacggcguggucuuccuccacgugacguacguccccgcccaggagaagaacuucaccaccgcccccgcgaucugccacgacgggaaggcccacuucccccgcgagggcguguucguguccaacgggacccacugguucgucacgcagcggaacuucuacgagccgcagaucaucaccaccgacaacaccuucgugagcggcaacugcgacguggucaucggcaucgugaacaacacgguguacgacccccugcagcccgagcuggacuccuucaaggaggagcucgacaaguacuucaagaaccacaccagccccgacgucgaccugggggacaucuccggcaucaacgccagcguggugaacauccagaaggagaucgaccgccugaacgaggucgccaagaaccucaacgagucccugaucgaccugcaggagcucgggaaguacgagcaguacaucaaguggccgugguacaucuggcugggcuucaucgccggccugaucgcgaucgugaucgugaccaucaugcucugcugcaugaccagcugcugcuccugccugaaggggugcugcagcugcggcuccugcugcaaguucgacgaggacgacagcgagcccguccugaagggggugaagcuccacuacacgugaugacucgagcugguacugcaugcacgcaaugcuagcugccccuuucccguccuggguaccccgagucucccccgaccucgggucccagguaugcucccaccuccaccugccccacucaccaccucugcuaguuccagacaccucccaagcacgcagcaaugcagcucaaaacgcuuagccuagccacacccccacgggaaacagcagugauuaaccuuuagcaauaaacgaaaguuuaacuaagcuauacuaaccccaggguuggucaauuucgugccagccacacccuggagcuagcaaaaaaaaaaaaaaaaaaaaaaaaaaaaaaaaaaaaaaaaaaaaaaaaaaaaaaaaaaaaaaaaaaaaaaaaaaaaaaaaaaaaaaaaaaaaaaaaaaaa

SEQ ID NO: 26281 - RNA, 4264 nt, Artificial Sequence
  SARS-CoV-2/Wuhan/WIV05/2019__EPI_ISL_402128 spike protein mRNA gc (1-1273)(H69del_V70del_Y144del_N501Y_A570D_D614G_P681H_T716I_S982 A_D1118H)
agaauaaacuaguauucuucugguccccacagacucagagagaacccgccaccauguucguguuccugguccuccugccccuggugagcucccagugcgugaaccucaccacccgcacgcagcugccgcccgccuacaccaacagcuucacccggggcgucuacuaccccgacaagguguuccgcuccagcgugcugcacuccacccaggaccucuuccugcccuucuucagcaacgucacgugguuccacgccaucuccgggaccaacggcaccaagcgguucgacaacccggugcugcccuucaacgacggggucuacuucgcgagcaccgagaaguccaacaucauccgcggcuggaucuucgggacgacccucgacagcaagacccagucccugcugaucgugaacaacgccaccaacguggucaucaaggugugcgaguuccaguucugcaacgaccccuuccucggcguguaccacaagaacaacaagagcuggauggaguccgaguuccgggucuacagcuccgccaacaacugcacguucgaguacgugagccagcccuuccugauggaccuggagggcaagcaggggaacuucaagaaccuccgcgaguucguguucaagaacaucgacggcuacuucaagaucuacuccaagcacaccccgaucaaccugguccgggaccugccccagggguucagcgcccucgagccccugguggaccugcccaucggcaucaacaucacccgcuuccagacccuccuggcccugcaccgguccuaccucacgccgggggacagcagcuccggcuggaccgcgggcgccgccgccuacuacgugggguaccugcagccccgcaccuuccugcucaaguacaacgagaacggcaccaucacggacgcggucgacugcgcccuggacccccugagcgagaccaagugcacccucaaguccuucaccguggagaaggggaucuaccagacgagcaacuuccgggugcagcccaccgaguccaucguccgcuucccgaacaucaccaaccugugccccuucggcgagguguucaacgccacccgguucgccagcgucuacgccuggaaccgcaagcggaucuccaacugcguggcggacuacagcgugcuguacaacuccgccagcuucuccacguucaagugcuacggcgucagccccaccaagcucaacgaccugugcuucaccaacguguacgccgacuccuucgugauccgcggggacgagguccggcagaucgcccccggccagaccgggaagaucgccgacuacaacuacaagcugccggacgacuucacgggcugcgugaucgcguggaacagcaacaaccucgacuccaaggucgggggcaacuacaacuaccuguaccgccuguuccgcaagagcaaccucaagcccuucgagcgggacaucuccaccgagaucuaccaggccggcagcacccccugcaacgggguggagggcuucaacugcuacuucccccugcaguccuacggguuccagccgaccuacggcgugggguaccagcccuaccggguggucgugcugagcuucgagcuccugcacgcccccgccacggugugcggccccaagaaguccaccaaccuggucaagaacaagugcgugaacuucaacuucaacggccucaccgggaccggcgugcugaccgagagcaacaagaaguuccugccguuccagcaguucgggcgcgacaucgacgacacgaccgacgcgguccgcgacccccagacccuggagauccucgacaucacccccugcagcuucggcgggguguccgugaucacgccgggcaccaacaccagcaaccaggucgccgugcuguaccagggcgugaacugcaccgagguccccguggccauccacgccgaccagcugacgcccaccuggcggguguacuccaccggcagcaacgucuuccagacccgcgccgggugccucaucggcgcggagcacgugaacaacuccuacgagugcgacauccccaucggggccggcaucugcgccagcuaccagacgcagaccaacucccaccggcgcgcccggagcguggcgucccagagcaucaucgccuacaccaugucccugggcgccgagaacagcgucgccuacuccaacaacagcaucgccauccccaucaacuucacgaucuccgugaccaccgagauccugcccgugagcaugaccaagacgagcgucgacugcaccauguacaucugcggggacuccaccgagugcagcaaccuccugcugcaguacggcuccuucugcacccagcucaaccgcgcgcugacggggaucgccguggagcaggacaagaacacccaggagguguucgcccaggucaagcagaucuacaagacgcccccgaucaaggacuucggcggguucaacuucagccagauccugcccgaccccuccaagcccagcaagcgguccuucaucgaggaccuccuguucaacaaggugacccuggccgacgccggcuucaucaagcaguacggcgacugccucggggacaucgcggcccgcgaccugaucugcgcccagaaguucaacggccugaccgugcucccgccccugcugaccgacgagaugaucgcccaguacaccagcgcccuccuggcggggaccaucacguccggcuggaccuucggggccggcgccgcccugcagauccccuucgcgaugcagauggccuaccgguucaacggcaucggggucacccagaacgugcucuacgagaaccagaagcugaucgccaaccaguucaacagcgccaucggcaagauccaggacucccugagcuccaccgccagcgcgcucgggaagcugcaggacguggucaaccagaacgcccaggcccugaacacgcucgugaagcagcuguccagcaacuucggcgccaucuccagcgugcugaacgacauccucgcccgccuggacaaggucgaggccgaggugcagaucgaccggcugaucaccgggcgccuccagagccugcagaccuacgugacccagcagcugauccgggcggccgagauccgcgccagcgccaaccucgccgcgaccaagauguccgagugcguccugggccagagcaagcggguggacuucugcggcaagggguaccaccugauguccuucccccagagcgccccgcacggcguggucuuccuccacgugacguacguccccgcccaggagaagaacuucaccaccgcccccgcgaucugccacgacgggaaggcccacuucccccgcgagggcguguucguguccaacgggacccacugguucgucacgcagcggaacuucuacgagccgcagaucaucaccacccacaacaccuucgugagcggcaacugcgacguggucaucggcaucgugaacaacacgguguacgacccccugcagcccgagcuggacuccuucaaggaggagcucgacaaguacuucaagaaccacaccagccccgacgucgaccugggggacaucuccggcaucaacgccagcguggugaacauccagaaggagaucgaccgccugaacgaggucgccaagaaccucaacgagucccugaucgaccugcaggagcucgggaaguacgagcaguacaucaaguggccgugguacaucuggcugggcuucaucgccggccugaucgcgaucgugauggugaccaucaugcucugcugcaugaccagcugcugcuccugccugaaggggugcugcagcugcggcuccugcugcaaguucgacgaggacgacagcgagcccguccugaagggggugaagcuccacuacacgugaugacucgagcugguacugcaugcacgcaaugcuagcugccccuuucccguccuggguaccccgagucucccccgaccucgggucccagguaugcucccaccuccaccugccccacucaccaccucugcuaguuccagacaccucccaagcacgcagcaaugcagcucaaaacgcuuagccuagccacacccccacgggaaacagcagugauuaaccuuuagcaauaaacgaaaguuuaacuaagcuauacuaaccccaggguuggucaauuucgugccagccacacccuggagcuagcaaaaaaaaaaaaaaaaaaaaaaaaaaaaaaaaaaaaaaaaaaaaaaaaaaaaaaaaaaaaaaaaaaaaaaaaaaaaaaaaaaaaaaaaaaaaaaaaaaaa

SEQ ID NO: 26282 - RNA, 4273 nt, Artificial Sequence
  SARS-CoV-2/Wuhan/WIV05/2019__EPI_ISL_402128 spike protein mRNA gc (1-1273)(K417N_E484K_N501Y_D614G)
agaauaaacuaguauucuucugguccccacagacucagagagaacccgccaccauguucguguuccugguccuccugccccuggugagcucccagugcgugaaccucaccacccgcacgcagcugccgcccgccuacaccaacagcuucacccggggcgucuacuaccccgacaagguguuccgcuccagcgugcugcacuccacccaggaccucuuccugcccuucuucagcaacgucacgugguuccacgccauccacguguccgggaccaacggcaccaagcgguucgacaacccggugcugcccuucaacgacggggucuacuucgcgagcaccgagaaguccaacaucauccgcggcuggaucuucgggacgacccucgacagcaagacccagucccugcugaucgugaacaacgccaccaacguggucaucaaggugugcgaguuccaguucugcaacgaccccuuccucggcguguacuaccacaagaacaacaagagcuggauggaguccgaguuccgggucuacagcuccgccaacaacugcacguucgaguacgugagccagcccuuccugauggaccuggagggcaagcaggggaacuucaagaaccuccgcgaguucguguucaagaacaucgacggcuacuucaagaucuacuccaagcacaccccgaucaaccugguccgggaccugccccagggguucagcgcccucgagccccugguggaccugcccaucggcaucaacaucacccgcuuccagacccuccuggcccugcaccgguccuaccucacgccgggggacagcagcuccggcuggaccgcgggcgccgccgccuacuacgugggguaccugcagccccgcaccuuccugcucaaguacaacgagaacggcaccaucacggacgcggucgacugcgcccuggacccccugagcgagaccaagugcacccucaaguccuucaccguggagaaggggaucuaccagacgagcaacuuccgggugcagcccaccgaguccaucguccgcuucccgaacaucaccaaccugugccccuucggcgagguguucaacgccacccgguucgccagcgucuacgccuggaaccgcaagcggaucuccaacugcguggcggacuacagcgugcuguacaacuccgccagcuucuccacguucaagugcuacggcgucagccccaccaagcucaacgaccugugcuucaccaacguguacgccgacuccuucgugauccgcggggacgagguccggcagaucgcccccggccagaccgggaacaucgccgacuacaacuacaagcugccggacgacuucacgggcugcgugaucgcguggaacagcaacaaccucgacuccaaggucgggggcaacuacaacuaccuguaccgccuguuccgcaagagcaaccucaagcccuucgagcgggacaucuccaccgagaucuaccaggccggcagcacccccugcaacggggugaagggcuucaacugcuacuucccccugcaguccuacggguuccagccgaccuacggcgugggguaccagcccuaccggguggucgugcugagcuucgagcuccugcacgcccccgccacggugugcggccccaagaaguccaccaaccuggucaagaacaagugcgugaacuucaacuucaacggccucaccgggaccggcgugcugaccgagagcaacaagaaguuccugccguuccagcaguucgggcgcgacaucgccgacacgaccgacgcgguccgcgacccccagacccuggagauccucgacaucacccccugcagcuucggcgggguguccgugaucacgccgggcaccaacaccagcaaccaggucgccgugcuguaccagggcgugaacugcaccgagguccccguggccauccacgccgaccagcugacgcccaccuggcggguguacuccaccggcagcaacgucuuccagacccgcgccgggugccucaucggcgcggagcacgugaacaacuccuacgagugcgacauccccaucggggccggcaucugcgccagcuaccagacgcagaccaacuccccgcggcgcgcccggagcguggcgucccagagcaucaucgccuacaccaugucccugggcgccgagaacagcgucgccuacuccaacaacagcaucgccauccccaccaacuucacgaucuccgugaccaccgagauccugcccgugagcaugaccaagacgagcgucgacugcaccauguacaucugcggggacuccaccgagugcagcaaccuccugcugcaguacggcuccuucugcacccagcucaaccgcgcgcugacggggaucgccguggagcaggacaagaacacccaggagguguucgcccaggucaagcagaucuacaagacgcccccgaucaaggacuucggcggguucaacuucagccagauccugcccgaccccuccaagcccagcaagcgguccuucaucgaggaccuccuguucaacaaggugacccuggccgacgccggcuucaucaagcaguacggcgacugccucggggacaucgcggcccgcgaccugaucugcgcccagaaguucaacggccugaccgugcucccgccccugcugaccgacgagaugaucgcccaguacaccagcgcccuccuggcggggaccaucacguccggcuggaccuucggggccggcgccgcccugcagauccccuucgcgaugcagauggccuaccgguucaacggcaucggggucacccagaacgugcucuacgagaaccagaagcugaucgccaaccaguucaacagcgccaucggcaagauccaggacucccugagcuccaccgccagcgcgcucgggaagcugcaggacguggucaaccagaacgcccaggcccugaacacgcucgugaagcagcuguccagcaacuucggcgccaucuccagcgugcugaacgacauccucucccgccuggacaaggucgaggccgaggugcagaucgaccggcugaucaccgggcgccuccagagccugcagaccuacgugacccagcagcugauccgggcggccgagauccgcgccagcgccaaccucgccgcgaccaagauguccgagugcguccugggccagagcaagcggguggacuucugcggcaagggguaccaccugauguccuucccccagagcgccccgcacggcguggucuuccuccacgugacguacguccccgcccaggagaagaacuucaccaccgcccccgcgaucugccacgacgggaaggcccacuucccccgcgagggcguguucguguccaacgggacccacugguucgucacgcagcggaacuucuacgagccgcagaucaucaccaccgacaacaccuucgugagcggcaacugcgacguggucaucggcaucgugaacaacacgguguacgacccccugcagcccgagcuggacuccuucaaggaggagcucgacaaguacuucaagaaccacaccagccccgacgucgaccugggggacaucuccggcaucaacgccagcguggugaacauccagaaggagaucgaccgccugaacgaggucgccaagaaccucaacgagucccugaucgaccugcaggagcucgggaaguacgagcaguacaucaaguggccgugguacaucuggcugggcuucaucgccggccugaucgcgaucgugauggugaccaucaugcucugcugcaugaccagcugcugcuccugccugaaggggugcugcagcugcggcuccugcugcaaguucgacgaggacgacagcgagcccguccugaagggggugaagcuccacuacacgugaugacucgagcugguacugcaugcacgcaaugcuagcugccccuuucccguccuggguaccccgagucucccccgaccucgggucccagguaugcucccaccuccaccugccccacucaccaccucugcuaguuccagacaccucccaagcacgcagcaaugcagcucaaaacgcuuagccuagccacacccccacgggaaacagcagugauuaaccuuuagcaauaaacgaaaguuuaacuaagcuauacuaaccccaggguuggucaauuucgugccagccacacccuggagcuagcaaaaaaaaaaaaaaaaaaaaaaaaaaaaaaaaaaaaaaaaaaaaaaaaaaaaaaaaaaaaaaaaaaaaaaaaaaaaaaaaaaaaaaaaaaaaaaaaaaaa

SEQ ID NO: 26283 - RNA, 4264 nt, Artificial Sequence
  SARS-CoV-2/Wuhan/WIV05/2019__EPI_ISL_402128 spike protein mRNA gc (1-1273)(L18F_D80A_D215G_L242del_A243del_L244del_R246I_K417N_E484 K_N501Y_D614G_A701V)
agaauaaacuaguauucuucugguccccacagacucagagagaacccgccaccauguucguguuccugguccuccugccccuggugagcucccagugcgugaacuucaccacccgcacgcagcugccgcccgccuacaccaacagcuucacccggggcgucuacuaccccgacaagguguuccgcuccagcgugcugcacuccacccaggaccucuuccugcccuucuucagcaacgucacgugguuccacgccauccacguguccgggaccaacggcaccaagcgguucgccaacccggugcugcccuucaacgacggggucuacuucgcgagcaccgagaaguccaacaucauccgcggcuggaucuucgggacgacccucgacagcaagacccagucccugcugaucgugaacaacgccaccaacguggucaucaaggugugcgaguuccaguucugcaacgaccccuuccucggcguguacuaccacaagaacaacaagagcuggauggaguccgaguuccgggucuacagcuccgccaacaacugcacguucgaguacgugagccagcccuuccugauggaccuggagggcaagcaggggaacuucaagaaccuccgcgaguucguguucaagaacaucgacggcuacuucaagaucuacuccaagcacaccccgaucaaccugguccggggccugccccagggguucagcgcccucgagccccugguggaccugcccaucggcaucaacaucacccgcuuccagacccuccacaucuccuaccucacgccgggggacagcagcuccggcuggaccgcgggcgccgccgccuacuacgugggguaccugcagccccgcaccuuccugcucaaguacaacgagaacggcaccaucacggacgcggucgacugcgcccuggacccccugagcgagaccaagugcacccucaaguccuucaccguggagaaggggaucuaccagacgagcaacuuccgggugcagcccaccgaguccaucguccgcuucccgaacaucaccaaccugugccccuucggcgagguguucaacgccacccgguucgccagcgucuacgccuggaaccgcaagcggaucuccaacugcguggcggacuacagcgugcuguacaacuccgccagcuucuccacguucaagugcuacggcgucagccccaccaagcucaacgaccugugcuucaccaacguguacgccgacuccuucgugauccgcggggacgagguccggcagaucgcccccggccagaccgggaacaucgccgacuacaacuacaagcugccggacgacuucacgggcugcgugaucgcguggaacagcaacaaccucgacuccaaggucgggggcaacuacaacuaccuguaccgccuguuccgcaagagcaaccucaagcccuucgagcgggacaucuccaccgagaucuaccaggccggcagcacccccugcaacggggugaagggcuucaacugcuacuucccccugcaguccuacggguuccagccgaccuacggcgugggguaccagcccuaccggguggucgugcugagcuucgagcuccugcacgcccccgccacggugugcggccccaagaaguccaccaaccuggucaagaacaagugcgugaacuucaacuucaacggccucaccgggaccggcgugcugaccgagagcaacaagaaguuccugccguuccagcaguucgggcgcgacaucgccgacacgaccgacgcgguccgcgacccccagacccuggagauccucgacaucacccccugcagcuucggcgggguguccgugaucacgccgggcaccaacaccagcaaccaggucgccgugcuguaccagggcgugaacugcaccgagguccccguggccauccacgccgaccagcugacgcccaccuggcggguguacuccaccggcagcaacgucuuccagacccgcgccgggugccucaucggcgcggagcacgugaacaacuccuacgagugcgacauccccaucggggccggcaucugcgccagcuaccagacgcagaccaacuccccgcggcgcgcccggagcguggcgucccagagcaucaucgccuacaccaugucccugggcguggagaacagcgucgccuacuccaacaacagcaucgccauccccaccaacuucacgaucuccgugaccaccgagauccugcccgugagcaugaccaagacgagcgucgacugcaccauguacaucugcggggacuccaccgagugcagcaaccuccugcugcaguacggcuccuucugcacccagcucaaccgcgcgcugacggggaucgccguggagcaggacaagaacacccaggagguguucgcccaggucaagcagaucuacaagacgcccccgaucaaggacuucggcggguucaacuucagccagauccugcccgaccccuccaagcccagcaagcgguccuucaucgaggaccuccuguucaacaaggugacccuggccgacgccggcuucaucaagcaguacggcgacugccucggggacaucgcggcccgcgaccugaucugcgcccagaaguucaacggccugaccgugcucccgccccugcugaccgacgagaugaucgcccaguacaccagcgcccuccuggcggggaccaucacguccggcuggaccuucggggccggcgccgcccugcagauccccuucgcgaugcagauggccuaccgguucaacggcaucggggucacccagaacgugcucuacgagaaccagaagcugaucgccaaccaguucaacagcgccaucggcaagauccaggacucccugagcuccaccgccagcgcgcucgggaagcugcaggacguggucaaccagaacgcccaggcccugaacacgcucgugaagcagcuguccagcaacuucggcgccaucuccagcgugcugaacgacauccucucccgccuggacaaggucgaggccgaggugcagaucgaccggcugaucaccgggcgccuccagagccugcagaccuacgugacccagcagcugauccgggcggccgagauccgcgccagcgccaaccucgccgcgaccaagauguccgagugcguccugggccagagcaagcggguggacuucugcggcaagggguaccaccugauguccuucccccagagcgccccgcacggcguggucuuccuccacgugacguacguccccgcccaggagaagaacuucaccaccgcccccgcgaucugccacgacgggaaggcccacuucccccgcgagggcguguucguguccaacgggacccacugguucgucacgcagcggaacuucuacgagccgcagaucaucaccaccgacaacaccuucgugagcggcaacugcgacguggucaucggcaucgugaacaacacgguguacgacccccugcagcccgagcuggacuccuucaaggaggagcucgacaaguacuucaagaaccacaccagccccgacgucgaccugggggacaucuccggcaucaacgccagcguggugaacauccagaaggagaucgaccgccugaacgaggucgccaagaaccucaacgagucccugaucgaccugcaggagcucgggaaguacgagcaguacaucaaguggccgugguacaucuggcugggcuucaucgccggccugaucgcgaucgugauggugaccaucaugcucugcugcaugaccagcugcugcuccugccugaaggggugcugcagcugcggcuccugcugcaaguucgacgaggacgacagcgagcccguccugaagggggugaagcuccacuacacgugaugacucgagcugguacugcaugcacgcaaugcuagcugccccuuucccguccuggguaccccgagucucccccgaccucgggucccagguaugcucccaccuccaccugccccacucaccaccucugcuaguuccagacaccucccaagcacgcagcaaugcagcucaaaacgcuuagccuagccacacccccacgggaaacagcagugauuaaccuuuagcaauaaacgaaaguuuaacuaagcuauacuaaccccaggguuggucaauuucgugccagccacacccuggagcuagcaaaaaaaaaaaaaaaaaaaaaaaaaaaaaaaaaaaaaaaaaaaaaaaaaaaaaaaaaaaaaaaaaaaaaaaaaaaaaaaaaaaaaaaaaaaaaaaaaaaa

SEQ ID NO: 26284 - RNA, 4273 nt, Artificial Sequence
  SARS-CoV-2/Wuhan/WIV05/2019__EPI_ISL_402128 spike protein mRNA gc (1-1273)(E484K_D614G)
agaauaaacuaguauucuucugguccccacagacucagagagaacccgccaccauguucguguuccugguccuccugccccuggugagcucccagugcgugaaccucaccacccgcacgcagcugccgcccgccuacaccaacagcuucacccggggcgucuacuaccccgacaagguguuccgcuccagcgugcugcacuccacccaggaccucuuccugcccuucuucagcaacgucacgugguuccacgccauccacguguccgggaccaacggcaccaagcgguucgacaacccggugcugcccuucaacgacggggucuacuucgcgagcaccgagaaguccaacaucauccgcggcuggaucuucgggacgacccucgacagcaagacccagucccugcugaucgugaacaacgccaccaacguggucaucaaggugugcgaguuccaguucugcaacgaccccuuccucggcguguacuaccacaagaacaacaagagcuggauggaguccgaguuccgggucuacagcuccgccaacaacugcacguucgaguacgugagccagcccuuccugauggaccuggagggcaagcaggggaacuucaagaaccuccgcgaguucguguucaagaacaucgacggcuacuucaagaucuacuccaagcacaccccgaucaaccugguccgggaccugccccagggguucagcgcccucgagccccugguggaccugcccaucggcaucaacaucacccgcuuccagacccuccuggcccugcaccgguccuaccucacgccgggggacagcagcuccggcuggaccgcgggcgccgccgccuacuacgugggguaccugcagccccgcaccuuccugcucaaguacaacgagaacggcaccaucacggacgcggucgacugcgcccuggacccccugagcgagaccaagugcacccucaaguccuucaccguggagaaggggaucuaccagacgagcaacuuccgggugcagcccaccgaguccaucguccgcuucccgaacaucaccaaccugugccccuucggcgagguguucaacgccacccgguucgccagcgucuacgccuggaaccgcaagcggaucuccaacugcguggcggacuacagcgugcuguacaacuccgccagcuucuccacguucaagugcuacggcgucagccccaccaagcucaacgaccugugcuucaccaacguguacgccgacuccuucgugauccgcggggacgagguccggcagaucgcccccggccagaccgggaagaucgccgacuacaacuacaagcugccggacgacuucacgggcugcgugaucgcguggaacagcaacaaccucgacuccaaggucgggggcaacuacaacuaccuguaccgccuguuccgcaagagcaaccucaagcccuucgagcgggacaucuccaccgagaucuaccaggccggcagcacccccugcaacggggugaagggcuucaacugcuacuucccccugcaguccuacggguuccagccgaccaacggcgugggguaccagcccuaccggguggucgugcugagcuucgagcuccugcacgcccccgccacggugugcggccccaagaaguccaccaaccuggucaagaacaagugcgugaacuucaacuucaacggccucaccgggaccggcgugcugaccgagagcaacaagaaguuccugccguuccagcaguucgggcgcgacaucgccgacacgaccgacgcgguccgcgacccccagacccuggagauccucgacaucacccccugcagcuucggcgggguguccgugaucacgccgggcaccaacaccagcaaccaggucgccgugcuguaccagggcgugaacugcaccgagguccccguggccauccacgccgaccagcugacgcccaccuggcggguguacuccaccggcagcaacgucuuccagacccgcgccgggugccucaucggcgcggagcacgugaacaacuccuacgagugcgacauccccaucggggccggcaucugcgccagcuaccagacgcagaccaacuccccgcggcgcgcccggagcguggcgucccagagcaucaucgccuacaccaugucccugggcgccgagaacagcgucgccuacuccaacaacagcaucgccauccccaccaacuucacgaucuccgugaccaccgagauccugcccgugagcaugaccaagacgagcgucgacugcaccauguacaucugcggggacuccaccgagugcagcaaccuccugcugcaguacggcuccuucugcacccagcucaaccgcgcgcugacggggaucgccguggagcaggacaagaacacccaggagguguucgcccaggucaagcagaucuacaagacgcccccgaucaaggacuucggcggguucaacuucagccagauccugcccgaccccuccaagcccagcaagcgguccuucaucgaggaccuccuguucaacaaggugacccuggccgacgccggcuucaucaagcaguacggcgacugccucggggacaucgcggcccgcgaccugaucugcgcccagaaguucaacggccugaccgugcucccgccccugcugaccgacgagaugaucgcccaguacaccagcgcccuccuggcggggaccaucacguccggcuggaccuucggggccggcgccgcccugcagauccccuucgcgaugcagauggccuaccgguucaacggcaucggggucacccagaacgugcucuacgagaaccagaagcugaucgccaaccaguucaacagcgccaucggcaagauccaggacucccugagcuccaccgccagcgcgcucgggaagcugcaggacguggucaaccagaacgcccaggcccugaacacgcucgugaagcagcuguccagcaacuucggcgccaucuccagcgugcugaacgacauccucucccgccuggacaaggucgaggccgaggugcagaucgaccggcugaucaccgggcgccuccagagccugcagaccuacgugacccagcagcugauccgggcggccgagauccgcgccagcgccaaccucgccgcgaccaagauguccgagugcguccugggccagagcaagcggguggacuucugcggcaagggguaccaccugauguccuucccccagagcgccccgcacggcguggucuuccuccacgugacguacguccccgcccaggagaagaacuucaccaccgcccccgcgaucugccacgacgggaaggcccacuucccccgcgagggcguguucguguccaacgggacccacugguucgucacgcagcggaacuucuacgagccgcagaucaucaccaccgacaacaccuucgugagcggcaacugcgacguggucaucggcaucgugaacaacacgguguacgacccccugcagcccgagcuggacuccuucaaggaggagcucgacaaguacuucaagaaccacaccagccccgacgucgaccugggggacaucuccggcaucaacgccagcguggugaacauccagaaggagaucgaccgccugaacgaggucgccaagaaccucaacgagucccugaucgaccugcaggagcucgggaaguacgagcaguacaucaaguggccgugguacaucuggcugggcuucaucgccggccugaucgcgaucgugauggugaccaucaugcucugcugcaugaccagcugcugcuccugccugaaggggugcugcagcugcggcuccugcugcaaguucgacgaggacgacagcgagcccguccugaagggggugaagcuccacuacacgugaugacucgagcugguacugcaugcacgcaaugcuagcugccccuuucccguccuggguaccccgagucucccccgaccucgggucccagguaugcucccaccuccaccugccccacucaccaccucugcuaguuccagacaccucccaagcacgcagcaaugcagcucaaaacgcuuagccuagccacacccccacgggaaacagcagugauuaaccuuuagcaauaaacgaaaguuuaacuaagcuauacuaaccccaggguuggucaauuucgugccagccacacccuggagcuagcaaaaaaaaaaaaaaaaaaaaaaaaaaaaaaaaaaaaaaaaaaaaaaaaaaaaaaaaaaaaaaaaaaaaaaaaaaaaaaaaaaaaaaaaaaaaaaaaaaaa

SEQ ID NO: 26285 - RNA, 4273 nt, Artificial Sequence
  SARS-CoV-2/Wuhan/WIV05/2019__EPI_ISL_402128 spike protein mRNA gc (1-1273)(L18F_T20N_P26S_D138Y_R190S_K417T_E484K_N501Y_D614G_H655Y _T1027I)
agaauaaacuaguauucuucugguccccacagacucagagagaacccgccaccauguucguguuccugguccuccugccccuggugagcucccagugcgugaacuucaccaaccgcacgcagcugccgagcgccuacaccaacagcuucacccggggcgucuacuaccccgacaagguguuccgcuccagcgugcugcacuccacccaggaccucuuccugcccuucuucagcaacgucacgugguuccacgccauccacguguccgggaccaacggcaccaagcgguucgacaacccggugcugcccuucaacgacggggucuacuucgcgagcaccgagaaguccaacaucauccgcggcuggaucuucgggacgacccucgacagcaagacccagucccugcugaucgugaacaacgccaccaacguggucaucaaggugugcgaguuccaguucugcaacuaccccuuccucggcguguacuaccacaagaacaacaagagcuggauggaguccgaguuccgggucuacagcuccgccaacaacugcacguucgaguacgugagccagcccuuccugauggaccuggagggcaagcaggggaacuucaagaaccucagcgaguucguguucaagaacaucgacggcuacuucaagaucuacuccaagcacaccccgaucaaccugguccgggaccugccccagggguucagcgcccucgagccccugguggaccugcccaucggcaucaacaucacccgcuuccagacccuccuggcccugcaccgguccuaccucacgccgggggacagcagcuccggcuggaccgcgggcgccgccgccuacuacgugggguaccugcagccccgcaccuuccugcucaaguacaacgagaacggcaccaucacggacgcggucgacugcgcccuggacccccugagcgagaccaagugcacccucaaguccuucaccguggagaaggggaucuaccagacgagcaacuuccgggugcagcccaccgaguccaucguccgcuucccgaacaucaccaaccugugccccuucggcgagguguucaacgccacccgguucgccagcgucuacgccuggaaccgcaagcggaucuccaacugcguggcggacuacagcgugcuguacaacuccgccagcuucuccacguucaagugcuacggcgucagccccaccaagcucaacgaccugugcuucaccaacguguacgccgacuccuucgugauccgcggggacgagguccggcagaucgcccccggccagaccgggaccaucgccgacuacaacuacaagcugccggacgacuucacgggcugcgugaucgcguggaacagcaacaaccucgacuccaaggucgggggcaacuacaacuaccuguaccgccuguuccgcaagagcaaccucaagcccuucgagcgggacaucuccaccgagaucuaccaggccggcagcacccccugcaacggggugaagggcuucaacugcuacuucccccugcaguccuacggguuccagccgaccuacggcgugggguaccagcccuaccggguggucgugcugagcuucgagcuccugcacgcccccgccacggugugcggccccaagaaguccaccaaccuggucaagaacaagugcgugaacuucaacuucaacggccucaccgggaccggcgugcugaccgagagcaacaagaaguuccugccguuccagcaguucgggcgcgacaucgccgacacgaccgacgcgguccgcgacccccagacccuggagauccucgacaucacccccugcagcuucggcgggguguccgugaucacgccgggcaccaacaccagcaaccaggucgccgugcuguaccagggcgugaacugcaccgagguccccguggccauccacgccgaccagcugacgcccaccuggcggguguacuccaccggcagcaacgucuuccagacccgcgccgggugccucaucggcgcggaguacgugaacaacuccuacgagugcgacauccccaucggggccggcaucugcgccagcuaccagacgcagaccaacuccccgcggcgcgcccggagcguggcgucccagagcaucaucgccuacaccaugucccugggcgccgagaacagcgucgccuacuccaacaacagcaucgccauccccaccaacuucacgaucuccgugaccaccgagauccugcccgugagcaugaccaagacgagcgucgacugcaccauguacaucugcggggacuccaccgagugcagcaaccuccugcugcaguacggcuccuucugcacccagcucaaccgcgcgcugacggggaucgccguggagcaggacaagaacacccaggagguguucgcccaggucaagcagaucuacaagacgcccccgaucaaggacuucggcggguucaacuucagccagauccugcccgaccccuccaagcccagcaagcgguccuucaucgaggaccuccuguucaacaaggugacccuggccgacgccggcuucaucaagcaguacggcgacugccucggggacaucgcggcccgcgaccugaucugcgcccagaaguucaacggccugaccgugcucccgccccugcugaccgacgagaugaucgcccaguacaccagcgcccuccuggcggggaccaucacguccggcuggaccuucggggccggcgccgcccugcagauccccuucgcgaugcagauggccuaccgguucaacggcaucggggucacccagaacgugcucuacgagaaccagaagcugaucgccaaccaguucaacagcgccaucggcaagauccaggacucccugagcuccaccgccagcgcgcucgggaagcugcaggacguggucaaccagaacgcccaggcccugaacacgcucgugaagcagcuguccagcaacuucggcgccaucuccagcgugcugaacgacauccucucccgccuggacaaggucgaggccgaggugcagaucgaccggcugaucaccgggcgccuccagagccugcagaccuacgugacccagcagcugauccgggcggccgagauccgcgccagcgccaaccucgccgcgaucaagauguccgagugcguccugggccagagcaagcggguggacuucugcggcaagggguaccaccugauguccuucccccagagcgccccgcacggcguggucuuccuccacgugacguacguccccgcccaggagaagaacuucaccaccgcccccgcgaucugccacgacgggaaggcccacuucccccgcgagggcguguucguguccaacgggacccacugguucgucacgcagcggaacuucuacgagccgcagaucaucaccaccgacaacaccuucgugagcggcaacugcgacguggucaucggcaucgugaacaacacgguguacgacccccugcagcccgagcuggacuccuucaaggaggagcucgacaaguacuucaagaaccacaccagccccgacgucgaccugggggacaucuccggcaucaacgccagcguggugaacauccagaaggagaucgaccgccugaacgaggucgccaagaaccucaacgagucccugaucgaccugcaggagcucgggaaguacgagcaguacaucaaguggccgugguacaucuggcugggcuucaucgccggccugaucgcgaucgugauggugaccaucaugcucugcugcaugaccagcugcugcuccugccugaaggggugcugcagcugcggcuccugcugcaaguucgacgaggacgacagcgagcccguccugaagggggugaagcuccacuacacgugaugacucgagcugguacugcaugcacgcaaugcuagcugccccuuucccguccuggguaccccgagucucccccgaccucgggucccagguaugcucccaccuccaccugccccacucaccaccucugcuaguuccagacaccucccaagcacgcagcaaugcagcucaaaacgcuuagccuagccacacccccacgggaaacagcagugauuaaccuuuagcaauaaacgaaaguuuaacuaagcuauacuaaccccaggguuggucaauuucgugccagccacacccuggagcuagcaaaaaaaaaaaaaaaaaaaaaaaaaaaaaaaaaaaaaaaaaaaaaaaaaaaaaaaaaaaaaaaaaaaaaaaaaaaaaaaaaaaaaaaaaaaaaaaaaaaa

SEQ ID NO: 26286 - RNA, 4273 nt, Artificial Sequence
  SARS-CoV-2/Wuhan/WIV05/2019__EPI_ISL_402128 spike protein mRNA gc (1-1273)(S13I_W152C_L452R_D614G)
agaauaaacuaguauucuucugguccccacagacucagagagaacccgccaccauguucguguuccugguccuccugccccuggugagcauccagugcgugaaccucaccacccgcacgcagcugccgcccgccuacaccaacagcuucacccggggcgucuacuaccccgacaagguguuccgcuccagcgugcugcacuccacccaggaccucuuccugcccuucuucagcaacgucacgugguuccacgccauccacguguccgggaccaacggcaccaagcgguucgacaacccggugcugcccuucaacgacggggucuacuucgcgagcaccgagaaguccaacaucauccgcggcuggaucuucgggacgacccucgacagcaagacccagucccugcugaucgugaacaacgccaccaacguggucaucaaggugugcgaguuccaguucugcaacgaccccuuccucggcguguacuaccacaagaacaacaagagcugcauggaguccgaguuccgggucuacagcuccgccaacaacugcacguucgaguacgugagccagcccuuccugauggaccuggagggcaagcaggggaacuucaagaaccuccgcgaguucguguucaagaacaucgacggcuacuucaagaucuacuccaagcacaccccgaucaaccugguccgggaccugccccagggguucagcgcccucgagccccugguggaccugcccaucggcaucaacaucacccgcuuccagacccuccuggcccugcaccgguccuaccucacgccgggggacagcagcuccggcuggaccgcgggcgccgccgccuacuacgugggguaccugcagccccgcaccuuccugcucaaguacaacgagaacggcaccaucacggacgcggucgacugcgcccuggacccccugagcgagaccaagugcacccucaaguccuucaccguggagaaggggaucuaccagacgagcaacuuccgggugcagcccaccgaguccaucguccgcuucccgaacaucaccaaccugugccccuucggcgagguguucaacgccacccgguucgccagcgucuacgccuggaaccgcaagcggaucuccaacugcguggcggacuacagcgugcuguacaacuccgccagcuucuccacguucaagugcuacggcgucagccccaccaagcucaacgaccugugcuucaccaacguguacgccgacuccuucgugauccgcggggacgagguccggcagaucgcccccggccagaccgggaagaucgccgacuacaacuacaagcugccggacgacuucacgggcugcgugaucgcguggaacagcaacaaccucgacuccaaggucgggggcaacuacaacuaccgcuaccgccuguuccgcaagagcaaccucaagcccuucgagcgggacaucuccaccgagaucuaccaggccggcagcacccccugcaacgggguggagggcuucaacugcuacuucccccugcaguccuacggguuccagccgaccaacggcgugggguaccagcccuaccggguggucgugcugagcuucgagcuccugcacgcccccgccacggugugcggccccaagaaguccaccaaccuggucaagaacaagugcgugaacuucaacuucaacggccucaccgggaccggcgugcugaccgagagcaacaagaaguuccugccguuccagcaguucgggcgcgacaucgccgacacgaccgacgcgguccgcgacccccagacccuggagauccucgacaucacccccugcagcuucggcgggguguccgugaucacgccgggcaccaacaccagcaaccaggucgccgugcuguaccagggcgugaacugcaccgagguccccguggccauccacgccgaccagcugacgcccaccuggcggguguacuccaccggcagcaacgucuuccagacccgcgccgggugccucaucggcgcggagcacgugaacaacuccuacgagugcgacauccccaucggggccggcaucugcgccagcuaccagacgcagaccaacuccccgcggcgcgcccggagcguggcgucccagagcaucaucgccuacaccaugucccugggcgccgagaacagcgucgccuacuccaacaacagcaucgccauccccaccaacuucacgaucuccgugaccaccgagauccugcccgugagcaugaccaagacgagcgucgacugcaccauguacaucugcggggacuccaccgagugcagcaaccuccugcugcaguacggcuccuucugcacccagcucaaccgcgcgcugacggggaucgccguggagcaggacaagaacacccaggagguguucgcccaggucaagcagaucuacaagacgcccccgaucaaggacuucggcggguucaacuucagccagauccugcccgaccccuccaagcccagcaagcgguccuucaucgaggaccuccuguucaacaaggugacccuggccgacgccggcuucaucaagcaguacggcgacugccucggggacaucgcggcccgcgaccugaucugcgcccagaaguucaacggccugaccgugcucccgccccugcugaccgacgagaugaucgcccaguacaccagcgcccuccuggcggggaccaucacguccggcuggaccuucggggccggcgccgcccugcagauccccuucgcgaugcagauggccuaccgguucaacggcaucggggucacccagaacgugcucuacgagaaccagaagcugaucgccaaccaguucaacagcgccaucggcaagauccaggacucccugagcuccaccgccagcgcgcucgggaagcugcaggacguggucaaccagaacgcccaggcccugaacacgcucgugaagcagcuguccagcaacuucggcgccaucuccagcgugcugaacgacauccucucccgccuggacaaggucgaggccgaggugcagaucgaccggcugaucaccgggcgccuccagagccugcagaccuacgugacccagcagcugauccgggcggccgagauccgcgccagcgccaaccucgccgcgaccaagauguccgagugcguccugggccagagcaagcggguggacuucugcggcaagggguaccaccugauguccuucccccagagcgccccgcacggcguggucuuccuccacgugacguacguccccgcccaggagaagaacuucaccaccgcccccgcgaucugccacgacgggaaggcccacuucccccgcgagggcguguucguguccaacgggacccacugguucgucacgcagcggaacuucuacgagccgcagaucaucaccaccgacaacaccuucgugagcggcaacugcgacguggucaucggcaucgugaacaacacgguguacgacccccugcagcccgagcuggacuccuucaaggaggagcucgacaaguacuucaagaaccacaccagccccgacgucgaccugggggacaucuccggcaucaacgccagcguggugaacauccagaaggagaucgaccgccugaacgaggucgccaagaaccucaacgagucccugaucgaccugcaggagcucgggaaguacgagcaguacaucaaguggccgugguacaucuggcugggcuucaucgccggccugaucgcgaucgugauggugaccaucaugcucugcugcaugaccagcugcugcuccugccugaaggggugcugcagcugcggcuccugcugcaaguucgacgaggacgacagcgagcccguccugaagggggugaagcuccacuacacgugaugacucgagcugguacugcaugcacgcaaugcuagcugccccuuucccguccuggguaccccgagucucccccgaccucgggucccagguaugcucccaccuccaccugccccacucaccaccucugcuaguuccagacaccucccaagcacgcagcaaugcagcucaaaacgcuuagccuagccacacccccacgggaaacagcagugauuaaccuuuagcaauaaacgaaaguuuaacuaagcuauacuaaccccaggguuggucaauuucgugccagccacacccuggagcuagcaaaaaaaaaaaaaaaaaaaaaaaaaaaaaaaaaaaaaaaaaaaaaaaaaaaaaaaaaaaaaaaaaaaaaaaaaaaaaaaaaaaaaaaaaaaaaaaaaaaa

SEQ ID NO: 26287 - RNA, 4273 nt, Artificial Sequence; identical to SEQ ID NO: 26269
  SARS-CoV-2/Wuhan/WIV05/2019__EPI_ISL_402128 spike protein mRNA gc (1-1273)

SEQ ID NO: 26288 - RNA, 4273 nt, Artificial Sequence
  SARS-CoV-2/Wuhan/WIV05/2019__EPI_ISL_402128 spike protein mRNA gc (1-1273)(D614G)
agaauaaacuaguauucuucugguccccacagacucagagagaacccgccaccauguucguguuccugguccuccugccccuggugagcucccagugcgugaaccucaccacccgcacgcagcugccgcccgccuacaccaacagcuucacccggggcgucuacuaccccgacaagguguuccgcuccagcgugcugcacuccacccaggaccucuuccugcccuucuucagcaacgucacgugguuccacgccauccacguguccgggaccaacggcaccaagcgguucgacaacccggugcugcccuucaacgacggggucuacuucgcgagcaccgagaaguccaacaucauccgcggcuggaucuucgggacgacccucgacagcaagacccagucccugcugaucgugaacaacgccaccaacguggucaucaaggugugcgaguuccaguucugcaacgaccccuuccucggcguguacuaccacaagaacaacaagagcuggauggaguccgaguuccgggucuacagcuccgccaacaacugcacguucgaguacgugagccagcccuuccugauggaccuggagggcaagcaggggaacuucaagaaccuccgcgaguucguguucaagaacaucgacggcuacuucaagaucuacuccaagcacaccccgaucaaccugguccgggaccugccccagggguucagcgcccucgagccccugguggaccugcccaucggcaucaacaucacccgcuuccagacccuccuggcccugcaccgguccuaccucacgccgggggacagcagcuccggcuggaccgcgggcgccgccgccuacuacgugggguaccugcagccccgcaccuuccugcucaaguacaacgagaacggcaccaucacggacgcggucgacugcgcccuggacccccugagcgagaccaagugcacccucaaguccuucaccguggagaaggggaucuaccagacgagcaacuuccgggugcagcccaccgaguccaucguccgcuucccgaacaucaccaaccugugccccuucggcgagguguucaacgccacccgguucgccagcgucuacgccuggaaccgcaagcggaucuccaacugcguggcggacuacagcgugcuguacaacuccgccagcuucuccacguucaagugcuacggcgucagccccaccaagcucaacgaccugugcuucaccaacguguacgccgacuccuucgugauccgcggggacgagguccggcagaucgcccccggccagaccgggaagaucgccgacuacaacuacaagcugccggacgacuucacgggcugcgugaucgcguggaacagcaacaaccucgacuccaaggucgggggcaacuacaacuaccuguaccgccuguuccgcaagagcaaccucaagcccuucgagcgggacaucuccaccgagaucuaccaggccggcagcacccccugcaacgggguggagggcuucaacugcuacuucccccugcaguccuacggguuccagccgaccaacggcgugggguaccagcccuaccggguggucgugcugagcuucgagcuccugcacgcccccgccacggugugcggccccaagaaguccaccaaccuggucaagaacaagugcgugaacuucaacuucaacggccucaccgggaccggcgugcugaccgagagcaacaagaaguuccugccguuccagcaguucgggcgcgacaucgccgacacgaccgacgcgguccgcgacccccagacccuggagauccucgacaucacccccugcagcuucggcgggguguccgugaucacgccgggcaccaacaccagcaaccaggucgccgugcuguaccagggcgugaacugcaccgagguccccguggccauccacgccgaccagcugacgcccaccuggcggguguacuccaccgggagcaacgucuuccagacccgcgccggcugccucaucggggcggagcacgugaacaacuccuacgagugcgacauccccaucggcgccggcaucugcgccagcuaccagacgcagaccaacuccccgcggcgcgcccggagcguggcgucccagagcaucaucgccuacaccaugucccugggggccgagaacagcgucgccuacuccaacaacagcaucgccauccccaccaacuucacgaucuccgugaccaccgagauccugcccgugagcaugaccaagacgagcgucgacugcaccauguacaucugcggcgacuccaccgagugcagcaaccuccugcugcaguacggguccuucugcacccagcucaaccgcgcgcugacgggcaucgccguggagcaggacaagaacacccaggagguguucgcccaggucaagcagaucuacaagacgcccccgaucaaggacuucgggggcuucaacuucagccagauccugcccgaccccuccaagcccagcaagcgguccuucaucgaggaccuccuguucaacaaggugacccuggccgacgccggcuucaucaagcaguacggggacugccucggcgacaucgcggcccgcgaccugaucugcgcccagaaguucaacgggcugaccgugcucccgccccugcugaccgacgagaugaucgcccaguacaccagcgcccuccuggcgggcaccaucacguccggguggaccuucggcgccggcgccgcccugcagauccccuucgcgaugcagauggccuaccgguucaacgggaucggcgucacccagaacgugcucuacgagaaccagaagcugaucgccaaccaguucaacagcgccaucgggaagauccaggacucccugagcuccaccgccagcgcgcucggcaagcugcaggacguggucaaccagaacgcccaggcccugaacacgcucgugaagcagcuguccagcaacuucggggccaucuccagcgugcugaacgacauccucucccgccuggacaaggucgaggccgaggugcagaucgaccggcugaucaccggccgccuccagagccugcagaccuacgugacccagcagcugauccgggcggccgagauccgcgccagcgccaaccucgccgcgaccaagauguccgagugcguccugggccagagcaagcggguggacuucugcgggaagggcuaccaccugauguccuucccccagagcgccccgcacgggguggucuuccuccacgugacguacguccccgcccaggagaagaacuucaccaccgcccccgcgaucugccacgacggcaaggcccacuucccccgcgaggggguguucguguccaacggcacccacugguucgucacgcagcggaacuucuacgagccgcagaucaucaccaccgacaacaccuucgugagcggcaacugcgacguggucaucgggaucgugaacaacacgguguacgacccccugcagcccgagcuggacuccuucaaggaggagcucgacaaguacuucaagaaccacaccagccccgacgucgaccugggcgacaucuccgggaucaacgccagcguggugaacauccagaaggagaucgaccgccugaacgaggucgccaagaaccucaacgagucccugaucgaccugcaggagcucggcaaguacgagcaguacaucaaguggccgugguacaucuggcugggcuucaucgccgggcugaucgcgaucgugauggugaccaucaugcucugcugcaugaccagcugcugcuccugccugaagggcugcugcagcugcggguccugcugcaaguucgacgaggacgacagcgagcccguccugaagggcgugaagcuccacuacacgugaugacucgagcugguacugcaugcacgcaaugcuagcugccccuuucccguccuggguaccccgagucucccccgaccucgggucccagguaugcucccaccuccaccugccccacucaccaccucugcuaguuccagacaccucccaagcacgcagcaaugcagcucaaaacgcuuagccuagccacacccccacgggaaacagcagugauuaaccuuuagcaauaaacgaaaguuuaacuaagcuauacuaaccccaggguuggucaauuucgugccagccacacccuggagcuagcaaaaaaaaaaaaaaaaaaaaaaaaaaaaaaaaaaaaaaaaaaaaaaaaaaaaaaaaaaaaaaaaaaaaaaaaaaaaaaaaaaaaaaaaaaaaaaaaaaaa

SEQ ID NO: 26289 - RNA, 4273 nt, Artificial Sequence
  SARS-CoV-2/Wuhan/WIV05/2019__EPI_ISL_402128 spike protein mRNA gc (1-1273)(A222V_D614G)
agaauaaacuaguauucuucugguccccacagacucagagagaacccgccaccauguucguguuccugguccuccugccccuggugagcucccagugcgugaaccucaccacccgcacgcagcugccgcccgccuacaccaacagcuucacccggggcgucuacuaccccgacaagguguuccgcuccagcgugcugcacuccacccaggaccucuuccugcccuucuucagcaacgucacgugguuccacgccauccacguguccgggaccaacggcaccaagcgguucgacaacccggugcugcccuucaacgacggggucuacuucgcgagcaccgagaaguccaacaucauccgcggcuggaucuucgggacgacccucgacagcaagacccagucccugcugaucgugaacaacgccaccaacguggucaucaaggugugcgaguuccaguucugcaacgaccccuuccucggcguguacuaccacaagaacaacaagagcuggauggaguccgaguuccgggucuacagcuccgccaacaacugcacguucgaguacgugagccagcccuuccugauggaccuggagggcaagcaggggaacuucaagaaccuccgcgaguucguguucaagaacaucgacggcuacuucaagaucuacuccaagcacaccccgaucaaccugguccgggaccugccccagggguucagcgugcucgagccccugguggaccugcccaucggcaucaacaucacccgcuuccagacccuccuggcccugcaccgguccuaccucacgccgggggacagcagcuccggcuggaccgccggcgcggccgccuacuacgucggguaccugcagccccgcaccuuccugcucaaguacaacgagaacggcaccaucacggacgccguggacugcgcgcuggacccccugagcgagaccaagugcacccucaaguccuucaccguggagaaggggaucuaccagacgagcaacuuccggguccagcccaccgaguccaucgugcgcuucccgaacaucaccaaccugugccccuucggcgaggucuucaacgccacccgguucgccagcguguacgccuggaaccgcaagcggaucuccaacugcguggccgacuacagcguccuguacaacuccgcgagcuucuccacguucaagugcuacggcgugagccccaccaagcucaacgaccugugcuucaccaacguguacgccgacuccuucgucauccgcggggacgaggugcggcagaucgcccccggccagaccgggaagaucgccgacuacaacuacaagcugccggacgacuucacgggcugcgugaucgccuggaacagcaacaaccucgacuccaaggucgggggcaacuacaacuaccuguaccgccuguuccgcaagagcaaccucaagcccuucgagcgggacaucuccaccgagaucuaccaggcgggcagcacccccugcaacgggguggagggcuucaacugcuacuucccccugcaguccuacggguuccagccgaccaacggcgugggguaccagcccuaccgggucguggugcugagcuucgagcuccugcacgcccccgccacggucugcggccccaagaaguccaccaaccuggugaagaacaagugcgugaacuucaacuucaacggccucaccgggaccggcguccugaccgagagcaacaagaaguuccugccguuccagcaguucgggcgcgacaucgccgacacgaccgacgccgugcgcgacccccagacccuggagauccucgacaucacccccugcagcuucggcgggguguccgucaucacgccgggcaccaacaccagcaaccagguggcggugcuguaccagggcgucaacugcaccgaggugcccguggccauccacgccgaccagcugacgcccaccuggcgggucuacuccaccgggagcaacguguuccagacccgcgccggcugccucaucggggccgagcacgugaacaacuccuacgagugcgacauccccaucggcgcgggcaucugcgccagcuaccagacgcagaccaacuccccgcggcgcgcccggagcgucgccucccagagcaucaucgcguacaccaugucccugggggccgagaacagcguggccuacuccaacaacagcaucgccauccccaccaacuucacgaucuccgugaccaccgagauccugcccgucagcaugaccaagacgagcguggacugcaccauguacaucugcggcgacuccaccgagugcagcaaccuccugcugcaguacggguccuucugcacccagcucaaccgcgcccugacgggcaucgcgguggagcaggacaagaacacccaggaggucuucgcccaggugaagcagaucuacaagacgcccccgaucaaggacuucgggggcuucaacuucagccagauccugcccgaccccuccaagcccagcaagcgguccuucaucgaggaccuccuguucaacaaggugacccuggccgacgccggcuucaucaagcaguacggggacugccucggcgacaucgccgcgcgcgaccugaucugcgcccagaaguucaacgggcugaccguccucccgccccugcugaccgacgagaugaucgcccaguacaccagcgcccuccuggccggcaccaucacguccggguggaccuucggcgcgggcgccgcccugcagauccccuucgccaugcagauggcguaccgguucaacgggaucggcgugacccagaacgugcucuacgagaaccagaagcugaucgccaaccaguucaacagcgccaucgggaagauccaggacucccugagcuccaccgccagcgcccucggcaagcugcaggacgucgugaaccagaacgcgcaggcccugaacacgcucgugaagcagcuguccagcaacuucggggccaucuccagcguccugaacgacauccucucccgccuggacaagguggaggccgaggugcagaucgaccggcugaucaccggccgccuccagagccugcagaccuacgucacccagcagcugauccgggccgcggagauccgcgccagcgccaaccucgccgccaccaagauguccgagugcgugcugggccagagcaagcggguggacuucugcgggaagggcuaccaccugauguccuucccccagagcgcgccgcacggggucguguuccuccacgucacguacgugcccgcccaggagaagaacuucaccaccgcccccgccaucugccacgacggcaaggcgcacuucccccgcgaggggguguucgucuccaacggcacccacugguucgugacgcagcggaacuucuacgagccgcagaucaucaccaccgacaacaccuucgugagcggcaacugcgacgucgugaucgggaucgugaacaacacggucuacgacccccugcagcccgagcuggacuccuucaaggaggagcucgacaaguacuucaagaaccacaccagccccgacguggaccugggcgacaucuccgggaucaacgccagcguggucaacauccagaaggagaucgaccgccugaacgagguggccaagaaccucaacgagucccugaucgaccugcaggagcucggcaaguacgagcaguacaucaaguggccgugguacaucuggcugggcuucaucgccgggcugaucgccaucgugauggucaccaucaugcucugcugcaugaccagcugcugcuccugccugaagggcugcugcagcugcggguccugcugcaaguucgacgaggacgacagcgagcccgugcugaagggcgugaagcuccacuacacgugaugacucgagcugguacugcaugcacgcaaugcuagcugccccuuucccguccuggguaccccgagucucccccgaccucgggucccagguaugcucccaccuccaccugccccacucaccaccucugcuaguuccagacaccucccaagcacgcagcaaugcagcucaaaacgcuuagccuagccacacccccacgggaaacagcagugauuaaccuuuagcaauaaacgaaaguuuaacuaagcuauacuaaccccaggguuggucaauuucgugccagccacacccuggagcuagcaaaaaaaaaaaaaaaaaaaaaaaaaaaaaaaaaaaaaaaaaaaaaaaaaaaaaaaaaaaaaaaaaaaaaaaaaaaaaaaaaaaaaaaaaaaaaaaaaaaa

SEQ ID NO: 26290 - RNA, 4273 nt, Artificial Sequence
  SARS-CoV-2/Wuhan/WIV05/2019__EPI_ISL_402128 spike protein mRNA gc (1-1273)(N439K_D614G)
agaauaaacuaguauucuucugguccccacagacucagagagaacccgccaccauguucguguuccugguccuccugccccuggugagcucccagugcgugaaccucaccacccgcacgcagcugccgcccgccuacaccaacagcuucacccggggcgucuacuaccccgacaagguguuccgcuccagcgugcugcacuccacccaggaccucuuccugcccuucuucagcaacgucacgugguuccacgccauccacguguccgggaccaacggcaccaagcgguucgacaacccggugcugcccuucaacgacggggucuacuucgcgagcaccgagaaguccaacaucauccgcggcuggaucuucgggacgacccucgacagcaagacccagucccugcugaucgugaacaacgccaccaacguggucaucaaggugugcgaguuccaguucugcaacgaccccuuccucggcguguacuaccacaagaacaacaagagcuggauggaguccgaguuccgggucuacagcuccgccaacaacugcacguucgaguacgugagccagcccuuccugauggaccuggagggcaagcaggggaacuucaagaaccuccgcgaguucguguucaagaacaucgacggcuacuucaagaucuacuccaagcacaccccgaucaaccugguccgggaccugccccagggguucagcgcccucgagccccugguggaccugcccaucggcaucaacaucacccgcuuccagacccuccuggcccugcaccgguccuaccucacgccgggggacagcagcuccggcuggaccgcgggcgccgccgccuacuacgugggguaccugcagccccgcaccuuccugcucaaguacaacgagaacggcaccaucacggacgcggucgacugcgcccuggacccccugagcgagaccaagugcacccucaaguccuucaccguggagaaggggaucuaccagacgagcaacuuccgggugcagcccaccgaguccaucguccgcuucccgaacaucaccaaccugugccccuucggcgagguguucaacgccacccgguucgccagcgucuacgccuggaaccgcaagcggaucuccaacugcguggcggacuacagcgugcuguacaacuccgccagcuucuccacguucaagugcuacggcgucagccccaccaagcucaacgaccugugcuucaccaacguguacgccgacuccuucgugauccgcggggacgagguccggcagaucgcccccggccagaccgggaagaucgccgacuacaacuacaagcugccggacgacuucacgggcugcgugaucgcguggaacagcaagaaccucgacuccaaggucgggggcaacuacaacuaccuguaccgccuguuccgcaagagcaaccucaagcccuucgagcgggacaucuccaccgagaucuaccaggccggcagcacccccugcaacgggguggagggcuucaacugcuacuucccccugcaguccuacggguuccagccgaccaacggcgugggguaccagcccuaccggguggucgugcugagcuucgagcuccugcacgcccccgccacggugugcggccccaagaaguccaccaaccuggucaagaacaagugcgugaacuucaacuucaacggccucaccgggaccggcgugcugaccgagagcaacaagaaguuccugccguuccagcaguucgggcgcgacaucgccgacacgaccgacgcgguccgcgacccccagacccuggagauccucgacaucacccccugcagcuucggcgggguguccgugaucacgccgggcaccaacaccagcaaccaggucgccgugcuguaccagggcgugaacugcaccgagguccccguggccauccacgccgaccagcugacgcccaccuggcggguguacuccaccgggagcaacgucuuccagacccgcgccggcugccucaucggggcggagcacgugaacaacuccuacgagugcgacauccccaucggcgccggcaucugcgccagcuaccagacgcagaccaacuccccgcggcgcgcccggagcguggcgucccagagcaucaucgccuacaccaugucccugggggccgagaacagcgucgccuacuccaacaacagcaucgccauccccaccaacuucacgaucuccgugaccaccgagauccugcccgugagcaugaccaagacgagcgucgacugcaccauguacaucugcggcgacuccaccgagugcagcaaccuccugcugcaguacggguccuucugcacccagcucaaccgcgcgcugacgggcaucgccguggagcaggacaagaacacccaggagguguucgcccaggucaagcagaucuacaagacgcccccgaucaaggacuucgggggcuucaacuucagccagauccugcccgaccccuccaagcccagcaagcgguccuucaucgaggaccuccuguucaacaaggugacccuggccgacgccggcuucaucaagcaguacggggacugccucggcgacaucgcggcccgcgaccugaucugcgcccagaaguucaacgggcugaccgugcucccgccccugcugaccgacgagaugaucgcccaguacaccagcgcccuccuggcgggcaccaucacguccggguggaccuucggcgccggcgccgcccugcagauccccuucgcgaugcagauggccuaccgguucaacgggaucggcgucacccagaacgugcucuacgagaaccagaagcugaucgccaaccaguucaacagcgccaucgggaagauccaggacucccugagcuccaccgccagcgcgcucggcaagcugcaggacguggucaaccagaacgcccaggcccugaacacgcucgugaagcagcuguccagcaacuucggggccaucuccagcgugcugaacgacauccucucccgccuggacaaggucgaggccgaggugcagaucgaccggcugaucaccggccgccuccagagccugcagaccuacgugacccagcagcugauccgggcggccgagauccgcgccagcgccaaccucgccgcgaccaagauguccgagugcguccugggccagagcaagcggguggacuucugcgggaagggcuaccaccugauguccuucccccagagcgccccgcacgggguggucuuccuccacgugacguacguccccgcccaggagaagaacuucaccaccgcccccgcgaucugccacgacggcaaggcccacuucccccgcgaggggguguucguguccaacggcacccacugguucgucacgcagcggaacuucuacgagccgcagaucaucaccaccgacaacaccuucgugagcggcaacugcgacguggucaucgggaucgugaacaacacgguguacgacccccugcagcccgagcuggacuccuucaaggaggagcucgacaaguacuucaagaaccacaccagccccgacgucgaccugggcgacaucuccgggaucaacgccagcguggugaacauccagaaggagaucgaccgccugaacgaggucgccaagaaccucaacgagucccugaucgaccugcaggagcucggcaaguacgagcaguacaucaaguggccgugguacaucuggcugggcuucaucgccgggcugaucgcgaucgugauggugaccaucaugcucugcugcaugaccagcugcugcuccugccugaagggcugcugcagcugcggguccugcugcaaguucgacgaggacgacagcgagcccguccugaagggcgugaagcuccacuacacgugaugacucgagcugguacugcaugcacgcaaugcuagcugccccuuucccguccuggguaccccgagucucccccgaccucgggucccagguaugcucccaccuccaccugccccacucaccaccucugcuaguuccagacaccucccaagcacgcagcaaugcagcucaaaacgcuuagccuagccacacccccacgggaaacagcagugauuaaccuuuagcaauaaacgaaaguuuaacuaagcuauacuaaccccaggguuggucaauuucgugccagccacacccuggagcuagcaaaaaaaaaaaaaaaaaaaaaaaaaaaaaaaaaaaaaaaaaaaaaaaaaaaaaaaaaaaaaaaaaaaaaaaaaaaaaaaaaaaaaaaaaaaaaaaaaaaa

SEQ ID NO: 26291 - RNA, 4273 nt, Artificial Sequence
  SARS-CoV-2/Wuhan/WIV05/2019__EPI_ISL_402128 spike protein mRNA gc (1-1273)(S477N_D614G)
agaauaaacuaguauucuucugguccccacagacucagagagaacccgccaccauguucguguuccugguccuccugccccuggugagcucccagugcgugaaccucaccacccgcacgcagcugccgcccgccuacaccaacagcuucacccggggcgucuacuaccccgacaagguguuccgcuccagcgugcugcacuccacccaggaccucuuccugcccuucuucagcaacgucacgugguuccacgccauccacguguccgggaccaacggcaccaagcgguucgacaacccggugcugcccuucaacgacggggucuacuucgcgagcaccgagaaguccaacaucauccgcggcuggaucuucgggacgacccucgacagcaagacccagucccugcugaucgugaacaacgccaccaacguggucaucaaggugugcgaguuccaguucugcaacgaccccuuccucggcguguacuaccacaagaacaacaagagcuggauggaguccgaguuccgggucuacagcuccgccaacaacugcacguucgaguacgugagccagcccuuccugauggaccuggagggcaagcaggggaacuucaagaaccuccgcgaguucguguucaagaacaucgacggcuacuucaagaucuacuccaagcacaccccgaucaaccugguccgggaccugccccagggguucagcgcccucgagccccugguggaccugcccaucggcaucaacaucacccgcuuccagacccuccuggcccugcaccgguccuaccucacgccgggggacagcagcuccggcuggaccgcgggcgccgccgccuacuacgugggguaccugcagccccgcaccuuccugcucaaguacaacgagaacggcaccaucacggacgcggucgacugcgcccuggacccccugagcgagaccaagugcacccucaaguccuucaccguggagaaggggaucuaccagacgagcaacuuccgggugcagcccaccgaguccaucguccgcuucccgaacaucaccaaccugugccccuucggcgagguguucaacgccacccgguucgccagcgucuacgccuggaaccgcaagcggaucuccaacugcguggcggacuacagcgugcuguacaacuccgccagcuucuccacguucaagugcuacggcgucagccccaccaagcucaacgaccugugcuucaccaacguguacgccgacuccuucgugauccgcggggacgagguccggcagaucgcccccggccagaccgggaagaucgccgacuacaacuacaagcugccggacgacuucacgggcugcgugaucgcguggaacagcaacaaccucgacuccaaggucgggggcaacuacaacuaccuguaccgccuguuccgcaagagcaaccucaagcccuucgagcgggacaucuccaccgagaucuaccaggccggcaacacccccugcaacgggguggagggcuucaacugcuacuucccccugcagagcuacggguuccagccgaccaacggcgugggguaccagcccuaccggguggucgugcuguccuucgagcuccugcacgcccccgccacggugugcggccccaagaaguccaccaaccuggucaagaacaagugcgugaacuucaacuucaacggccucaccgggaccggcgugcugaccgagagcaacaagaaguuccugccguuccagcaguucgggcgcgacaucgccgacacgaccgacgcgguccgcgacccccagacccuggagauccucgacaucacccccugcagcuucggcggggugagcgugaucacgccgggcaccaacaccuccaaccaggucgccgugcuguaccagggcgugaacugcaccgagguccccguggccauccacgccgaccagcugacgcccaccuggcggguguacagcaccggguccaacgucuuccagacccgcgccggcugccucaucggggcggagcacgugaacaacagcuacgagugcgacauccccaucggcgccggcaucugcgccuccuaccagacgcagaccaacagcccgcggcgcgcccgguccguggcgagccaguccaucaucgccuacaccaugagccugggggccgagaacuccgucgccuacagcaacaacuccaucgccauccccaccaacuucacgaucagcgugaccaccgagauccugcccguguccaugaccaagacgagcgucgacugcaccauguacaucugcggcgacagcaccgagugcuccaaccuccugcugcaguacgggagcuucugcacccagcucaaccgcgcgcugacgggcaucgccguggagcaggacaagaacacccaggagguguucgcccaggucaagcagaucuacaagacgcccccgaucaaggacuucgggggcuucaacuucucccagauccugcccgaccccagcaagcccuccaagcggagcuucaucgaggaccuccuguucaacaaggugacccuggccgacgccggcuucaucaagcaguacggggacugccucggcgacaucgcggcccgcgaccugaucugcgcccagaaguucaacgggcugaccgugcucccgccccugcugaccgacgagaugaucgcccaguacaccuccgcccuccuggcgggcaccaucacgagcggguggaccuucggcgccggcgccgcccugcagauccccuucgcgaugcagauggccuaccgguucaacgggaucggcgucacccagaacgugcucuacgagaaccagaagcugaucgccaaccaguucaacuccgccaucgggaagauccaggacagccuguccagcaccgccuccgcgcucggcaagcugcaggacguggucaaccagaacgcccaggcccugaacacgcucgugaagcagcugagcuccaacuucggggccaucagcuccgugcugaacgacauccucagccgccuggacaaggucgaggccgaggugcagaucgaccggcugaucaccggccgccuccagucccugcagaccuacgugacccagcagcugauccgggcggccgagauccgcgccagcgccaaccucgccgcgaccaagaugagcgagugcguccugggccaguccaagcggguggacuucugcgggaagggcuaccaccugaugagcuucccccaguccgccccgcacgggguggucuuccuccacgugacguacguccccgcccaggagaagaacuucaccaccgcccccgcgaucugccacgacggcaaggcccacuucccccgcgaggggguguucgugagcaacggcacccacugguucgucacgcagcggaacuucuacgagccgcagaucaucaccaccgacaacaccuucguguccggcaacugcgacguggucaucgggaucgugaacaacacgguguacgacccccugcagcccgagcuggacagcuucaaggaggagcucgacaaguacuucaagaaccacaccucccccgacgucgaccugggcgacaucagcgggaucaacgccuccguggugaacauccagaaggagaucgaccgccugaacgaggucgccaagaaccucaacgagagccugaucgaccugcaggagcucggcaaguacgagcaguacaucaaguggccgugguacaucuggcugggcuucaucgccgggcugaucgcgaucgugauggugaccaucaugcucugcugcaugaccuccugcugcagcugccugaagggcugcugcuccugcgggagcugcugcaaguucgacgaggacgacuccgagcccguccugaagggcgugaagcuccacuacacgugaugacucgagcugguacugcaugcacgcaaugcuagcugccccuuucccguccuggguaccccgagucucccccgaccucgggucccagguaugcucccaccuccaccugccccacucaccaccucugcuaguuccagacaccucccaagcacgcagcaaugcagcucaaaacgcuuagccuagccacacccccacgggaaacagcagugauuaaccuuuagcaauaaacgaaaguuuaacuaagcuauacuaaccccaggguuggucaauuucgugccagccacacccuggagcuagcaaaaaaaaaaaaaaaaaaaaaaaaaaaaaaaaaaaaaaaaaaaaaaaaaaaaaaaaaaaaaaaaaaaaaaaaaaaaaaaaaaaaaaaaaaaaaaaaaaaa

SEQ ID NO: 26292 - RNA, 4273 nt, Artificial Sequence
  SARS-CoV-2/Wuhan/WIV05/2019__EPI_ISL_402128 spike protein mRNA gc (1-1273)(N501Y_D614G)
agaauaaacuaguauucuucugguccccacagacucagagagaacccgccaccauguucguguuccugguccuccugccccuggugagcucccagugcgugaaccucaccacccgcacgcagcugccgcccgccuacaccaacagcuucacccggggcgucuacuaccccgacaagguguuccgcuccagcgugcugcacuccacccaggaccucuuccugcccuucuucagcaacgucacgugguuccacgccauccacguguccgggaccaacggcaccaagcgguucgacaacccggugcugcccuucaacgacggggucuacuucgcgagcaccgagaaguccaacaucauccgcggcuggaucuucgggacgacccucgacagcaagacccagucccugcugaucgugaacaacgccaccaacguggucaucaaggugugcgaguuccaguucugcaacgaccccuuccucggcguguacuaccacaagaacaacaagagcuggauggaguccgaguuccgggucuacagcuccgccaacaacugcacguucgaguacgugagccagcccuuccugauggaccuggagggcaagcaggggaacuucaagaaccuccgcgaguucguguucaagaacaucgacggcuacuucaagaucuacuccaagcacaccccgaucaaccugguccgggaccugccccagggguucagcgcccucgagccccugguggaccugcccaucggcaucaacaucacccgcuuccagacccuccuggcccugcaccgguccuaccucacgccgggggacagcagcuccggcuggaccgcgggcgccgccgccuacuacgugggguaccugcagccccgcaccuuccugcucaaguacaacgagaacggcaccaucacggacgcggucgacugcgcccuggacccccugagcgagaccaagugcacccucaaguccuucaccguggagaaggggaucuaccagacgagcaacuuccgggugcagcccaccgaguccaucguccgcuucccgaacaucaccaaccugugccccuucggcgagguguucaacgccacccgguucgccagcgucuacgccuggaaccgcaagcggaucuccaacugcguggcggacuacagcgugcuguacaacuccgccagcuucuccacguucaagugcuacggcgucagccccaccaagcucaacgaccugugcuucaccaacguguacgccgacuccuucgugauccgcggggacgagguccggcagaucgcccccggccagaccgggaagaucgccgacuacaacuacaagcugccggacgacuucacgggcugcgugaucgcguggaacagcaacaaccucgacuccaaggucgggggcaacuacaacuaccuguaccgccuguuccgcaagagcaaccucaagcccuucgagcgggacaucuccaccgagaucuaccaggccggcagcacccccugcaacgggguggagggcuucaacugcuacuucccccugcaguccuacggguuccagccgaccuacggcgugggguaccagcccuaccggguggucgugcugagcuucgagcuccugcacgcccccgccacggugugcggccccaagaaguccaccaaccuggucaagaacaagugcgugaacuucaacuucaacggccucaccgggaccggcgugcugaccgagagcaacaagaaguuccugccguuccagcaguucgggcgcgacaucgccgacacgaccgacgcgguccgcgacccccagacccuggagauccucgacaucacccccugcagcuucggcgggguguccgugaucacgccgggcaccaacaccagcaaccaggucgccgugcuguaccagggcgugaacugcaccgagguccccguggccauccacgccgaccagcugacgcccaccuggcggguguacuccaccgggagcaacgucuuccagacccgcgccggcugccucaucggggcggagcacgugaacaacuccuacgagugcgacauccccaucggcgccggcaucugcgccagcuaccagacgcagaccaacuccccgcggcgcgcccggagcguggcgucccagagcaucaucgccuacaccaugucccugggggccgagaacagcgucgccuacuccaacaacagcaucgccauccccaccaacuucacgaucuccgugaccaccgagauccugcccgugagcaugaccaagacgagcgucgacugcaccauguacaucugcggcgacuccaccgagugcagcaaccuccugcugcaguacggguccuucugcacccagcucaaccgcgcgcugacgggcaucgccguggagcaggacaagaacacccaggagguguucgcccaggucaagcagaucuacaagacgcccccgaucaaggacuucgggggcuucaacuucagccagauccugcccgaccccuccaagcccagcaagcgguccuucaucgaggaccuccuguucaacaaggugacccuggccgacgccggcuucaucaagcaguacggggacugccucggcgacaucgcggcccgcgaccugaucugcgcccagaaguucaacgggcugaccgugcucccgccccugcugaccgacgagaugaucgcccaguacaccagcgcccuccuggcgggcaccaucacguccggguggaccuucggcgccggcgccgcccugcagauccccuucgcgaugcagauggccuaccgguucaacgggaucggcgucacccagaacgugcucuacgagaaccagaagcugaucgccaaccaguucaacagcgccaucgggaagauccaggacucccugagcuccaccgccagcgcgcucggcaagcugcaggacguggucaaccagaacgcccaggcccugaacacgcucgugaagcagcuguccagcaacuucggggccaucuccagcgugcugaacgacauccucucccgccuggacaaggucgaggccgaggugcagaucgaccggcugaucaccggccgccuccagagccugcagaccuacgugacccagcagcugauccgggcggccgagauccgcgccagcgccaaccucgccgcgaccaagauguccgagugcguccugggccagagcaagcggguggacuucugcgggaagggcuaccaccugauguccuucccccagagcgccccgcacgggguggucuuccuccacgugacguacguccccgcccaggagaagaacuucaccaccgcccccgcgaucugccacgacggcaaggcccacuucccccgcgaggggguguucguguccaacggcacccacugguucgucacgcagcggaacuucuacgagccgcagaucaucaccaccgacaacaccuucgugagcggcaacugcgacguggucaucgggaucgugaacaacacgguguacgacccccugcagcccgagcuggacuccuucaaggaggagcucgacaaguacuucaagaaccacaccagccccgacgucgaccugggcgacaucuccgggaucaacgccagcguggugaacauccagaaggagaucgaccgccugaacgaggucgccaagaaccucaacgagucccugaucgaccugcaggagcucggcaaguacgagcaguacaucaaguggccgugguacaucuggcugggcuucaucgccgggcugaucgcgaucgugauggugaccaucaugcucugcugcaugaccagcugcugcuccugccugaagggcugcugcagcugcggguccugcugcaaguucgacgaggacgacagcgagcccguccugaagggcgugaagcuccacuacacgugaugacucgagcugguacugcaugcacgcaaugcuagcugccccuuucccguccuggguaccccgagucucccccgaccucgggucccagguaugcucccaccuccaccugccccacucaccaccucugcuaguuccagacaccucccaagcacgcagcaaugcagcucaaaacgcuuagccuagccacacccccacgggaaacagcagugauuaaccuuuagcaauaaacgaaaguuuaacuaagcuauacuaaccccaggguuggucaauuucgugccagccacacccuggagcuagcaaaaaaaaaaaaaaaaaaaaaaaaaaaaaaaaaaaaaaaaaaaaaaaaaaaaaaaaaaaaaaaaaaaaaaaaaaaaaaaaaaaaaaaaaaaaaaaaaaaa

SEQ ID NO: 26293 - RNA, 4267 nt, Artificial Sequence
  SARS-CoV-2/Wuhan/WIV05/2019__EPI_ISL_402128 spike protein mRNA gc (1-1273)(H69del_V70del_D614G)
agaauaaacuaguauucuucugguccccacagacucagagagaacccgccaccauguucguguuccugguccuccugccccuggugagcucccagugcgugaaccucaccacccgcacgcagcugccgcccgccuacaccaacagcuucacccggggcgucuacuaccccgacaagguguuccgcuccagcgugcugcacuccacccaggaccucuuccugcccuucuucagcaacgucacgugguuccacgccaucuccgggaccaacggcaccaagcgguucgacaacccggugcugcccuucaacgacgggguguacuucgcgagcaccgagaaguccaacaucauccgcggcuggaucuucgggacgacccucgacagcaagacccagucccugcugaucgucaacaacgccaccaacguggugaucaaggucugcgaguuccaguucugcaacgaccccuuccucggcguguacuaccacaagaacaacaagagcuggauggaguccgaguuccggguguacagcuccgccaacaacugcacguucgaguacgucagccagcccuuccugauggaccuggagggcaagcaggggaacuucaagaaccuccgcgaguucguguucaagaacaucgacggcuacuucaagaucuacuccaagcacaccccgaucaaccuggugcgggaccugccccagggguucagcgcccucgagccccuggucgaccugcccaucggcaucaacaucacccgcuuccagacccuccuggcccugcaccgguccuaccucacgccgggggacagcagcuccggcuggaccgcgggcgccgccgccuacuacgugggguaccugcagccccgcaccuuccugcucaaguacaacgagaacggcaccaucacggacgcgguggacugcgcccuggacccccugagcgagaccaagugcacccucaaguccuucaccgucgagaaggggaucuaccagacgagcaacuuccgggugcagcccaccgaguccaucgugcgcuucccgaacaucaccaaccugugccccuucggcgaggucuucaacgccacccgguucgccagcguguacgccuggaaccgcaagcggaucuccaacugcgucgcggacuacagcgugcuguacaacuccgccagcuucuccacguucaagugcuacggcgugagccccaccaagcucaacgaccugugcuucaccaacgucuacgccgacuccuucgugauccgcggggacgaggugcggcagaucgcccccggccagaccgggaagaucgccgacuacaacuacaagcugccggacgacuucacgggcugcgucaucgcguggaacagcaacaaccucgacuccaaggucgggggcaacuacaacuaccuguaccgccuguuccgcaagagcaaccucaagcccuucgagcgggacaucuccaccgagaucuaccaggccggcagcacccccugcaacgggguggagggcuucaacugcuacuucccccugcaguccuacggguuccagccgaccaacggcgugggguaccagcccuaccggguggugguccugagcuucgagcuccugcacgcccccgccacggugugcggccccaagaaguccaccaaccuggugaagaacaagugcgucaacuucaacuucaacggccucaccgggaccggcgugcugaccgagagcaacaagaaguuccugccguuccagcaguucgggcgcgacaucgccgacacgaccgacgcggugcgcgacccccagacccuggagauccucgacaucacccccugcagcuucggcggggucuccgugaucacgccgggcaccaacaccagcaaccagguggccguccuguaccagggcgugaacugcaccgaggugcccgucgccauccacgccgaccagcugacgcccaccuggcggguguacuccaccgggagcaacguguuccagacccgcgccggcugccucaucggggcggagcacgucaacaacuccuacgagugcgacauccccaucggcgccggcaucugcgccagcuaccagacgcagaccaacuccccgcggcgcgcccggagcguggcgucccagagcaucaucgccuacaccaugucccugggggccgagaacagcguggccuacuccaacaacagcaucgccauccccaccaacuucacgaucuccgucaccaccgagauccugcccgugagcaugaccaagacgagcguggacugcaccauguacaucugcggcgacuccaccgagugcagcaaccuccugcugcaguacggguccuucugcacccagcucaaccgcgcgcugacgggcaucgccgucgagcaggacaagaacacccaggagguguucgcccaggugaagcagaucuacaagacgcccccgaucaaggacuucgggggcuucaacuucagccagauccugcccgaccccuccaagcccagcaagcgguccuucaucgaggaccuccuguucaacaaggucacccuggccgacgccggcuucaucaagcaguacggggacugccucggcgacaucgcggcccgcgaccugaucugcgcccagaaguucaacgggcugaccgugcucccgccccugcugaccgacgagaugaucgcccaguacaccagcgcccuccuggcgggcaccaucacguccggguggaccuucggcgccggcgccgcccugcagauccccuucgcgaugcagauggccuaccgguucaacgggaucggcgugacccagaacguccucuacgagaaccagaagcugaucgccaaccaguucaacagcgccaucgggaagauccaggacucccugagcuccaccgccagcgcgcucggcaagcugcaggacguggugaaccagaacgcccaggcccugaacacgcucgucaagcagcuguccagcaacuucggggccaucuccagcgugcugaacgacauccucucccgccuggacaagguggaggccgagguccagaucgaccggcugaucaccggccgccuccagagccugcagaccuacgugacccagcagcugauccgggcggccgagauccgcgccagcgccaaccucgccgcgaccaagauguccgagugcgugcugggccagagcaagcgggucgacuucugcgggaagggcuaccaccugauguccuucccccagagcgccccgcacggggugguguuccuccacgucacguacgugcccgcccaggagaagaacuucaccaccgcccccgcgaucugccacgacggcaaggcccacuucccccgcgagggggucuucguguccaacggcacccacugguucgugacgcagcggaacuucuacgagccgcagaucaucaccaccgacaacaccuucgucagcggcaacugcgacguggugaucgggaucgucaacaacacgguguacgacccccugcagcccgagcuggacuccuucaaggaggagcucgacaaguacuucaagaaccacaccagccccgacguggaccugggcgacaucuccgggaucaacgccagcgucgugaacauccagaaggagaucgaccgccugaacgagguggccaagaaccucaacgagucccugaucgaccugcaggagcucggcaaguacgagcaguacaucaaguggccgugguacaucuggcugggcuucaucgccgggcugaucgcgaucgucauggugaccaucaugcucugcugcaugaccagcugcugcuccugccugaagggcugcugcagcugcggguccugcugcaaguucgacgaggacgacagcgagcccgugcugaagggcgucaagcuccacuacacgugaugacucgagcugguacugcaugcacgcaaugcuagcugccccuuucccguccuggguaccccgagucucccccgaccucgggucccagguaugcucccaccuccaccugccccacucaccaccucugcuaguuccagacaccucccaagcacgcagcaaugcagcucaaaacgcuuagccuagccacacccccacgggaaacagcagugauuaaccuuuagcaauaaacgaaaguuuaacuaagcuauacuaaccccaggguuggucaauuucgugccagccacacccuggagcuagcaaaaaaaaaaaaaaaaaaaaaaaaaaaaaaaaaaaaaaaaaaaaaaaaaaaaaaaaaaaaaaaaaaaaaaaaaaaaaaaaaaaaaaaaaaaaaaaaaaaa

SEQ ID NO: 26294 - RNA, 4273 nt, Artificial Sequence
  SARS-CoV-2/Wuhan/WIV05/2019__EPI_ISL_402128 spike protein mRNA gc (1-1273)(Y453F_D614G)
agaauaaacuaguauucuucugguccccacagacucagagagaacccgccaccauguucguguuccugguccuccugccccuggugagcucccagugcgugaaccucaccacccgcacgcagcugccgcccgccuacaccaacagcuucacccggggcgucuacuaccccgacaagguguuccgcuccagcgugcugcacuccacccaggaccucuuccugcccuucuucagcaacgucacgugguuccacgccauccacguguccgggaccaacggcaccaagcgguucgacaacccggugcugcccuucaacgacggggucuacuucgcgagcaccgagaaguccaacaucauccgcggcuggaucuucgggacgacccucgacagcaagacccagucccugcugaucgugaacaacgccaccaacguggucaucaaggugugcgaguuccaguucugcaacgaccccuuccucggcguguacuaccacaagaacaacaagagcuggauggaguccgaguuccgggucuacagcuccgccaacaacugcacguucgaguacgugagccagcccuuccugauggaccuggagggcaagcaggggaacuucaagaaccuccgcgaguucguguucaagaacaucgacggcuacuucaagaucuacuccaagcacaccccgaucaaccugguccgggaccugccccagggguucagcgcccucgagccccugguggaccugcccaucggcaucaacaucacccgcuuccagacccuccuggcccugcaccgguccuaccucacgccgggggacagcagcuccggcuggaccgcgggcgccgccgccuacuacgugggguaccugcagccccgcaccuuccugcucaaguacaacgagaacggcaccaucacggacgcggucgacugcgcccuggacccccugagcgagaccaagugcacccucaaguccuucaccguggagaaggggaucuaccagacgagcaacuuccgggugcagcccaccgaguccaucguccgcuucccgaacaucaccaaccugugccccuucggcgagguguucaacgccacccgguucgccagcgucuacgccuggaaccgcaagcggaucuccaacugcguggcggacuacagcgugcuguacaacuccgccagcuucuccacguucaagugcuacggcgucagccccaccaagcucaacgaccugugcuucaccaacguguacgccgacuccuucgugauccgcggggacgagguccggcagaucgcccccggccagaccgggaagaucgccgacuacaacuacaagcugccggacgacuucacgggcugcgugaucgcguggaacagcaacaaccucgacuccaaggucgggggcaacuacaacuaccuguuccgccuguuccgcaagagcaaccucaagcccuucgagcgggacaucuccaccgagaucuaccaggccggcagcacccccugcaacgggguggagggcuucaacugcuacuucccccugcaguccuacggguuccagccgaccaacggcgugggguaccagcccuaccggguggucgugcugagcuucgagcuccugcacgcccccgccacggugugcggccccaagaaguccaccaaccuggucaagaacaagugcgugaacuucaacuucaacggccucaccgggaccggcgugcugaccgagagcaacaagaaguuccugccguuccagcaguucgggcgcgacaucgccgacacgaccgacgcgguccgcgacccccagacccuggagauccucgacaucacccccugcagcuucggcgggguguccgugaucacgccgggcaccaacaccagcaaccaggucgccgugcuguaccagggcgugaacugcaccgagguccccguggccauccacgccgaccagcugacgcccaccuggcggguguacuccaccgggagcaacgucuuccagacccgcgccggcugccucaucggggcggagcacgugaacaacuccuacgagugcgacauccccaucggcgccggcaucugcgccagcuaccagacgcagaccaacuccccgcggcgcgcccggagcguggcgucccagagcaucaucgccuacaccaugucccugggggccgagaacagcgucgccuacuccaacaacagcaucgccauccccaccaacuucacgaucuccgugaccaccgagauccugcccgugagcaugaccaagacgagcgucgacugcaccauguacaucugcggcgacuccaccgagugcagcaaccuccugcugcaguacggguccuucugcacccagcucaaccgcgcgcugacgggcaucgccguggagcaggacaagaacacccaggagguguucgcccaggucaagcagaucuacaagacgcccccgaucaaggacuucgggggcuucaacuucagccagauccugcccgaccccuccaagcccagcaagcgguccuucaucgaggaccuccuguucaacaaggugacccuggccgacgccggcuucaucaagcaguacggggacugccucggcgacaucgcggcccgcgaccugaucugcgcccagaaguucaacgggcugaccgugcucccgccccugcugaccgacgagaugaucgcccaguacaccagcgcccuccuggcgggcaccaucacguccggguggaccuucggcgccggcgccgcccugcagauccccuucgcgaugcagauggccuaccgguucaacgggaucggcgucacccagaacgugcucuacgagaaccagaagcugaucgccaaccaguucaacagcgccaucgggaagauccaggacucccugagcuccaccgccagcgcgcucggcaagcugcaggacguggucaaccagaacgcccaggcccugaacacgcucgugaagcagcuguccagcaacuucggggccaucuccagcgugcugaacgacauccucucccgccuggacaaggucgaggccgaggugcagaucgaccggcugaucaccggccgccuccagagccugcagaccuacgugacccagcagcugauccgggcggccgagauccgcgccagcgccaaccucgccgcgaccaagauguccgagugcguccugggccagagcaagcggguggacuucugcgggaagggcuaccaccugauguccuucccccagagcgccccgcacgggguggucuuccuccacgugacguacguccccgcccaggagaagaacuucaccaccgcccccgcgaucugccacgacggcaaggcccacuucccccgcgaggggguguucguguccaacggcacccacugguucgucacgcagcggaacuucuacgagccgcagaucaucaccaccgacaacaccuucgugagcggcaacugcgacguggucaucgggaucgugaacaacacgguguacgacccccugcagcccgagcuggacuccuucaaggaggagcucgacaaguacuucaagaaccacaccagccccgacgucgaccugggcgacaucuccgggaucaacgccagcguggugaacauccagaaggagaucgaccgccugaacgaggucgccaagaaccucaacgagucccugaucgaccugcaggagcucggcaaguacgagcaguacaucaaguggccgugguacaucuggcugggcuucaucgccgggcugaucgcgaucgugauggugaccaucaugcucugcugcaugaccagcugcugcuccugccugaagggcugcugcagcugcggguccugcugcaaguucgacgaggacgacagcgagcccguccugaagggcgugaagcuccacuacacgugaugacucgagcugguacugcaugcacgcaaugcuagcugccccuuucccguccuggguaccccgagucucccccgaccucgggucccagguaugcucccaccuccaccugccccacucaccaccucugcuaguuccagacaccucccaagcacgcagcaaugcagcucaaaacgcuuagccuagccacacccccacgggaaacagcagugauuaaccuuuagcaauaaacgaaaguuuaacuaagcuauacuaaccccaggguuggucaauuucgugccagccacacccuggagcuagcaaaaaaaaaaaaaaaaaaaaaaaaaaaaaaaaaaaaaaaaaaaaaaaaaaaaaaaaaaaaaaaaaaaaaaaaaaaaaaaaaaaaaaaaaaaaaaaaaaaa

SEQ ID NO: 26295 - RNA, 4273 nt, Artificial Sequence
  SARS-CoV-2/Wuhan/WIV05/2019__EPI_ISL_402128 spike protein mRNA gc (1-1273)(D614G_I692V)
agaauaaacuaguauucuucugguccccacagacucagagagaacccgccaccauguucguguuccugguccuccugccccuggugagcucccagugcgugaaccucaccacccgcacgcagcugccgcccgccuacaccaacagcuucacccggggcgucuacuaccccgacaagguguuccgcuccagcgugcugcacuccacccaggaccucuuccugcccuucuucagcaacgucacgugguuccacgccauccacguguccgggaccaacggcaccaagcgguucgacaacccggugcugcccuucaacgacggggucuacuucgcgagcaccgagaaguccaacaucauccgcggcuggaucuucgggacgacccucgacagcaagacccagucccugcugaucgugaacaacgccaccaacguggucaucaaggugugcgaguuccaguucugcaacgaccccuuccucggcguguacuaccacaagaacaacaagagcuggauggaguccgaguuccgggucuacagcuccgccaacaacugcacguucgaguacgugagccagcccuuccugauggaccuggagggcaagcaggggaacuucaagaaccuccgcgaguucguguucaagaacaucgacggcuacuucaagaucuacuccaagcacaccccgaucaaccugguccgggaccugccccagggguucagcgcccucgagccccugguggaccugcccaucggcaucaacaucacccgcuuccagacccuccuggcccugcaccgguccuaccucacgccgggggacagcagcuccggcuggaccgcgggcgccgccgccuacuacgugggguaccugcagccccgcaccuuccugcucaaguacaacgagaacggcaccaucacggacgcggucgacugcgcccuggacccccugagcgagaccaagugcacccucaaguccuucaccguggagaaggggaucuaccagacgagcaacuuccgggugcagcccaccgaguccaucguccgcuucccgaacaucaccaaccugugccccuucggcgagguguucaacgccacccgguucgccagcgucuacgccuggaaccgcaagcggaucuccaacugcguggcggacuacagcgugcuguacaacuccgccagcuucuccacguucaagugcuacggcgucagccccaccaagcucaacgaccugugcuucaccaacguguacgccgacuccuucgugauccgcggggacgagguccggcagaucgcccccggccagaccgggaagaucgccgacuacaacuacaagcugccggacgacuucacgggcugcgugaucgcguggaacagcaacaaccucgacuccaaggucgggggcaacuacaacuaccuguaccgccuguuccgcaagagcaaccucaagcccuucgagcgggacaucuccaccgagaucuaccaggccggcagcacccccugcaacgggguggagggcuucaacugcuacuucccccugcaguccuacggguuccagccgaccaacggcgugggguaccagcccuaccggguggucgugcugagcuucgagcuccugcacgcccccgccacggugugcggccccaagaaguccaccaaccuggucaagaacaagugcgugaacuucaacuucaacggccucaccgggaccggcgugcugaccgagagcaacaagaaguuccugccguuccagcaguucgggcgcgacaucgccgacacgaccgacgcgguccgcgacccccagacccuggagauccucgacaucacccccugcagcuucggcgggguguccgugaucacgccgggcaccaacaccagcaaccaggucgccgugcuguaccagggcgugaacugcaccgagguccccguggccauccacgccgaccagcugacgcccaccuggcggguguacuccaccgggagcaacgucuuccagacccgcgccggcugccucaucggggcggagcacgugaacaacuccuacgagugcgacauccccaucggcgccggcaucugcgccagcuaccagacgcagaccaacuccccgcggcgcgcccggagcguggcgucccagagcgucaucgccuacaccaugucccugggggccgagaacagcguggccuacuccaacaacagcaucgccauccccaccaacuucacgaucuccgugaccaccgagauccugcccgucagcaugaccaagacgagcguggacugcaccauguacaucugcggcgacuccaccgagugcagcaaccuccugcugcaguacggguccuucugcacccagcucaaccgcgcgcugacgggcaucgccguggagcaggacaagaacacccaggaggucuucgcccaggugaagcagaucuacaagacgcccccgaucaaggacuucgggggcuucaacuucagccagauccugcccgaccccuccaagcccagcaagcgguccuucaucgaggaccuccuguucaacaaggugacccuggccgacgccggcuucaucaagcaguacggggacugccucggcgacaucgcggcccgcgaccugaucugcgcccagaaguucaacgggcugaccguccucccgccccugcugaccgacgagaugaucgcccaguacaccagcgcccuccuggcgggcaccaucacguccggguggaccuucggcgccggcgccgcccugcagauccccuucgcgaugcagauggccuaccgguucaacgggaucggcgugacccagaacgugcucuacgagaaccagaagcugaucgccaaccaguucaacagcgccaucgggaagauccaggacucccugagcuccaccgccagcgcgcucggcaagcugcaggacgucgugaaccagaacgcccaggcccugaacacgcucgugaagcagcuguccagcaacuucggggccaucuccagcguccugaacgacauccucucccgccuggacaagguggaggccgaggugcagaucgaccggcugaucaccggccgccuccagagccugcagaccuacgucacccagcagcugauccgggcggccgagauccgcgccagcgccaaccucgccgcgaccaagauguccgagugcgugcugggccagagcaagcggguggacuucugcgggaagggcuaccaccugauguccuucccccagagcgccccgcacggggucguguuccuccacgucacguacgugcccgcccaggagaagaacuucaccaccgcccccgcgaucugccacgacggcaaggcccacuucccccgcgaggggguguucgucuccaacggcacccacugguucgugacgcagcggaacuucuacgagccgcagaucaucaccaccgacaacaccuucgugagcggcaacugcgacgucgugaucgggaucgugaacaacacggucuacgacccccugcagcccgagcuggacuccuucaaggaggagcucgacaaguacuucaagaaccacaccagccccgacguggaccugggcgacaucuccgggaucaacgccagcguggucaacauccagaaggagaucgaccgccugaacgagguggccaagaaccucaacgagucccugaucgaccugcaggagcucggcaaguacgagcaguacaucaaguggccgugguacaucuggcugggcuucaucgccgggcugaucgcgaucgugauggucaccaucaugcucugcugcaugaccagcugcugcuccugccugaagggcugcugcagcugcggguccugcugcaaguucgacgaggacgacagcgagcccgugcugaagggcgugaagcuccacuacacgugaugacucgagcugguacugcaugcacgcaaugcuagcugccccuuucccguccuggguaccccgagucucccccgaccucgggucccagguaugcucccaccuccaccugccccacucaccaccucugcuaguuccagacaccucccaagcacgcagcaaugcagcucaaaacgcuuagccuagccacacccccacgggaaacagcagugauuaaccuuuagcaauaaacgaaaguuuaacuaagcuauacuaaccccaggguuggucaauuucgugccagccacacccuggagcuagcaaaaaaaaaaaaaaaaaaaaaaaaaaaaaaaaaaaaaaaaaaaaaaaaaaaaaaaaaaaaaaaaaaaaaaaaaaaaaaaaaaaaaaaaaaaaaaaaaaaa

SEQ ID NO: 26296 - RNA, 4273 nt, Artificial Sequence
  SARS-CoV-2/Wuhan/WIV05/2019__EPI_ISL_402128 spike protein mRNA gc (1-1273)(D614G_M1229I)
agaauaaacuaguauucuucugguccccacagacucagagagaacccgccaccauguucguguuccugguccuccugccccuggugagcucccagugcgugaaccucaccacccgcacgcagcugccgcccgccuacaccaacagcuucacccggggcgucuacuaccccgacaagguguuccgcuccagcgugcugcacuccacccaggaccucuuccugcccuucuucagcaacgucacgugguuccacgccauccacguguccgggaccaacggcaccaagcgguucgacaacccggugcugcccuucaacgacggggucuacuucgcgagcaccgagaaguccaacaucauccgcggcuggaucuucgggacgacccucgacagcaagacccagucccugcugaucgugaacaacgccaccaacguggucaucaaggugugcgaguuccaguucugcaacgaccccuuccucggcguguacuaccacaagaacaacaagagcuggauggaguccgaguuccgggucuacagcuccgccaacaacugcacguucgaguacgugagccagcccuuccugauggaccuggagggcaagcaggggaacuucaagaaccuccgcgaguucguguucaagaacaucgacggcuacuucaagaucuacuccaagcacaccccgaucaaccugguccgggaccugccccagggguucagcgcccucgagccccugguggaccugcccaucggcaucaacaucacccgcuuccagacccuccuggcccugcaccgguccuaccucacgccgggggacagcagcuccggcuggaccgcgggcgccgccgccuacuacgugggguaccugcagccccgcaccuuccugcucaaguacaacgagaacggcaccaucacggacgcggucgacugcgcccuggacccccugagcgagaccaagugcacccucaaguccuucaccguggagaaggggaucuaccagacgagcaacuuccgggugcagcccaccgaguccaucguccgcuucccgaacaucaccaaccugugccccuucggcgagguguucaacgccacccgguucgccagcgucuacgccuggaaccgcaagcggaucuccaacugcguggcggacuacagcgugcuguacaacuccgccagcuucuccacguucaagugcuacggcgucagccccaccaagcucaacgaccugugcuucaccaacguguacgccgacuccuucgugauccgcggggacgagguccggcagaucgcccccggccagaccgggaagaucgccgacuacaacuacaagcugccggacgacuucacgggcugcgugaucgcguggaacagcaacaaccucgacuccaaggucgggggcaacuacaacuaccuguaccgccuguuccgcaagagcaaccucaagcccuucgagcgggacaucuccaccgagaucuaccaggccggcagcacccccugcaacgggguggagggcuucaacugcuacuucccccugcaguccuacggguuccagccgaccaacggcgugggguaccagcccuaccggguggucgugcugagcuucgagcuccugcacgcccccgccacggugugcggccccaagaaguccaccaaccuggucaagaacaagugcgugaacuucaacuucaacggccucaccgggaccggcgugcugaccgagagcaacaagaaguuccugccguuccagcaguucgggcgcgacaucgccgacacgaccgacgcgguccgcgacccccagacccuggagauccucgacaucacccccugcagcuucggcgggguguccgugaucacgccgggcaccaacaccagcaaccaggucgccgugcuguaccagggcgugaacugcaccgagguccccguggccauccacgccgaccagcugacgcccaccuggcggguguacuccaccgggagcaacgucuuccagacccgcgccggcugccucaucggggcggagcacgugaacaacuccuacgagugcgacauccccaucggcgccggcaucugcgccagcuaccagacgcagaccaacuccccgcggcgcgcccggagcguggcgucccagagcaucaucgccuacaccaugucccugggggccgagaacagcgucgccuacuccaacaacagcaucgccauccccaccaacuucacgaucuccgugaccaccgagauccugcccgugagcaugaccaagacgagcgucgacugcaccauguacaucugcggcgacuccaccgagugcagcaaccuccugcugcaguacggguccuucugcacccagcucaaccgcgcgcugacgggcaucgccguggagcaggacaagaacacccaggagguguucgcccaggucaagcagaucuacaagacgcccccgaucaaggacuucgggggcuucaacuucagccagauccugcccgaccccuccaagcccagcaagcgguccuucaucgaggaccuccuguucaacaaggugacccuggccgacgccggcuucaucaagcaguacggggacugccucggcgacaucgcggcccgcgaccugaucugcgcccagaaguucaacgggcugaccgugcucccgccccugcugaccgacgagaugaucgcccaguacaccagcgcccuccuggcgggcaccaucacguccggguggaccuucggcgccggcgccgcccugcagauccccuucgcgaugcagauggccuaccgguucaacgggaucggcgucacccagaacgugcucuacgagaaccagaagcugaucgccaaccaguucaacagcgccaucgggaagauccaggacucccugagcuccaccgccagcgcgcucggcaagcugcaggacguggucaaccagaacgcccaggcccugaacacgcucgugaagcagcuguccagcaacuucggggccaucuccagcgugcugaacgacauccucucccgccuggacaaggucgaggccgaggugcagaucgaccggcugaucaccggccgccuccagagccugcagaccuacgugacccagcagcugauccgggcggccgagauccgcgccagcgccaaccucgccgcgaccaagauguccgagugcguccugggccagagcaagcggguggacuucugcgggaagggcuaccaccugauguccuucccccagagcgccccgcacgggguggucuuccuccacgugacguacguccccgcccaggagaagaacuucaccaccgcccccgcgaucugccacgacggcaaggcccacuucccccgcgaggggguguucguguccaacggcacccacugguucgucacgcagcggaacuucuacgagccgcagaucaucaccaccgacaacaccuucgugagcggcaacugcgacguggucaucgggaucgugaacaacacgguguacgacccccugcagcccgagcuggacuccuucaaggaggagcucgacaaguacuucaagaaccacaccagccccgacgucgaccugggcgacaucuccgggaucaacgccagcguggugaacauccagaaggagaucgaccgccugaacgaggucgccaagaaccucaacgagucccugaucgaccugcaggagcucggcaaguacgagcaguacaucaaguggccgugguacaucuggcugggcuucaucgccgggcugaucgcgaucgugaucgugaccaucaugcucugcugcaugaccagcugcugcuccugccugaagggcugcugcagcugcggguccugcugcaaguucgacgaggacgacagcgagcccguccugaagggcgugaagcuccacuacacgugaugacucgagcugguacugcaugcacgcaaugcuagcugccccuuucccguccuggguaccccgagucucccccgaccucgggucccagguaugcucccaccuccaccugccccacucaccaccucugcuaguuccagacaccucccaagcacgcagcaaugcagcucaaaacgcuuagccuagccacacccccacgggaaacagcagugauuaaccuuuagcaauaaacgaaaguuuaacuaagcuauacuaaccccaggguuggucaauuucgugccagccacacccuggagcuagcaaaaaaaaaaaaaaaaaaaaaaaaaaaaaaaaaaaaaaaaaaaaaaaaaaaaaaaaaaaaaaaaaaaaaaaaaaaaaaaaaaaaaaaaaaaaaaaaaaaa

SEQ ID NO: 26297 - RNA, 4267 nt, Artificial Sequence
  SARS-CoV-2/Wuhan/WIV05/2019__EPI_ISL_402128 spike protein mRNA gc (1-1273)(H69del_V70del_A222V_Y453F_S477N_D614G_I692V)
agaauaaacuaguauucuucugguccccacagacucagagagaacccgccaccauguucguguuccugguccuccugccccuggugagcucccagugcgugaaccucaccacccgcacgcagcugccgcccgccuacaccaacagcuucacccggggcgucuacuaccccgacaagguguuccgcuccagcgugcugcacuccacccaggaccucuuccugcccuucuucagcaacgucacgugguuccacgccaucuccgggaccaacggcaccaagcgguucgacaacccggugcugcccuucaacgacgggguguacuucgcgagcaccgagaaguccaacaucauccgcggcuggaucuucgggacgacccucgacagcaagacccagucccugcugaucgucaacaacgccaccaacguggugaucaaggucugcgaguuccaguucugcaacgaccccuuccucggcguguacuaccacaagaacaacaagagcuggauggaguccgaguuccggguguacagcuccgccaacaacugcacguucgaguacgucagccagcccuuccugauggaccuggagggcaagcaggggaacuucaagaaccuccgcgaguucguguucaagaacaucgacggcuacuucaagaucuacuccaagcacaccccgaucaaccuggugcgggaccugccccagggguucagcguccucgagccccugguggaccugcccaucggcaucaacaucacccgcuuccagacccuccuggcccugcaccgguccuaccucacgccgggggacagcagcuccggcuggaccgccggcgcggccgccuacuacgugggguaccugcagccccgcaccuuccugcucaaguacaacgagaacggcaccaucacggacgccgucgacugcgcgcuggacccccugagcgagaccaagugcacccucaaguccuucaccguggagaaggggaucuaccagacgagcaacuuccgggugcagcccaccgaguccaucguccgcuucccgaacaucaccaaccugugccccuucggcgagguguucaacgccacccgguucgccagcgucuacgccuggaaccgcaagcggaucuccaacugcguggccgacuacagcgugcuguacaacuccgcgagcuucuccacguucaagugcuacggcgucagccccaccaagcucaacgaccugugcuucaccaacguguacgccgacuccuucgugauccgcggggacgagguccggcagaucgcccccggccagaccgggaagaucgccgacuacaacuacaagcugccggacgacuucacgggcugcgugaucgccuggaacagcaacaaccucgacuccaaggucgggggcaacuacaacuaccuguuccgccuguuccgcaagagcaaccucaagcccuucgagcgggacaucuccaccgagaucuaccaggcgggcaacacccccugcaacgggguggagggcuucaacugcuacuucccccugcagagcuacggguuccagccgaccaacggcgugggguaccagcccuaccggguggucgugcuguccuucgagcuccugcacgcccccgccacggugugcggccccaagaaguccaccaaccuggucaagaacaagugcgugaacuucaacuucaacggccucaccgggaccggcgugcugaccgagagcaacaagaaguuccugccguuccagcaguucgggcgcgacaucgccgacacgaccgacgccguccgcgacccccagacccuggagauccucgacaucacccccugcagcuucggcggggugagcgugaucacgccgggcaccaacaccuccaaccaggucgcggugcuguaccagggcgugaacugcaccgagguccccguggccauccacgccgaccagcugacgcccaccuggcggguguacagcaccggguccaacgucuuccagacccgcgccggcugccucaucggggccgagcacgugaacaacagcuacgagugcgacauccccaucggcgcgggcaucugcgccuccuaccagacgcagaccaacagcccgcggcgcgcccgguccguggccagccaguccgucaucgcguacaccaugagccugggggccgagaacuccguggccuacagcaacaacuccaucgccauccccaccaacuucacgaucagcgugaccaccgagauccugcccgucuccaugaccaagacgagcguggacugcaccauguacaucugcggcgacagcaccgagugcuccaaccuccugcugcaguacgggagcuucugcacccagcucaaccgcgcccugacgggcaucgcgguggagcaggacaagaacacccaggaggucuucgcccaggugaagcagaucuacaagacgcccccgaucaaggacuucgggggcuucaacuucucccagauccugcccgaccccagcaagcccuccaagcggagcuucaucgaggaccuccuguucaacaaggugacccuggccgacgccggcuucaucaagcaguacggggacugccucggcgacaucgccgcgcgcgaccugaucugcgcccagaaguucaacgggcugaccguccucccgccccugcugaccgacgagaugaucgcccaguacaccuccgcccuccuggccggcaccaucacgagcggguggaccuucggcgcgggcgccgcccugcagauccccuucgccaugcagauggcguaccgguucaacgggaucggcgugacccagaacgugcucuacgagaaccagaagcugaucgccaaccaguucaacuccgccaucgggaagauccaggacagccuguccagcaccgccuccgcccucggcaagcugcaggacgucgugaaccagaacgcgcaggcccugaacacgcucgugaagcagcugagcuccaacuucggggccaucagcuccguccugaacgacauccucagccgccuggacaagguggaggccgaggugcagaucgaccggcugaucaccggccgccuccagucccugcagaccuacgucacccagcagcugauccgggccgcggagauccgcgccagcgccaaccucgccgccaccaagaugagcgagugcgugcugggccaguccaagcggguggacuucugcgggaagggcuaccaccugaugagcuucccccaguccgcgccgcacggggucguguuccuccacgucacguacgugcccgcccaggagaagaacuucaccaccgcccccgccaucugccacgacggcaaggcgcacuucccccgcgaggggguguucgucagcaacggcacccacugguucgugacgcagcggaacuucuacgagccgcagaucaucaccaccgacaacaccuucguguccggcaacugcgacgucgugaucgggaucgugaacaacacggucuacgacccccugcagcccgagcuggacagcuucaaggaggagcucgacaaguacuucaagaaccacaccucccccgacguggaccugggcgacaucagcgggaucaacgccuccguggucaacauccagaaggagaucgaccgccugaacgagguggccaagaaccucaacgagagccugaucgaccugcaggagcucggcaaguacgagcaguacaucaaguggccgugguacaucuggcugggcuucaucgccgggcugaucgccaucgugauggucaccaucaugcucugcugcaugaccuccugcugcagcugccugaagggcugcugcuccugcgggagcugcugcaaguucgacgaggacgacuccgagcccgugcugaagggcgugaagcuccacuacacgugaugacucgagcugguacugcaugcacgcaaugcuagcugccccuuucccguccuggguaccccgagucucccccgaccucgggucccagguaugcucccaccuccaccugccccacucaccaccucugcuaguuccagacaccucccaagcacgcagcaaugcagcucaaaacgcuuagccuagccacacccccacgggaaacagcagugauuaaccuuuagcaauaaacgaaaguuuaacuaagcuauacuaaccccaggguuggucaauuucgugccagccacacccuggagcuagcaaaaaaaaaaaaaaaaaaaaaaaaaaaaaaaaaaaaaaaaaaaaaaaaaaaaaaaaaaaaaaaaaaaaaaaaaaaaaaaaaaaaaaaaaaaaaaaaaaaa

SEQ ID NO: 26298 - RNA, 4267 nt, Artificial Sequence
  SARS-CoV-2/Wuhan/WIV05/2019__EPI_ISL_402128 spike protein mRNA gc (1-1273)(H69del_V70del_Y453F_D614G_I692V_M1229I)
agaauaaacuaguauucuucugguccccacagacucagagagaacccgccaccauguucguguuccugguccuccugccccuggugagcucccagugcgugaaccucaccacccgcacgcagcugccgcccgccuacaccaacagcuucacccggggcgucuacuaccccgacaagguguuccgcuccagcgugcugcacuccacccaggaccucuuccugcccuucuucagcaacgucacgugguuccacgccaucuccgggaccaacggcaccaagcgguucgacaacccggugcugcccuucaacgacgggguguacuucgcgagcaccgagaaguccaacaucauccgcggcuggaucuucgggacgacccucgacagcaagacccagucccugcugaucgucaacaacgccaccaacguggugaucaaggucugcgaguuccaguucugcaacgaccccuuccucggcguguacuaccacaagaacaacaagagcuggauggaguccgaguuccggguguacagcuccgccaacaacugcacguucgaguacgucagccagcccuuccugauggaccuggagggcaagcaggggaacuucaagaaccuccgcgaguucguguucaagaacaucgacggcuacuucaagaucuacuccaagcacaccccgaucaaccuggugcgggaccugccccagggguucagcgcccucgagccccuggucgaccugcccaucggcaucaacaucacccgcuuccagacccuccuggcccugcaccgguccuaccucacgccgggggacagcagcuccggcuggaccgcgggcgccgccgccuacuacgugggguaccugcagccccgcaccuuccugcucaaguacaacgagaacggcaccaucacggacgcgguggacugcgcccuggacccccugagcgagaccaagugcacccucaaguccuucaccgucgagaaggggaucuaccagacgagcaacuuccgggugcagcccaccgaguccaucgugcgcuucccgaacaucaccaaccugugccccuucggcgaggucuucaacgccacccgguucgccagcguguacgccuggaaccgcaagcggaucuccaacugcgucgcggacuacagcgugcuguacaacuccgccagcuucuccacguucaagugcuacggcgugagccccaccaagcucaacgaccugugcuucaccaacgucuacgccgacuccuucgugauccgcggggacgaggugcggcagaucgcccccggccagaccgggaagaucgccgacuacaacuacaagcugccggacgacuucacgggcugcgucaucgcguggaacagcaacaaccucgacuccaaggucgggggcaacuacaacuaccuguuccgccuguuccgcaagagcaaccucaagcccuucgagcgggacaucuccaccgagaucuaccaggccggcagcacccccugcaacgggguggagggcuucaacugcuacuucccccugcaguccuacggguuccagccgaccaacggcgugggguaccagcccuaccggguggugguccugagcuucgagcuccugcacgcccccgccacggugugcggccccaagaaguccaccaaccuggugaagaacaagugcgucaacuucaacuucaacggccucaccgggaccggcgugcugaccgagagcaacaagaaguuccugccguuccagcaguucgggcgcgacaucgccgacacgaccgacgcggugcgcgacccccagacccuggagauccucgacaucacccccugcagcuucggcggggucuccgugaucacgccgggcaccaacaccagcaaccagguggccguccuguaccagggcgugaacugcaccgaggugcccgucgccauccacgccgaccagcugacgcccaccuggcggguguacuccaccgggagcaacguguuccagacccgcgccggcugccucaucggggcggagcacgucaacaacuccuacgagugcgacauccccaucggcgccggcaucugcgccagcuaccagacgcagaccaacuccccgcggcgcgcccggagcguggcgucccagagcgugaucgccuacaccaugucccugggggccgagaacagcgucgccuacuccaacaacagcaucgccauccccaccaacuucacgaucuccgugaccaccgagauccugcccgugagcaugaccaagacgagcgucgacugcaccauguacaucugcggcgacuccaccgagugcagcaaccuccugcugcaguacggguccuucugcacccagcucaaccgcgcgcugacgggcaucgccguggagcaggacaagaacacccaggagguguucgcccaggucaagcagaucuacaagacgcccccgaucaaggacuucgggggcuucaacuucagccagauccugcccgaccccuccaagcccagcaagcgguccuucaucgaggaccuccuguucaacaaggugacccuggccgacgccggcuucaucaagcaguacggggacugccucggcgacaucgcggcccgcgaccugaucugcgcccagaaguucaacgggcugaccgugcucccgccccugcugaccgacgagaugaucgcccaguacaccagcgcccuccuggcgggcaccaucacguccggguggaccuucggcgccggcgccgcccugcagauccccuucgcgaugcagauggccuaccgguucaacgggaucggcgucacccagaacgugcucuacgagaaccagaagcugaucgccaaccaguucaacagcgccaucgggaagauccaggacucccugagcuccaccgccagcgcgcucggcaagcugcaggacguggucaaccagaacgcccaggcccugaacacgcucgugaagcagcuguccagcaacuucggggccaucuccagcgugcugaacgacauccucucccgccuggacaaggucgaggccgaggugcagaucgaccggcugaucaccggccgccuccagagccugcagaccuacgugacccagcagcugauccgggcggccgagauccgcgccagcgccaaccucgccgcgaccaagauguccgagugcguccugggccagagcaagcggguggacuucugcgggaagggcuaccaccugauguccuucccccagagcgccccgcacgggguggucuuccuccacgugacguacguccccgcccaggagaagaacuucaccaccgcccccgcgaucugccacgacggcaaggcccacuucccccgcgaggggguguucguguccaacggcacccacugguucgucacgcagcggaacuucuacgagccgcagaucaucaccaccgacaacaccuucgugagcggcaacugcgacguggucaucgggaucgugaacaacacgguguacgacccccugcagcccgagcuggacuccuucaaggaggagcucgacaaguacuucaagaaccacaccagccccgacgucgaccugggcgacaucuccgggaucaacgccagcguggugaacauccagaaggagaucgaccgccugaacgaggucgccaagaaccucaacgagucccugaucgaccugcaggagcucggcaaguacgagcaguacaucaaguggccgugguacaucuggcugggcuucaucgccgggcugaucgcgaucgugaucgugaccaucaugcucugcugcaugaccagcugcugcuccugccugaagggcugcugcagcugcggguccugcugcaaguucgacgaggacgacagcgagcccguccugaagggcgugaagcuccacuacacgugaugacucgagcugguacugcaugcacgcaaugcuagcugccccuuucccguccuggguaccccgagucucccccgaccucgggucccagguaugcucccaccuccaccugccccacucaccaccucugcuaguuccagacaccucccaagcacgcagcaaugcagcucaaaacgcuuagccuagccacacccccacgggaaacagcagugauuaaccuuuagcaauaaacgaaaguuuaacuaagcuauacuaaccccaggguuggucaauuucgugccagccacacccuggagcuagcaaaaaaaaaaaaaaaaaaaaaaaaaaaaaaaaaaaaaaaaaaaaaaaaaaaaaaaaaaaaaaaaaaaaaaaaaaaaaaaaaaaaaaaaaaaaaaaaaaaa

SEQ ID NO: 26299 - RNA, 4264 nt, Artificial Sequence
  SARS-CoV-2/Wuhan/WIV05/2019__EPI_ISL_402128 spike protein mRNA gc (1-1273)(H69del_V70del_Y144del_N501Y_A570D_D614G_P681H_T716I_S982 A_D1118H)
agaauaaacuaguauucuucugguccccacagacucagagagaacccgccaccauguucguguuccugguccuccugccccuggugagcucccagugcgugaaccucaccacccgcacgcagcugccgcccgccuacaccaacagcuucacccggggcgucuacuaccccgacaagguguuccgcuccagcgugcugcacuccacccaggaccucuuccugcccuucuucagcaacgucacgugguuccacgccaucuccgggaccaacggcaccaagcgguucgacaacccggugcugcccuucaacgacgggguguacuucgcgagcaccgagaaguccaacaucauccgcggcuggaucuucgggacgacccucgacagcaagacccagucccugcugaucgucaacaacgccaccaacguggugaucaaggucugcgaguuccaguucugcaacgaccccuuccucggcguguaccacaagaacaacaagagcuggauggaguccgaguuccggguguacagcuccgccaacaacugcacguucgaguacgucagccagcccuuccugauggaccuggagggcaagcaggggaacuucaagaaccuccgcgaguucguguucaagaacaucgacggcuacuucaagaucuacuccaagcacaccccgaucaaccuggugcgggaccugccccagggguucagcgcccucgagccccuggucgaccugcccaucggcaucaacaucacccgcuuccagacccuccuggcccugcaccgguccuaccucacgccgggggacagcagcuccggcuggaccgcgggcgccgccgccuacuacgugggguaccugcagccccgcaccuuccugcucaaguacaacgagaacggcaccaucacggacgcgguggacugcgcccuggacccccugagcgagaccaagugcacccucaaguccuucaccgucgagaaggggaucuaccagacgagcaacuuccgggugcagcccaccgaguccaucgugcgcuucccgaacaucaccaaccugugccccuucggcgaggucuucaacgccacccgguucgccagcguguacgccuggaaccgcaagcggaucuccaacugcgucgcggacuacagcgugcuguacaacuccgccagcuucuccacguucaagugcuacggcgugagccccaccaagcucaacgaccugugcuucaccaacgucuacgccgacuccuucgugauccgcggggacgaggugcggcagaucgcccccggccagaccgggaagaucgccgacuacaacuacaagcugccggacgacuucacgggcugcgucaucgcguggaacagcaacaaccucgacuccaaggucgggggcaacuacaacuaccuguaccgccuguuccgcaagagcaaccucaagcccuucgagcgggacaucuccaccgagaucuaccaggccggcagcacccccugcaacgggguggagggcuucaacugcuacuucccccugcaguccuacggguuccagccgaccuacggcgugggguaccagcccuaccggguggugguccugagcuucgagcuccugcacgcccccgccacggugugcggccccaagaaguccaccaaccuggugaagaacaagugcgucaacuucaacuucaacggccucaccgggaccggcgugcugaccgagagcaacaagaaguuccugccguuccagcaguucgggcgcgacaucgacgacacgaccgacgccgugcgcgacccccagacccuggagauccucgacaucacccccugcagcuucggcggggucuccgugaucacgccgggcaccaacaccagcaaccagguggcgguccuguaccagggcgugaacugcaccgaggugcccgucgccauccacgccgaccagcugacgcccaccuggcggguguacuccaccgggagcaacguguuccagacccgcgccggcugccucaucggggccgagcacgucaacaacuccuacgagugcgacauccccaucggcgcgggcaucugcgccagcuaccagacgcagaccaacucccaccggcgcgcccggagcguggccucccagagcaucaucgcguacaccaugucccugggggccgagaacagcguggccuacuccaacaacagcaucgccaucccgaucaacuucaccaucuccgucacgaccgagauccugcccgugagcaugaccaagaccagcguggacugcacgauguacaucugcggcgacuccaccgagugcagcaaccuccugcugcaguacggguccuucugcacccagcucaaccgcgcccugaccggcaucgcggucgagcaggacaagaacacgcaggagguguucgcccaggugaagcagaucuacaagaccccgcccaucaaggacuucgggggcuucaacuucagccagauccugcccgaccccuccaagcccagcaagcgguccuucaucgaggaccuccuguucaacaaggucacccuggccgacgccggcuucaucaagcaguacggggacugccucggcgacaucgccgcgcgcgaccugaucugcgcccagaaguucaacgggcugaccgugcugcccccgcuccugacggacgagaugaucgcccaguacaccagcgcccuccuggccggcaccaucaccuccggguggacguucggcgcgggcgccgcccugcagauccccuucgccaugcagauggcguaccgguucaacgggaucggcgugacccagaacguccucuacgagaaccagaagcugaucgccaaccaguucaacagcgccaucgggaagauccaggacucccugagcuccaccgccagcgcccucggcaagcugcaggacguggugaaccagaacgcgcaggcccugaacacccucgucaagcagcuguccagcaacuucggggccaucuccagcgugcugaacgacauccucgcccgccuggacaagguggaggccgagguccagaucgaccggcugaucacgggccgccuccagucccugcagaccuacgugacccagcagcugauccgggcggccgagauccgcgccagcgccaaccucgccgcgaccaagaugagcgagugcgugcugggccaguccaagcgggucgacuucugcgggaagggcuaccaccugaugagcuucccccaguccgcgccccacggggugguguuccuccacgucaccuacgugccggcccaggagaagaacuucacgaccgcccccgccaucugccacgacggcaaggcccacuucccccgcgagggggucuucgugagcaacggcacccacugguucgugacccagcggaacuucuacgagccccagaucaucacgacccacaacaccuucgucuccggcaacugcgacguggugaucgggaucgucaacaacaccguguacgacccgcugcagcccgagcuggacagcuucaaggaggagcucgacaaguacuucaagaaccacacgucccccgacguggaccugggcgacaucagcgggaucaacgccuccgucgugaacauccagaaggagaucgaccgccugaacgagguggccaagaaccucaacgagagccugaucgaccugcaggagcucggcaaguacgagcaguacaucaaguggcccugguacaucuggcugggcuucaucgccgggcugaucgcgaucgucauggugaccaucaugcucugcugcaugaccuccugcugcagcugccugaagggcugcugcuccugcgggagcugcugcaaguucgacgaggacgacuccgagccggugcugaagggcgucaagcuccacuacaccugaugacucgagcugguacugcaugcacgcaaugcuagcugccccuuucccguccuggguaccccgagucucccccgaccucgggucccagguaugcucccaccuccaccugccccacucaccaccucugcuaguuccagacaccucccaagcacgcagcaaugcagcucaaaacgcuuagccuagccacacccccacgggaaacagcagugauuaaccuuuagcaauaaacgaaaguuuaacuaagcuauacuaaccccaggguuggucaauuucgugccagccacacccuggagcuagcaaaaaaaaaaaaaaaaaaaaaaaaaaaaaaaaaaaaaaaaaaaaaaaaaaaaaaaaaaaaaaaaaaaaaaaaaaaaaaaaaaaaaaaaaaaaaaaaaaaa

SEQ ID NO: 26300 - RNA, 4273 nt, Artificial Sequence
  SARS-CoV-2/Wuhan/WIV05/2019__EPI_ISL_402128 spike protein mRNA gc (1-1273)(K417N_E484K_N501Y_D614G)
agaauaaacuaguauucuucugguccccacagacucagagagaacccgccaccauguucguguuccugguccuccugccccuggugagcucccagugcgugaaccucaccacccgcacgcagcugccgcccgccuacaccaacagcuucacccggggcgucuacuaccccgacaagguguuccgcuccagcgugcugcacuccacccaggaccucuuccugcccuucuucagcaacgucacgugguuccacgccauccacguguccgggaccaacggcaccaagcgguucgacaacccggugcugcccuucaacgacggggucuacuucgcgagcaccgagaaguccaacaucauccgcggcuggaucuucgggacgacccucgacagcaagacccagucccugcugaucgugaacaacgccaccaacguggucaucaaggugugcgaguuccaguucugcaacgaccccuuccucggcguguacuaccacaagaacaacaagagcuggauggaguccgaguuccgggucuacagcuccgccaacaacugcacguucgaguacgugagccagcccuuccugauggaccuggagggcaagcaggggaacuucaagaaccuccgcgaguucguguucaagaacaucgacggcuacuucaagaucuacuccaagcacaccccgaucaaccugguccgggaccugccccagggguucagcgcccucgagccccugguggaccugcccaucggcaucaacaucacccgcuuccagacccuccuggcccugcaccgguccuaccucacgccgggggacagcagcuccggcuggaccgcgggcgccgccgccuacuacgugggguaccugcagccccgcaccuuccugcucaaguacaacgagaacggcaccaucacggacgcggucgacugcgcccuggacccccugagcgagaccaagugcacccucaaguccuucaccguggagaaggggaucuaccagacgagcaacuuccgggugcagcccaccgaguccaucguccgcuucccgaacaucaccaaccugugccccuucggcgagguguucaacgccacccgguucgccagcgucuacgccuggaaccgcaagcggaucuccaacugcguggcggacuacagcgugcuguacaacuccgccagcuucuccacguucaagugcuacggcgucagccccaccaagcucaacgaccugugcuucaccaacguguacgccgacuccuucgugauccgcggggacgagguccggcagaucgcccccggccagaccgggaacaucgccgacuacaacuacaagcugccggacgacuucacgggcugcgugaucgcguggaacagcaacaaccucgacuccaaggucgggggcaacuacaacuaccuguaccgccuguuccgcaagagcaaccucaagcccuucgagcgggacaucuccaccgagaucuaccaggccggcagcacccccugcaacggggugaagggcuucaacugcuacuucccccugcaguccuacggguuccagccgaccuacggcgugggguaccagcccuaccggguggucgugcugagcuucgagcuccugcacgcccccgccacggugugcggccccaagaaguccaccaaccuggucaagaacaagugcgugaacuucaacuucaacggccucaccgggaccggcgugcugaccgagagcaacaagaaguuccugccguuccagcaguucgggcgcgacaucgccgacacgaccgacgcgguccgcgacccccagacccuggagauccucgacaucacccccugcagcuucggcgggguguccgugaucacgccgggcaccaacaccagcaaccaggucgccgugcuguaccagggcgugaacugcaccgagguccccguggccauccacgccgaccagcugacgcccaccuggcggguguacuccaccgggagcaacgucuuccagacccgcgccggcugccucaucggggcggagcacgugaacaacuccuacgagugcgacauccccaucggcgccggcaucugcgccagcuaccagacgcagaccaacuccccgcggcgcgcccggagcguggcgucccagagcaucaucgccuacaccaugucccugggggccgagaacagcgucgccuacuccaacaacagcaucgccauccccaccaacuucacgaucuccgugaccaccgagauccugcccgugagcaugaccaagacgagcgucgacugcaccauguacaucugcggcgacuccaccgagugcagcaaccuccugcugcaguacggguccuucugcacccagcucaaccgcgcgcugacgggcaucgccguggagcaggacaagaacacccaggagguguucgcccaggucaagcagaucuacaagacgcccccgaucaaggacuucgggggcuucaacuucagccagauccugcccgaccccuccaagcccagcaagcgguccuucaucgaggaccuccuguucaacaaggugacccuggccgacgccggcuucaucaagcaguacggggacugccucggcgacaucgcggcccgcgaccugaucugcgcccagaaguucaacgggcugaccgugcucccgccccugcugaccgacgagaugaucgcccaguacaccagcgcccuccuggcgggcaccaucacguccggguggaccuucggcgccggcgccgcccugcagauccccuucgcgaugcagauggccuaccgguucaacgggaucggcgucacccagaacgugcucuacgagaaccagaagcugaucgccaaccaguucaacagcgccaucgggaagauccaggacucccugagcuccaccgccagcgcgcucggcaagcugcaggacguggucaaccagaacgcccaggcccugaacacgcucgugaagcagcuguccagcaacuucggggccaucuccagcgugcugaacgacauccucucccgccuggacaaggucgaggccgaggugcagaucgaccggcugaucaccggccgccuccagagccugcagaccuacgugacccagcagcugauccgggcggccgagauccgcgccagcgccaaccucgccgcgaccaagauguccgagugcguccugggccagagcaagcggguggacuucugcgggaagggcuaccaccugauguccuucccccagagcgccccgcacgggguggucuuccuccacgugacguacguccccgcccaggagaagaacuucaccaccgcccccgcgaucugccacgacggcaaggcccacuucccccgcgaggggguguucguguccaacggcacccacugguucgucacgcagcggaacuucuacgagccgcagaucaucaccaccgacaacaccuucgugagcggcaacugcgacguggucaucgggaucgugaacaacacgguguacgacccccugcagcccgagcuggacuccuucaaggaggagcucgacaaguacuucaagaaccacaccagccccgacgucgaccugggcgacaucuccgggaucaacgccagcguggugaacauccagaaggagaucgaccgccugaacgaggucgccaagaaccucaacgagucccugaucgaccugcaggagcucggcaaguacgagcaguacaucaaguggccgugguacaucuggcugggcuucaucgccgggcugaucgcgaucgugauggugaccaucaugcucugcugcaugaccagcugcugcuccugccugaagggcugcugcagcugcggguccugcugcaaguucgacgaggacgacagcgagcccguccugaagggcgugaagcuccacuacacgugaugacucgagcugguacugcaugcacgcaaugcuagcugccccuuucccguccuggguaccccgagucucccccgaccucgggucccagguaugcucccaccuccaccugccccacucaccaccucugcuaguuccagacaccucccaagcacgcagcaaugcagcucaaaacgcuuagccuagccacacccccacgggaaacagcagugauuaaccuuuagcaauaaacgaaaguuuaacuaagcuauacuaaccccaggguuggucaauuucgugccagccacacccuggagcuagcaaaaaaaaaaaaaaaaaaaaaaaaaaaaaaaaaaaaaaaaaaaaaaaaaaaaaaaaaaaaaaaaaaaaaaaaaaaaaaaaaaaaaaaaaaaaaaaaaaaa

SEQ ID NO: 26301 - RNA, 4264 nt, Artificial Sequence
  SARS-CoV-2/Wuhan/WIV05/2019__EPI_ISL_402128 spike protein mRNA gc (1-1273)(L18F_D80A_D215G_L242del_A243del_L244del_R246I_K417N_E484 K_N501Y_D614G_A701V)
agaauaaacuaguauucuucugguccccacagacucagagagaacccgccaccauguucguguuccugguccuccugccccuggugagcucccagugcgugaacuucaccacccgcacgcagcucccgcccgccuacaccaacagcuucacccggggcgucuacuaccccgacaagguguuccgcuccagcgugcugcacuccacccaggaccuguuccuccccuucuucagcaacgucacgugguuccacgccauccacguguccgggaccaacggcaccaagcgguucgcgaacccggugcugcccuucaacgacggggucuacuucgccagcaccgagaaguccaacaucauccgcggcuggaucuucgggacgacccuggacagcaagacccagucccuccugaucgugaacaacgccaccaacguggucaucaaggugugcgaguuccaguucugcaacgaccccuuccugggcguguacuaccacaagaacaacaagagcuggauggaguccgaguuccgggucuacagcuccgccaacaacugcacguucgaguacgugagccagcccuuccucauggaccuggagggcaagcaggggaacuucaagaaccugcgcgaguucguguucaagaacaucgacggcuacuucaagaucuacuccaagcacaccccgaucaaccucguccgggggcugccccagggcuucagcgcccuggagccccucguggaccugcccaucgggaucaacaucacccgcuuccagacccugcacaucuccuaccucacgccgggcgacagcagcuccggcuggaccgcgggggccgccgccuacuacgugggcuaccugcagccccggaccuuccugcucaaguacaacgagaacgggaccaucacggacgcggucgacugcgcccuggacccccugagcgagaccaagugcacccucaaguccuucaccguggagaagggcaucuaccagacgagcaacuuccgcgugcagcccaccgaguccaucguccgguucccgaacaucaccaaccugugccccuucggcgagguguucaacgccacccgcuucgccagcgucuacgccuggaaccggaagcgcaucuccaacugcguggcggacuacagcgugcuguacaacuccgccagcuucuccacguucaagugcuacggggucagccccaccaagcucaacgaccugugcuucaccaacguguacgccgacuccuucgugauccggggcgacgagguccgccagaucgcccccgggcagaccggcaacaucgccgacuacaacuacaagcugccggacgacuucacggggugcgugaucgcguggaacagcaacaaccucgacuccaaggugggcggcaacuacaacuaccuguaccggcuguuccgcaagagcaaccucaagcccuucgagcgggacaucuccaccgagaucuaccaggccgggagcacccccugcaacggcgucaagggguucaacugcuacuucccccugcaguccuacggcuuccagccgaccuacggggugggcuaccagcccuaccgcguggucgugcugagcuucgagcuccugcacgcccccgccacggugugcggccccaagaaguccaccaaccuggucaagaacaagugcgugaacuucaacuucaacgggcucaccggcaccggggugcugaccgagagcaacaagaaguuccugccguuccagcaguucggccgggacaucgccgacacgaccgacgcgguccgcgacccccagacccucgagauccuggacaucacccccugcagcuucgggggcguguccgugaucacgccgggcaccaacaccagcaaccaggucgccgugcuguaccagggggugaacugcaccgagguccccguggccauccacgccgaccagcugacgcccaccuggcgcguguacuccaccggcagcaacgucuuccagacccgggccgggugccucaucggcgcggagcacgugaacaacuccuacgagugcgacauccccaucggcgccgggaucugcgccagcuaccagacgcagaccaacuccccgcgccgggcccgcagcguggcgucccagagcaucaucgccuacaccaugucccugggcgucgagaacagcguggccuacuccaacaacagcaucgccauccccaccaacuucacgaucuccgugaccaccgagauccugcccgucagcaugaccaagacgagcguggacugcaccauguacaucugcggggacuccaccgagugcagcaaccuccugcugcaguacggcuccuucugcacccagcucaaccgggcccugacggggaucgcgguggagcaggacaagaacacccaggaggucuucgcccaggugaagcagaucuacaagacgcccccgaucaaggacuucggcggcuucaacuucagccagauccugcccgaccccuccaagcccagcaagcgcuccuucaucgaggaccuccuguucaacaaggugacccuggccgacgccggguucaucaagcaguacggcgacugccucggggacaucgccgcgcgggaccugaucugcgcccagaaguucaacggccugaccguccucccgccccugcugaccgacgagaugaucgcccaguacaccagcgcccuccuggccgggaccaucacguccggcuggaccuucggcgcgggggccgcccugcagauccccuucgccaugcagauggcguaccgcuucaacggcaucggggugacccagaacgugcucuacgagaaccagaagcugaucgccaaccaguucaacagcgccaucggcaagauccaggacucccugagcuccaccgccagcgcccucgggaagcugcaggacgucgugaaccagaacgcgcaggcccugaacacgcucgugaagcagcuguccagcaacuucggcgccaucuccagcguccugaacgacauccucucccggcuggacaagguggaggccgaggugcagaucgaccgccugaucaccggccggcuccagagccugcagaccuacgucacccagcagcugauccgcgccgcggagauccgggccagcgccaaccucgccgccaccaagauguccgagugcgugcuggggcagagcaagcgcguggacuucugcggcaagggguaccaccugauguccuucccccagagcgcgccgcacggcgucguguuccuccacgucacguacgugcccgcccaggagaagaacuucaccaccgcccccgccaucugccacgacgggaaggcgcacuucccccgggagggcguguucgucuccaacggcacccacugguucgugacgcagcgcaacuucuacgagccgcagaucaucaccaccgacaacaccuucgugagcgggaacugcgacgucgugaucggcaucgugaacaacacggucuacgacccccugcagcccgagcuggacuccuucaaggaggagcucgacaaguacuucaagaaccacaccagccccgacguggaccugggggacaucuccggcaucaacgccagcguggucaacauccagaaggagaucgaccggcugaacgagguggccaagaaccucaacgagucccugaucgaccugcaggagcucggcaaguacgagcaguacaucaaguggccgugguacaucuggcugggguucaucgccggccugaucgccaucgugauggucaccaucaugcucugcugcaugaccagcugcugcuccugccugaaggggugcugcagcugcggcuccugcugcaaguucgacgaggacgacagcgagcccgugcugaagggggugaagcuccacuacacgugaugacucgagcugguacugcaugcacgcaaugcuagcugccccuuucccguccuggguaccccgagucucccccgaccucgggucccagguaugcucccaccuccaccugccccacucaccaccucugcuaguuccagacaccucccaagcacgcagcaaugcagcucaaaacgcuuagccuagccacacccccacgggaaacagcagugauuaaccuuuagcaauaaacgaaaguuuaacuaagcuauacuaaccccaggguuggucaauuucgugccagccacacccuggagcuagcaaaaaaaaaaaaaaaaaaaaaaaaaaaaaaaaaaaaaaaaaaaaaaaaaaaaaaaaaaaaaaaaaaaaaaaaaaaaaaaaaaaaaaaaaaaaaaaaaaaa

SEQ ID NO: 26302 - RNA, 4273 nt, Artificial Sequence
  SARS-CoV-2/Wuhan/WIV05/2019__EPI_ISL_402128 spike protein mRNA gc (1-1273)(E484K_D614G)
agaauaaacuaguauucuucugguccccacagacucagagagaacccgccaccauguucguguuccugguccuccugccccuggugagcucccagugcgugaaccucaccacccgcacgcagcugccgcccgccuacaccaacagcuucacccggggcgucuacuaccccgacaagguguuccgcuccagcgugcugcacuccacccaggaccucuuccugcccuucuucagcaacgucacgugguuccacgccauccacguguccgggaccaacggcaccaagcgguucgacaacccggugcugcccuucaacgacggggucuacuucgcgagcaccgagaaguccaacaucauccgcggcuggaucuucgggacgacccucgacagcaagacccagucccugcugaucgugaacaacgccaccaacguggucaucaaggugugcgaguuccaguucugcaacgaccccuuccucggcguguacuaccacaagaacaacaagagcuggauggaguccgaguuccgggucuacagcuccgccaacaacugcacguucgaguacgugagccagcccuuccugauggaccuggagggcaagcaggggaacuucaagaaccuccgcgaguucguguucaagaacaucgacggcuacuucaagaucuacuccaagcacaccccgaucaaccugguccgggaccugccccagggguucagcgcccucgagccccugguggaccugcccaucggcaucaacaucacccgcuuccagacccuccuggcccugcaccgguccuaccucacgccgggggacagcagcuccggcuggaccgcgggcgccgccgccuacuacgugggguaccugcagccccgcaccuuccugcucaaguacaacgagaacggcaccaucacggacgcggucgacugcgcccuggacccccugagcgagaccaagugcacccucaaguccuucaccguggagaaggggaucuaccagacgagcaacuuccgggugcagcccaccgaguccaucguccgcuucccgaacaucaccaaccugugccccuucggcgagguguucaacgccacccgguucgccagcgucuacgccuggaaccgcaagcggaucuccaacugcguggcggacuacagcgugcuguacaacuccgccagcuucuccacguucaagugcuacggcgucagccccaccaagcucaacgaccugugcuucaccaacguguacgccgacuccuucgugauccgcggggacgagguccggcagaucgcccccggccagaccgggaagaucgccgacuacaacuacaagcugccggacgacuucacgggcugcgugaucgcguggaacagcaacaaccucgacuccaaggucgggggcaacuacaacuaccuguaccgccuguuccgcaagagcaaccucaagcccuucgagcgggacaucuccaccgagaucuaccaggccggcagcacccccugcaacggggugaagggcuucaacugcuacuucccccugcaguccuacggguuccagccgaccaacggcgugggguaccagcccuaccggguggucgugcugagcuucgagcuccugcacgcccccgccacggugugcggccccaagaaguccaccaaccuggucaagaacaagugcgugaacuucaacuucaacggccucaccgggaccggcgugcugaccgagagcaacaagaaguuccugccguuccagcaguucgggcgcgacaucgccgacacgaccgacgcgguccgcgacccccagacccuggagauccucgacaucacccccugcagcuucggcgggguguccgugaucacgccgggcaccaacaccagcaaccaggucgccgugcuguaccagggcgugaacugcaccgagguccccguggccauccacgccgaccagcugacgcccaccuggcggguguacuccaccgggagcaacgucuuccagacccgcgccggcugccucaucggggcggagcacgugaacaacuccuacgagugcgacauccccaucggcgccggcaucugcgccagcuaccagacgcagaccaacuccccgcggcgcgcccggagcguggcgucccagagcaucaucgccuacaccaugucccugggggccgagaacagcgucgccuacuccaacaacagcaucgccauccccaccaacuucacgaucuccgugaccaccgagauccugcccgugagcaugaccaagacgagcgucgacugcaccauguacaucugcggcgacuccaccgagugcagcaaccuccugcugcaguacggguccuucugcacccagcucaaccgcgcgcugacgggcaucgccguggagcaggacaagaacacccaggagguguucgcccaggucaagcagaucuacaagacgcccccgaucaaggacuucgggggcuucaacuucagccagauccugcccgaccccuccaagcccagcaagcgguccuucaucgaggaccuccuguucaacaaggugacccuggccgacgccggcuucaucaagcaguacggggacugccucggcgacaucgcggcccgcgaccugaucugcgcccagaaguucaacgggcugaccgugcucccgccccugcugaccgacgagaugaucgcccaguacaccagcgcccuccuggcgggcaccaucacguccggguggaccuucggcgccggcgccgcccugcagauccccuucgcgaugcagauggccuaccgguucaacgggaucggcgucacccagaacgugcucuacgagaaccagaagcugaucgccaaccaguucaacagcgccaucgggaagauccaggacucccugagcuccaccgccagcgcgcucggcaagcugcaggacguggucaaccagaacgcccaggcccugaacacgcucgugaagcagcuguccagcaacuucggggccaucuccagcgugcugaacgacauccucucccgccuggacaaggucgaggccgaggugcagaucgaccggcugaucaccggccgccuccagagccugcagaccuacgugacccagcagcugauccgggcggccgagauccgcgccagcgccaaccucgccgcgaccaagauguccgagugcguccugggccagagcaagcggguggacuucugcgggaagggcuaccaccugauguccuucccccagagcgccccgcacgggguggucuuccuccacgugacguacguccccgcccaggagaagaacuucaccaccgcccccgcgaucugccacgacggcaaggcccacuucccccgcgaggggguguucguguccaacggcacccacugguucgucacgcagcggaacuucuacgagccgcagaucaucaccaccgacaacaccuucgugagcggcaacugcgacguggucaucgggaucgugaacaacacgguguacgacccccugcagcccgagcuggacuccuucaaggaggagcucgacaaguacuucaagaaccacaccagccccgacgucgaccugggcgacaucuccgggaucaacgccagcguggugaacauccagaaggagaucgaccgccugaacgaggucgccaagaaccucaacgagucccugaucgaccugcaggagcucggcaaguacgagcaguacaucaaguggccgugguacaucuggcugggcuucaucgccgggcugaucgcgaucgugauggugaccaucaugcucugcugcaugaccagcugcugcuccugccugaagggcugcugcagcugcggguccugcugcaaguucgacgaggacgacagcgagcccguccugaagggcgugaagcuccacuacacgugaugacucgagcugguacugcaugcacgcaaugcuagcugccccuuucccguccuggguaccccgagucucccccgaccucgggucccagguaugcucccaccuccaccugccccacucaccaccucugcuaguuccagacaccucccaagcacgcagcaaugcagcucaaaacgcuuagccuagccacacccccacgggaaacagcagugauuaaccuuuagcaauaaacgaaaguuuaacuaagcuauacuaaccccaggguuggucaauuucgugccagccacacccuggagcuagcaaaaaaaaaaaaaaaaaaaaaaaaaaaaaaaaaaaaaaaaaaaaaaaaaaaaaaaaaaaaaaaaaaaaaaaaaaaaaaaaaaaaaaaaaaaaaaaaaaaa

SEQ ID NO: 26303 - RNA, 4273 nt, Artificial Sequence
  SARS-CoV-2/Wuhan/WIV05/2019__EPI_ISL_402128 spike protein mRNA gc (1-1273)(L18F_T20N_P26S_D138Y_R190S_K417T_E484K_N501Y_D614G_H655Y _T1027I)
agaauaaacuaguauucuucugguccccacagacucagagagaacccgccaccauguucguguuccugguccuccugccccuggugagcucccagugcgugaacuucaccaaccgcacccagcucccgagcgccuacacgaacuccuucacccggggcgucuacuaccccgacaagguguuccgcagcuccgugcugcacagcacccaggaccuguuccuccccuucuucuccaacgucaccugguuccacgccauccacgugagcgggacgaacggcaccaagcgguucgacaaccccgugcugccguucaacgacggggucuacuucgcguccaccgagaaguccaacaucauccgcggcuggaucuucgggaccacgcuggacuccaagacccagagccuccugaucgugaacaacgccaccaacguggucaucaaggugugcgaguuccaguucugcaacuaccccuuccugggcguguacuaccacaagaacaacaaguccuggauggagagcgaguuccgggucuacuccagcgccaacaacugcaccuucgaguacgugucccagcccuuccucauggaccuggagggcaagcaggggaacuucaagaaccugagcgaguucguguucaagaacaucgacggcuacuucaagaucuacuccaagcacacgcccaucaaccucguccgcgaccugccgcagggguucagcgcccuggagccccucguggaccugcccaucggcaucaacaucacccgguuccagacccugcucgcccugcaccgcagcuaccugacccccggggacuccagcuccggcuggacggcgggcgccgccgccuacuacgugggguaccuccagccgcggaccuuccugcugaaguacaacgagaacggcaccaucaccgacgcggucgacugcgcccucgacccccugagcgagacgaagugcacccugaaguccuucaccguggagaaggggaucuaccagaccagcaacuuccgcgugcagcccacggaguccaucguccgguuccccaacaucaccaaccucugcccguucggcgagguguucaacgccacccgcuucgccagcgucuacgccuggaaccggaagcgcaucuccaacugcguggcggacuacagcgugcuguacaacuccgccagcuucuccaccuucaagugcuacggcgucagccccacgaagcugaacgaccucugcuucaccaacguguacgccgacuccuucgugauccgcggggacgagguccggcagaucgcccccggccagaccgggaccaucgccgacuacaacuacaagcugcccgacgacuucacgggcugcgugaucgcguggaacagcaacaaccuggacuccaaggucgggggcaacuacaacuaccucuaccggcuguuccgcaagagcaaccugaagccguucgagcgggacaucuccaccgagaucuaccaggccggcagcacccccugcaacggggugaagggcuucaacugcuacuucccccuccagagcuacggguuccagcccaccuacggcgugggguaccagccguaccgcguggucgugcuguccuucgagcugcuccacgcccccgccacggugugcggccccaagaaguccaccaaccuggucaagaacaagugcgugaacuucaacuucaacggccugaccgggaccggcgugcucaccgagagcaacaagaaguuccugcccuuccagcaguucgggcgggacaucgccgacacgaccgacgcgguccgcgacccgcagacccuggagauccuggacaucacccccugcagcuucggcgggguguccgugaucacgcccggcaccaacaccagcaaccaggucgccgugcucuaccagggcgugaacugcaccgaggucccgguggccauccacgccgaccagcugacgcccaccuggcgcguguacuccaccgggagcaacgucuuccagacccgggccggcugccugaucggggcggaguacgugaacaacuccuacgagugcgacauccccaucggcgccggcaucugcgccagcuaccagacgcagaccaacagcccccgccgggcccgcagcguggcgucccagagcaucaucgccuacaccaugucccucggggccgagaacagcgucgccuacuccaacaacagcaucgccaucccgaccaacuucacgaucagcgugaccaccgagauccugcccguguccaugaccaagacgagcgucgacugcaccauguacaucugcggcgacuccaccgagugcagcaaccugcuccugcaguacggguccuucugcacccagcugaaccgggcgcucacgggcaucgccguggagcaggacaagaacacccaggagguguucgcccaggucaagcagaucuacaagaccccgcccaucaaggacuucgggggcuucaacuucagccagauccugcccgaccccuccaagcccagcaagcgcuccuucaucgaggaccuccuguucaacaaggugacccuggccgacgccggcuucaucaagcaguacggggacugccugggcgacaucgcggcccgggaccucaucugcgcccagaaguucaacgggcugacggugcugcccccgcuccugaccgacgagaugaucgcccaguacaccagcgcccugcucgcgggcaccaucacguccggguggaccuucggcgccggcgccgcccugcagauccccuucgcgaugcagauggccuaccgcuucaacgggaucggcgucacccagaacgugcuguacgagaaccagaagcucaucgccaaccaguucaacagcgccaucgggaagauccaggacucccugagcuccaccgccagcgcgcugggcaagcuccaggacguggucaaccagaacgcccaggcccugaacacgcuggugaagcagcucuccagcaacuucggggccaucuccagcgugcugaacgacauccugagccggcucgacaaggucgaggccgaggugcagaucgaccgccugaucaccggccggcugcagucccuccagaccuacgugacccagcagcugauccgcgcggccgagauccgggccagcgccaaccuggccgcgaucaagauguccgagugcguccucggccagagcaagcgcguggacuucugcgggaagggcuaccaccugauguccuucccccagagcgcgccccacgggguggucuuccugcacgugaccuacgucccggcccaggagaagaacuucacgaccgcccccgccaucugccacgacggcaaggcccacuucccccgggaggggguguucguguccaacggcacccacugguucgucacccagcgcaacuucuacgagccccagaucaucacgaccgacaacaccuucgugagcggcaacugcgacguggucaucgggaucgugaacaacaccguguacgacccgcuccagcccgagcuggacuccuucaaggaggagcuggacaaguacuucaagaaccacacgagccccgacgucgaccucggcgacaucuccgggaucaacgccagcguggugaacauccagaaggagaucgaccggcugaacgaggucgccaagaaccugaacgagucccucaucgaccugcaggagcugggcaaguacgagcaguacaucaaguggcccugguacaucuggcucggcuucaucgccgggcugaucgcgaucgugauggugaccaucaugcugugcugcaugaccagcugcugcuccugccucaagggcugcugcagcugcggguccugcugcaaguucgacgaggacgacagcgagccgguccugaagggcgugaagcugcacuacaccugaugacucgagcugguacugcaugcacgcaaugcuagcugccccuuucccguccuggguaccccgagucucccccgaccucgggucccagguaugcucccaccuccaccugccccacucaccaccucugcuaguuccagacaccucccaagcacgcagcaaugcagcucaaaacgcuuagccuagccacacccccacgggaaacagcagugauuaaccuuuagcaauaaacgaaaguuuaacuaagcuauacuaaccccaggguuggucaauuucgugccagccacacccuggagcuagcaaaaaaaaaaaaaaaaaaaaaaaaaaaaaaaaaaaaaaaaaaaaaaaaaaaaaaaaaaaaaaaaaaaaaaaaaaaaaaaaaaaaaaaaaaaaaaaaaaaa

SEQ ID NO: 26304 - RNA, 4273 nt, Artificial Sequence
  SARS-CoV-2/Wuhan/WIV05/2019__EPI_ISL_402128 spike protein mRNA gc (1-1273)(S13I_W152C_L452R_D614G)
agaauaaacuaguauucuucugguccccacagacucagagagaacccgccaccauguucguguuccugguccuccugccccuggugagcauccagugcgugaaccucaccacccgcacgcagcugccgcccgccuacaccaacuccuucacccggggcgucuacuaccccgacaagguguuccgcagcuccgugcugcacagcacccaggaccucuuccugcccuucuucuccaacgucacgugguuccacgccauccacgugagcgggaccaacggcaccaagcgguucgacaacccggugcugcccuucaacgacggggucuacuucgcguccaccgagaaguccaacaucauccgcggcuggaucuucgggacgacccucgacagcaagacccagagccugcugaucgugaacaacgccaccaacguggucaucaaggugugcgaguuccaguucugcaacgaccccuuccucggcguguacuaccacaagaacaacaaguccugcauggagagcgaguuccgggucuacuccagcgccaacaacugcacguucgaguacgugucccagcccuuccugauggaccuggagggcaagcaggggaacuucaagaaccuccgcgaguucguguucaagaacaucgacggcuacuucaagaucuacagcaagcacaccccgaucaaccugguccgggaccugccccagggguucuccgcccucgagccccugguggaccugcccaucggcaucaacaucacccgcuuccagacccuccuggcccugcaccggagcuaccucacgccgggggacuccagcagcggcuggaccgcgggcgccgccgccuacuacgugggguaccugcagccccgcaccuuccugcucaaguacaacgagaacggcaccaucacggacgcggucgacugcgcccuggacccccuguccgagaccaagugcacccucaagagcuucaccguggagaaggggaucuaccagacguccaacuuccgggugcagcccaccgagagcaucguccgcuucccgaacaucaccaaccugugccccuucggcgagguguucaacgccacccgguucgccuccgucuacgccuggaaccgcaagcggaucagcaacugcguggcggacuacuccgugcuguacaacagcgccuccuucagcacguucaagugcuacggcgucucccccaccaagcucaacgaccugugcuucaccaacguguacgccgacagcuucgugauccgcggggacgagguccggcagaucgcccccggccagaccgggaagaucgccgacuacaacuacaagcugccggacgacuucacgggcugcgugaucgcguggaacuccaacaaccucgacagcaaggucgggggcaacuacaacuaccgcuaccggcuguuccgcaaguccaaccugaagcccuucgagcgggacaucagcaccgagaucuaccaggccggcuccacccccugcaacgggguggagggcuucaacugcuacuucccccuccagagcuacggguuccagccgaccaacggcgugggguaccagcccuaccgcguggucgugcuguccuucgagcugcuccacgcccccgccacggugugcggccccaagaaguccaccaaccuggucaagaacaagugcgugaacuucaacuucaacggccugaccgggaccggcgugcucaccgagagcaacaagaaguuccugccguuccagcaguucgggcgcgacaucgccgacacgaccgacgcgguccgggacccccagacccuggagauccuggacaucacccccugcagcuucggcggggugagcgugaucacgccgggcaccaacaccuccaaccaggucgccgugcucuaccagggcgugaacugcaccgagguccccguggccauccacgccgaccagcugacgcccaccuggcgcguguacagcaccggguccaacgucuuccagacccgggccggcugccugaucggggcggagcacgugaacaacagcuacgagugcgacauccccaucggcgccggcaucugcgccuccuaccagacgcagaccaacagcccgcgccgggcccgcuccguggcgagccaguccaucaucgccuacaccaugagccucggggccgagaacuccgucgccuacagcaacaacuccaucgccauccccaccaacuucacgaucagcgugaccaccgagauccugcccguguccaugaccaagacgagcgucgacugcaccauguacaucugcggcgacagcaccgagugcuccaaccugcuccugcaguacgggagcuucugcacccagcugaaccgggcgcucacgggcaucgccguggagcaggacaagaacacccaggagguguucgcccaggucaagcagaucuacaagacgcccccgaucaaggacuucgggggcuucaacuucucccagauccugcccgaccccagcaagcccuccaagcgcagcuucaucgaggaccuccuguucaacaaggugacccuggccgacgccggcuucaucaagcaguacggggacugccugggcgacaucgcggcccgggaccucaucugcgcccagaaguucaacgggcugaccgugcugccgccccuccugaccgacgagaugaucgcccaguacaccuccgcccugcucgcgggcaccaucacgagcggguggaccuucggcgccggcgccgcccugcagauccccuucgcgaugcagauggccuaccgcuucaacgggaucggcgucacccagaacgugcuguacgagaaccagaagcucaucgccaaccaguucaacuccgccaucgggaagauccaggacagccuguccagcaccgccuccgcgcugggcaagcuccaggacguggucaaccagaacgcccaggcccugaacacgcuggugaagcagcucagcuccaacuucggggccaucagcuccgugcugaacgacauccugagccggcucgacaaggucgaggccgaggugcagaucgaccgccugaucaccggccggcugcagucccuccagaccuacgugacccagcagcugauccgcgcggccgagauccgggccagcgccaaccuggccgcgaccaagaugagcgagugcguccucggccaguccaagcgcguggacuucugcgggaagggcuaccaccugaugagcuucccccaguccgccccgcacgggguggucuuccugcacgugacguacguccccgcccaggagaagaacuucaccaccgcccccgcgaucugccacgacggcaaggcccacuucccccgggaggggguguucgugagcaacggcacccacugguucgucacgcagcgcaacuucuacgagccgcagaucaucaccaccgacaacaccuucguguccggcaacugcgacguggucaucgggaucgugaacaacacgguguacgacccccuccagcccgagcuggacagcuucaaggaggagcuggacaaguacuucaagaaccacaccucccccgacgucgaccucggcgacaucagcgggaucaacgccuccguggugaacauccagaaggagaucgaccggcugaacgaggucgccaagaaccugaacgagagccucaucgaccugcaggagcugggcaaguacgagcaguacaucaaguggccgugguacaucuggcucggcuucaucgccgggcugaucgcgaucgugauggugaccaucaugcugugcugcaugaccuccugcugcagcugccucaagggcugcugcuccugcgggagcugcugcaaguucgacgaggacgacuccgagcccguccugaagggcgugaagcugcacuacacgugaugacucgagcugguacugcaugcacgcaaugcuagcugccccuuucccguccuggguaccccgagucucccccgaccucgggucccagguaugcucccaccuccaccugccccacucaccaccucugcuaguuccagacaccucccaagcacgcagcaaugcagcucaaaacgcuuagccuagccacacccccacgggaaacagcagugauuaaccuuuagcaauaaacgaaaguuuaacuaagcuauacuaaccccaggguuggucaauuucgugccagccacacccuggagcuagcaaaaaaaaaaaaaaaaaaaaaaaaaaaaaaaaaaaaaaaaaaaaaaaaaaaaaaaaaaaaaaaaaaaaaaaaaaaaaaaaaaaaaaaaaaaaaaaaaaaa

SEQ ID NO: 26305 - RNA, 4273 nt, Artificial Sequence
  SARS-CoV-2/Wuhan/WIV05/2019__EPI_ISL_402128 spike protein mRNA gc (1-1273)
agaauaaacuaguauucuucugguccccacagacucagagagaacccgccaccauguucguguuccuggugcugcugccccuggugagcagccagugcgugaaccugaccacccggacccagcugccaccagccuacaccaacagcuucacccggggcgucuacuaccccgacaagguguuccggagcagcguccugcacagcacccaggaccuguuccugcccuucuucagcaacgugaccugguuccacgccauccacgugagcggcaccaacggcaccaagcgguucgacaaccccgugcugcccuucaacgacggcguguacuucgccagcaccgagaagagcaacaucauccggggcuggaucuucggcaccacccuggacagcaagacccagagccugcugaucgugaauaacgccaccaacguggugaucaaggugugcgaguuccaguucugcaacgaccccuuccugggcguguacuaccacaagaacaacaagagcuggauggagagcgaguuccggguguacagcagcgccaacaacugcaccuucgaguacgugagccagcccuuccugauggaccuggagggcaagcagggcaacuucaagaaccugcgggaguucguguucaagaacaucgacggcuacuucaagaucuacagcaagcacaccccaaucaaccuggugcgggaucugccccagggcuucucagcccuggagccccugguggaccugcccaucggcaucaacaucacccgguuccagacccugcuggcccugcaccggagcuaccugaccccaggcgacagcagcagcggguggacagcaggcgcggcugcuuacuacgugggcuaccugcagccccggaccuuccugcugaaguacaacgagaacggcaccaucaccgacgccguggacugcgcccuggacccucugagcgagaccaagugcacccugaagagcuucaccguggagaagggcaucuaccagaccagcaacuuccgggugcagcccaccgagagcaucgugcgguuccccaacaucaccaaccugugccccuucggcgagguguucaacgccacccgguucgccagcguguacgccuggaaccggaagcggaucagcaacugcguggccgacuacagcgugcuguacaacagcgccagcuucagcaccuucaagugcuacggcgugagccccaccaagcugaacgaccugugcuucaccaacguguacgccgacagcuucgugauccguggcgacgaggugcggcagaucgcacccggccagacaggcaagaucgccgacuacaacuacaagcugcccgacgacuucaccggcugcgugaucgccuggaacagcaacaaccucgacagcaaggugggcggcaacuacaacuaccuguaccggcuguuccggaagagcaaccugaagcccuucgagcgggacaucagcaccgagaucuaccaagccggcuccaccccuugcaacggcguggagggcuucaacugcuacuucccucugcagagcuacggcuuccagcccaccaacggcgugggcuaccagcccuaccgggugguggugcugagcuucgagcugcugcacgccccagccaccguguguggccccaagaagagcaccaaccuggugaagaacaagugcgugaacuucaacuucaacggccuuaccggcaccggcgugcugaccgagagcaacaagaaauuccugcccuuucagcaguucggccgggacaucgccgacaccaccgacgcugugcgggauccccagacccuggagauccuggacaucaccccuugcagcuucggcggcgugagcgugaucaccccaggcaccaacaccagcaaccagguggccgugcuguaccaggacgugaacugcaccgaggugcccguggccauccacgccgaccagcugacacccaccuggcgggucuacagcaccggcagcaacguguuccagacccgggccgguugccugaucggcgccgagcacgugaacaacagcuacgagugcgacauccccaucggcgccggcaucugugccagcuaccagacccagaccaauucaccccggagggcaaggagcguggccagccagagcaucaucgccuacaccaugagccugggcgccgagaacagcguggccuacagcaacaacagcaucgccauccccaccaacuucaccaucagcgugaccaccgagauucugcccgugagcaugaccaagaccagcguggacugcaccauguacaucugcggcgacagcaccgagugcagcaaccugcugcugcaguacggcagcuucugcacccagcugaaccgggcccugaccggcaucgccguggagcaggacaagaacacccaggagguguucgcccaggugaagcagaucuacaagaccccucccaucaaggacuucggcggcuucaacuucagccagauccugcccgaccccagcaagcccagcaagcggagcuucaucgaggaccugcuguucaacaaggugacccuagccgacgccggcuucaucaagcaguacggcgacugccucggcgacauagccgcccgggaccugaucugcgcccagaaguucaacggccugaccgugcugccuccccugcugaccgacgagaugaucgcccaguacaccagcgcccuguuagccggaaccaucaccagcggcuggacuuucggcgcuggagccgcucugcagauccccuucgccaugcagauggccuaccgguucaacggcaucggcgugacccagaacgugcuguacgagaaccagaagcugaucgccaaccaguucaacagcgccaucggcaagauccaggacagccugagcagcaccgcuagcgcccugggcaagcugcaggacguggugaaccagaacgcccaggcccugaacacccuggugaagcagcugagcagcaacuucggcgccaucagcagcgugcugaacgacauccugagccggcuggacaaggucgaggccgaggugcagaucgaccggcugaucacuggccggcugcagagccugcagaccuacgugacccagcagcugauccgggccgccgagauucgggccagcgccaaccuggccgccaccaagaugagcgagugcgugcugggccagagcaagcggguggacuucugcggcaagggcuaccaccugaugagcuuuccccagagcgcaccccacggagugguguuccugcacgugaccuacgugcccgcccaggagaagaacuucaccaccgccccagccaucugccacgacggcaaggcccacuuuccccgggagggcguguucgugagcaacggcacccacugguucgugacccagcggaacuucuacgagccccagaucaucaccaccgacaacaccuucgugagcggcaacugcgacguggugaucggcaucgugaacaacaccguguacgauccccugcagcccgagcuggacagcuucaaggaggagcuggacaaguacuucaagaaucacaccagccccgacguggaccugggcgacaucagcggcaucaacgccagcguggugaacauccagaaggagaucgaucggcugaacgagguggccaagaaccugaacgagagccugaucgaccugcaggagcugggcaaguacgagcaguacaucaaguggcccugguacaucuggcugggcuucaucgccggccugaucgccaucgugauggugaccaucaugcugugcugcaugaccagcugcugcagcugccugaagggcuguugcagcugcggcagcugcugcaaguucgacgaggacgacagcgagcccgugcugaagggcgugaagcugcacuacaccugaugacucgagcugguacugcaugcacgcaaugcuagcugccccuuucccguccuggguaccccgagucucccccgaccucgggucccagguaugcucccaccuccaccugccccacucaccaccucugcuaguuccagacaccucccaagcacgcagcaaugcagcucaaaacgcuuagccuagccacacccccacgggaaacagcagugauuaaccuuuagcaauaaacgaaaguuuaacuaagcuauacuaaccccaggguuggucaauuucgugccagccacacccuggagcuagcaaaaaaaaaaaaaaaaaaaaaaaaaaaaaaaaaaaaaaaaaaaaaaaaaaaaaaaaaaaaaaaaaaaaaaaaaaaaaaaaaaaaaaaaaaaaaaaaaaaa

SEQ ID NO: 26306 - RNA, 4273 nt, Artificial Sequence
  SARS-CoV-2/Wuhan/WIV05/2019__EPI_ISL_402128 spike protein mRNA gc (1-1273)(D614G)
agaauaaacuaguauucuucugguccccacagacucagagagaacccgccaccauguucguguuccuggugcugcugccccuggugagcagccagugcgugaaccugaccacccggacccagcugccaccagccuacaccaacagcuucacccggggcgucuacuaccccgacaagguguuccggagcagcguccugcacagcacccaggaccuguuccugcccuucuucagcaacgugaccugguuccacgccauccacgugagcggcaccaacggcaccaagcgguucgacaaccccgugcugcccuucaacgacggcguguacuucgccagcaccgagaagagcaacaucauccggggcuggaucuucggcaccacccuggacagcaagacccagagccugcugaucgugaauaacgccaccaacguggugaucaaggugugcgaguuccaguucugcaacgaccccuuccugggcguguacuaccacaagaacaacaagagcuggauggagagcgaguuccggguguacagcagcgccaacaacugcaccuucgaguacgugagccagcccuuccugauggaccuggagggcaagcagggcaacuucaagaaccugcgggaguucguguucaagaacaucgacggcuacuucaagaucuacagcaagcacaccccaaucaaccuggugcgggaucugccccagggcuucucagcccuggagccccugguggaccugcccaucggcaucaacaucacccgguuccagacccugcuggcccugcaccggagcuaccugaccccaggcgacagcagcagcggguggacagcaggcgcggcugcuuacuacgugggcuaccugcagccccggaccuuccugcugaaguacaacgagaacggcaccaucaccgacgccguggacugcgcccuggacccucugagcgagaccaagugcacccugaagagcuucaccguggagaagggcaucuaccagaccagcaacuuccgggugcagcccaccgagagcaucgugcgguuccccaacaucaccaaccugugccccuucggcgagguguucaacgccacccgguucgccagcguguacgccuggaaccggaagcggaucagcaacugcguggccgacuacagcgugcuguacaacagcgccagcuucagcaccuucaagugcuacggcgugagccccaccaagcugaacgaccugugcuucaccaacguguacgccgacagcuucgugauccguggcgacgaggugcggcagaucgcacccggccagacaggcaagaucgccgacuacaacuacaagcugcccgacgacuucaccggcugcgugaucgccuggaacagcaacaaccucgacagcaaggugggcggcaacuacaacuaccuguaccggcuguuccggaagagcaaccugaagcccuucgagcgggacaucagcaccgagaucuaccaagccggcuccaccccuugcaacggcguggagggcuucaacugcuacuucccucugcagagcuacggcuuccagcccaccaacggcgugggcuaccagcccuaccgggugguggugcugagcuucgagcugcugcacgccccagccaccguguguggccccaagaagagcaccaaccuggugaagaacaagugcgugaacuucaacuucaacggccuuaccggcaccggcgugcugaccgagagcaacaagaaauuccugcccuuucagcaguucggccgggacaucgccgacaccaccgacgcugugcgggauccccagacccuggagauccuggacaucaccccuugcagcuucggcggcgugagcgugaucaccccaggcaccaacaccagcaaccagguggccgugcuguaccagggcgugaacugcaccgaggugcccguggccauccacgccgaccagcugacacccaccuggcgggucuacagcaccggcagcaacguguuccagacccgggccgguugccugaucggcgccgagcacgugaacaacagcuacgagugcgacauccccaucggcgccggcaucugugccagcuaccagacccagaccaauucaccccggagggcaaggagcguggccagccagagcaucaucgccuacaccaugagccugggcgccgagaacagcguggccuacagcaacaacagcaucgccauccccaccaacuucaccaucagcgugaccaccgagauucugcccgugagcaugaccaagaccagcguggacugcaccauguacaucugcggcgacagcaccgagugcagcaaccugcugcugcaguacggcagcuucugcacccagcugaaccgggcccugaccggcaucgccguggagcaggacaagaacacccaggagguguucgcccaggugaagcagaucuacaagaccccucccaucaaggacuucggcggcuucaacuucagccagauccugcccgaccccagcaagcccagcaagcggagcuucaucgaggaccugcuguucaacaaggugacccuagccgacgccggcuucaucaagcaguacggcgacugccucggcgacauagccgcccgggaccugaucugcgcccagaaguucaacggccugaccgugcugccuccccugcugaccgacgagaugaucgcccaguacaccagcgcccuguuagccggaaccaucaccagcggcuggacuuucggcgcuggagccgcucugcagauccccuucgccaugcagauggccuaccgguucaacggcaucggcgugacccagaacgugcuguacgagaaccagaagcugaucgccaaccaguucaacagcgccaucggcaagauccaggacagccugagcagcaccgcuagcgcccugggcaagcugcaggacguggugaaccagaacgcccaggcccugaacacccuggugaagcagcugagcagcaacuucggcgccaucagcagcgugcugaacgacauccugagccggcuggacaaggucgaggccgaggugcagaucgaccggcugaucacuggccggcugcagagccugcagaccuacgugacccagcagcugauccgggccgccgagauucgggccagcgccaaccuggccgccaccaagaugagcgagugcgugcugggccagagcaagcggguggacuucugcggcaagggcuaccaccugaugagcuuuccccagagcgcaccccacggagugguguuccugcacgugaccuacgugcccgcccaggagaagaacuucaccaccgccccagccaucugccacgacggcaaggcccacuuuccccgggagggcguguucgugagcaacggcacccacugguucgugacccagcggaacuucuacgagccccagaucaucaccaccgacaacaccuucgugagcggcaacugcgacguggugaucggcaucgugaacaacaccguguacgauccccugcagcccgagcuggacagcuucaaggaggagcuggacaaguacuucaagaaucacaccagccccgacguggaccugggcgacaucagcggcaucaacgccagcguggugaacauccagaaggagaucgaucggcugaacgagguggccaagaaccugaacgagagccugaucgaccugcaggagcugggcaaguacgagcaguacaucaaguggcccugguacaucuggcugggcuucaucgccggccugaucgccaucgugauggugaccaucaugcugugcugcaugaccagcugcugcagcugccugaagggcuguugcagcugcggcagcugcugcaaguucgacgaggacgacagcgagcccgugcugaagggcgugaagcugcacuacaccugaugacucgagcugguacugcaugcacgcaaugcuagcugccccuuucccguccuggguaccccgagucucccccgaccucgggucccagguaugcucccaccuccaccugccccacucaccaccucugcuaguuccagacaccucccaagcacgcagcaaugcagcucaaaacgcuuagccuagccacacccccacgggaaacagcagugauuaaccuuuagcaauaaacgaaaguuuaacuaagcuauacuaaccccaggguuggucaauuucgugccagccacacccuggagcuagcaaaaaaaaaaaaaaaaaaaaaaaaaaaaaaaaaaaaaaaaaaaaaaaaaaaaaaaaaaaaaaaaaaaaaaaaaaaaaaaaaaaaaaaaaaaaaaaaaaaa

SEQ ID NO: 26307 - RNA, 4273 nt, Artificial Sequence
  SARS-CoV-2/Wuhan/WIV05/2019__EPI_ISL_402128 spike protein mRNA gc (1-1273)(A222V_D614G)
agaauaaacuaguauucuucugguccccacagacucagagagaacccgccaccauguucguguuccuggugcugcugccccuggugagcagccagugcgugaaccugaccacccggacccagcugccaccagccuacaccaacagcuucacccggggcgucuacuaccccgacaagguguuccggagcagcguccugcacagcacccaggaccuguuccugcccuucuucagcaacgugaccugguuccacgccauccacgugagcggcaccaacggcaccaagcgguucgacaaccccgugcugcccuucaacgacggcguguacuucgccagcaccgagaagagcaacaucauccggggcuggaucuucggcaccacccuggacagcaagacccagagccugcugaucgugaauaacgccaccaacguggugaucaaggugugcgaguuccaguucugcaacgaccccuuccugggcguguacuaccacaagaacaacaagagcuggauggagagcgaguuccggguguacagcagcgccaacaacugcaccuucgaguacgugagccagcccuuccugauggaccuggagggcaagcagggcaacuucaagaaccugcgggaguucguguucaagaacaucgacggcuacuucaagaucuacagcaagcacaccccaaucaaccuggugcgggaucugccccagggcuucucagugcuggagccccugguggaccugcccaucggcaucaacaucacccgguuccagacccugcuggcccugcaccggagcuaccugaccccaggcgacagcagcagcggguggacagcaggcgcggcugcuuacuacgugggcuaccugcagccccggaccuuccugcugaaguacaacgagaacggcaccaucaccgacgccguggacugcgcccuggacccucugagcgagaccaagugcacccugaagagcuucaccguggagaagggcaucuaccagaccagcaacuuccgggugcagcccaccgagagcaucgugcgguuccccaacaucaccaaccugugccccuucggcgagguguucaacgccacccgguucgccagcguguacgccuggaaccggaagcggaucagcaacugcguggccgacuacagcgugcuguacaacagcgccagcuucagcaccuucaagugcuacggcgugagccccaccaagcugaacgaccugugcuucaccaacguguacgccgacagcuucgugauccguggcgacgaggugcggcagaucgcacccggccagacaggcaagaucgccgacuacaacuacaagcugcccgacgacuucaccggcugcgugaucgccuggaacagcaacaaccucgacagcaaggugggcggcaacuacaacuaccuguaccggcuguuccggaagagcaaccugaagcccuucgagcgggacaucagcaccgagaucuaccaagccggcuccaccccuugcaacggcguggagggcuucaacugcuacuucccucugcagagcuacggcuuccagcccaccaacggcgugggcuaccagcccuaccgggugguggugcugagcuucgagcugcugcacgccccagccaccguguguggccccaagaagagcaccaaccuggugaagaacaagugcgugaacuucaacuucaacggccuuaccggcaccggcgugcugaccgagagcaacaagaaauuccugcccuuucagcaguucggccgggacaucgccgacaccaccgacgcugugcgggauccccagacccuggagauccuggacaucaccccuugcagcuucggcggcgugagcgugaucaccccaggcaccaacaccagcaaccagguggccgugcuguaccagggcgugaacugcaccgaggugcccguggccauccacgccgaccagcugacacccaccuggcgggucuacagcaccggcagcaacguguuccagacccgggccgguugccugaucggcgccgagcacgugaacaacagcuacgagugcgacauccccaucggcgccggcaucugugccagcuaccagacccagaccaauucaccccggagggcaaggagcguggccagccagagcaucaucgccuacaccaugagccugggcgccgagaacagcguggccuacagcaacaacagcaucgccauccccaccaacuucaccaucagcgugaccaccgagauucugcccgugagcaugaccaagaccagcguggacugcaccauguacaucugcggcgacagcaccgagugcagcaaccugcugcugcaguacggcagcuucugcacccagcugaaccgggcccugaccggcaucgccguggagcaggacaagaacacccaggagguguucgcccaggugaagcagaucuacaagaccccucccaucaaggacuucggcggcuucaacuucagccagauccugcccgaccccagcaagcccagcaagcggagcuucaucgaggaccugcuguucaacaaggugacccuagccgacgccggcuucaucaagcaguacggcgacugccucggcgacauagccgcccgggaccugaucugcgcccagaaguucaacggccugaccgugcugccuccccugcugaccgacgagaugaucgcccaguacaccagcgcccuguuagccggaaccaucaccagcggcuggacuuucggcgcuggagccgcucugcagauccccuucgccaugcagauggccuaccgguucaacggcaucggcgugacccagaacgugcuguacgagaaccagaagcugaucgccaaccaguucaacagcgccaucggcaagauccaggacagccugagcagcaccgcuagcgcccugggcaagcugcaggacguggugaaccagaacgcccaggcccugaacacccuggugaagcagcugagcagcaacuucggcgccaucagcagcgugcugaacgacauccugagccggcuggacaaggucgaggccgaggugcagaucgaccggcugaucacuggccggcugcagagccugcagaccuacgugacccagcagcugauccgggccgccgagauucgggccagcgccaaccuggccgccaccaagaugagcgagugcgugcugggccagagcaagcggguggacuucugcggcaagggcuaccaccugaugagcuuuccccagagcgcaccccacggagugguguuccugcacgugaccuacgugcccgcccaggagaagaacuucaccaccgccccagccaucugccacgacggcaaggcccacuuuccccgggagggcguguucgugagcaacggcacccacugguucgugacccagcggaacuucuacgagccccagaucaucaccaccgacaacaccuucgugagcggcaacugcgacguggugaucggcaucgugaacaacaccguguacgauccccugcagcccgagcuggacagcuucaaggaggagcuggacaaguacuucaagaaucacaccagccccgacguggaccugggcgacaucagcggcaucaacgccagcguggugaacauccagaaggagaucgaucggcugaacgagguggccaagaaccugaacgagagccugaucgaccugcaggagcugggcaaguacgagcaguacaucaaguggcccugguacaucuggcugggcuucaucgccggccugaucgccaucgugauggugaccaucaugcugugcugcaugaccagcugcugcagcugccugaagggcuguugcagcugcggcagcugcugcaaguucgacgaggacgacagcgagcccgugcugaagggcgugaagcugcacuacaccugaugacucgagcugguacugcaugcacgcaaugcuagcugccccuuucccguccuggguaccccgagucucccccgaccucgggucccagguaugcucccaccuccaccugccccacucaccaccucugcuaguuccagacaccucccaagcacgcagcaaugcagcucaaaacgcuuagccuagccacacccccacgggaaacagcagugauuaaccuuuagcaauaaacgaaaguuuaacuaagcuauacuaaccccaggguuggucaauuucgugccagccacacccuggagcuagcaaaaaaaaaaaaaaaaaaaaaaaaaaaaaaaaaaaaaaaaaaaaaaaaaaaaaaaaaaaaaaaaaaaaaaaaaaaaaaaaaaaaaaaaaaaaaaaaaaaa

SEQ ID NO: 26308 - RNA, 4273 nt, Artificial Sequence
  SARS-CoV-2/Wuhan/WIV05/2019__EPI_ISL_402128 spike protein mRNA gc (1-1273)(N439K_D614G)
agaauaaacuaguauucuucugguccccacagacucagagagaacccgccaccauguucguguuccuggugcugcugccccuggugagcagccagugcgugaaccugaccacccggacccagcugccaccagccuacaccaacagcuucacccggggcgucuacuaccccgacaagguguuccggagcagcguccugcacagcacccaggaccuguuccugcccuucuucagcaacgugaccugguuccacgccauccacgugagcggcaccaacggcaccaagcgguucgacaaccccgugcugcccuucaacgacggcguguacuucgccagcaccgagaagagcaacaucauccggggcuggaucuucggcaccacccuggacagcaagacccagagccugcugaucgugaauaacgccaccaacguggugaucaaggugugcgaguuccaguucugcaacgaccccuuccugggcguguacuaccacaagaacaacaagagcuggauggagagcgaguuccggguguacagcagcgccaacaacugcaccuucgaguacgugagccagcccuuccugauggaccuggagggcaagcagggcaacuucaagaaccugcgggaguucguguucaagaacaucgacggcuacuucaagaucuacagcaagcacaccccaaucaaccuggugcgggaucugccccagggcuucucagcccuggagccccugguggaccugcccaucggcaucaacaucacccgguuccagacccugcuggcccugcaccggagcuaccugaccccaggcgacagcagcagcggguggacagcaggcgcggcugcuuacuacgugggcuaccugcagccccggaccuuccugcugaaguacaacgagaacggcaccaucaccgacgccguggacugcgcccuggacccucugagcgagaccaagugcacccugaagagcuucaccguggagaagggcaucuaccagaccagcaacuuccgggugcagcccaccgagagcaucgugcgguuccccaacaucaccaaccugugccccuucggcgagguguucaacgccacccgguucgccagcguguacgccuggaaccggaagcggaucagcaacugcguggccgacuacagcgugcuguacaacagcgccagcuucagcaccuucaagugcuacggcgugagccccaccaagcugaacgaccugugcuucaccaacguguacgccgacagcuucgugauccguggcgacgaggugcggcagaucgcacccggccagacaggcaagaucgccgacuacaacuacaagcugcccgacgacuucaccggcugcgugaucgccuggaacagcaagaaccucgacagcaaggugggcggcaacuacaacuaccuguaccggcuguuccggaagagcaaccugaagcccuucgagcgggacaucagcaccgagaucuaccaagccggcuccaccccuugcaacggcguggagggcuucaacugcuacuucccucugcagagcuacggcuuccagcccaccaacggcgugggcuaccagcccuaccgggugguggugcugagcuucgagcugcugcacgccccagccaccguguguggccccaagaagagcaccaaccuggugaagaacaagugcgugaacuucaacuucaacggccuuaccggcaccggcgugcugaccgagagcaacaagaaauuccugcccuuucagcaguucggccgggacaucgccgacaccaccgacgcugugcgggauccccagacccuggagauccuggacaucaccccuugcagcuucggcggcgugagcgugaucaccccaggcaccaacaccagcaaccagguggccgugcuguaccagggcgugaacugcaccgaggugcccguggccauccacgccgaccagcugacacccaccuggcgggucuacagcaccggcagcaacguguuccagacccgggccgguugccugaucggcgccgagcacgugaacaacagcuacgagugcgacauccccaucggcgccggcaucugugccagcuaccagacccagaccaauucaccccggagggcaaggagcguggccagccagagcaucaucgccuacaccaugagccugggcgccgagaacagcguggccuacagcaacaacagcaucgccauccccaccaacuucaccaucagcgugaccaccgagauucugcccgugagcaugaccaagaccagcguggacugcaccauguacaucugcggcgacagcaccgagugcagcaaccugcugcugcaguacggcagcuucugcacccagcugaaccgggcccugaccggcaucgccguggagcaggacaagaacacccaggagguguucgcccaggugaagcagaucuacaagaccccucccaucaaggacuucggcggcuucaacuucagccagauccugcccgaccccagcaagcccagcaagcggagcuucaucgaggaccugcuguucaacaaggugacccuagccgacgccggcuucaucaagcaguacggcgacugccucggcgacauagccgcccgggaccugaucugcgcccagaaguucaacggccugaccgugcugccuccccugcugaccgacgagaugaucgcccaguacaccagcgcccuguuagccggaaccaucaccagcggcuggacuuucggcgcuggagccgcucugcagauccccuucgccaugcagauggccuaccgguucaacggcaucggcgugacccagaacgugcuguacgagaaccagaagcugaucgccaaccaguucaacagcgccaucggcaagauccaggacagccugagcagcaccgcuagcgcccugggcaagcugcaggacguggugaaccagaacgcccaggcccugaacacccuggugaagcagcugagcagcaacuucggcgccaucagcagcgugcugaacgacauccugagccggcuggacaaggucgaggccgaggugcagaucgaccggcugaucacuggccggcugcagagccugcagaccuacgugacccagcagcugauccgggccgccgagauucgggccagcgccaaccuggccgccaccaagaugagcgagugcgugcugggccagagcaagcggguggacuucugcggcaagggcuaccaccugaugagcuuuccccagagcgcaccccacggagugguguuccugcacgugaccuacgugcccgcccaggagaagaacuucaccaccgccccagccaucugccacgacggcaaggcccacuuuccccgggagggcguguucgugagcaacggcacccacugguucgugacccagcggaacuucuacgagccccagaucaucaccaccgacaacaccuucgugagcggcaacugcgacguggugaucggcaucgugaacaacaccguguacgauccccugcagcccgagcuggacagcuucaaggaggagcuggacaaguacuucaagaaucacaccagccccgacguggaccugggcgacaucagcggcaucaacgccagcguggugaacauccagaaggagaucgaucggcugaacgagguggccaagaaccugaacgagagccugaucgaccugcaggagcugggcaaguacgagcaguacaucaaguggcccugguacaucuggcugggcuucaucgccggccugaucgccaucgugauggugaccaucaugcugugcugcaugaccagcugcugcagcugccugaagggcuguugcagcugcggcagcugcugcaaguucgacgaggacgacagcgagcccgugcugaagggcgugaagcugcacuacaccugaugacucgagcugguacugcaugcacgcaaugcuagcugccccuuucccguccuggguaccccgagucucccccgaccucgggucccagguaugcucccaccuccaccugccccacucaccaccucugcuaguuccagacaccucccaagcacgcagcaaugcagcucaaaacgcuuagccuagccacacccccacgggaaacagcagugauuaaccuuuagcaauaaacgaaaguuuaacuaagcuauacuaaccccaggguuggucaauuucgugccagccacacccuggagcuagcaaaaaaaaaaaaaaaaaaaaaaaaaaaaaaaaaaaaaaaaaaaaaaaaaaaaaaaaaaaaaaaaaaaaaaaaaaaaaaaaaaaaaaaaaaaaaaaaaaaa

SEQ ID NO: 26309 - RNA, 4273 nt, Artificial Sequence
  SARS-CoV-2/Wuhan/WIV05/2019__EPI_ISL_402128 spike protein mRNA gc (1-1273)(S477N_D614G)
agaauaaacuaguauucuucugguccccacagacucagagagaacccgccaccauguucguguuccuggugcugcugccccuggugagcagccagugcgugaaccugaccacccggacccagcugccaccagccuacaccaacagcuucacccggggcgucuacuaccccgacaagguguuccggagcagcguccugcacagcacccaggaccuguuccugcccuucuucagcaacgugaccugguuccacgccauccacgugagcggcaccaacggcaccaagcgguucgacaaccccgugcugcccuucaacgacggcguguacuucgccagcaccgagaagagcaacaucauccggggcuggaucuucggcaccacccuggacagcaagacccagagccugcugaucgugaauaacgccaccaacguggugaucaaggugugcgaguuccaguucugcaacgaccccuuccugggcguguacuaccacaagaacaacaagagcuggauggagagcgaguuccggguguacagcagcgccaacaacugcaccuucgaguacgugagccagcccuuccugauggaccuggagggcaagcagggcaacuucaagaaccugcgggaguucguguucaagaacaucgacggcuacuucaagaucuacagcaagcacaccccaaucaaccuggugcgggaucugccccagggcuucucagcccuggagccccugguggaccugcccaucggcaucaacaucacccgguuccagacccugcuggcccugcaccggagcuaccugaccccaggcgacagcagcagcggguggacagcaggcgcggcugcuuacuacgugggcuaccugcagccccggaccuuccugcugaaguacaacgagaacggcaccaucaccgacgccguggacugcgcccuggacccucugagcgagaccaagugcacccugaagagcuucaccguggagaagggcaucuaccagaccagcaacuuccgggugcagcccaccgagagcaucgugcgguuccccaacaucaccaaccugugccccuucggcgagguguucaacgccacccgguucgccagcguguacgccuggaaccggaagcggaucagcaacugcguggccgacuacagcgugcuguacaacagcgccagcuucagcaccuucaagugcuacggcgugagccccaccaagcugaacgaccugugcuucaccaacguguacgccgacagcuucgugauccguggcgacgaggugcggcagaucgcacccggccagacaggcaagaucgccgacuacaacuacaagcugcccgacgacuucaccggcugcgugaucgccuggaacagcaacaaccucgacagcaaggugggcggcaacuacaacuaccuguaccggcuguuccggaagagcaaccugaagcccuucgagcgggacaucagcaccgagaucuaccaagccggcaacaccccuugcaacggcguggagggcuucaacugcuacuucccucugcagagcuacggcuuccagcccaccaacggcgugggcuaccagcccuaccgggugguggugcugagcuucgagcugcugcacgccccagccaccguguguggccccaagaagagcaccaaccuggugaagaacaagugcgugaacuucaacuucaacggccuuaccggcaccggcgugcugaccgagagcaacaagaaauuccugcccuuucagcaguucggccgggacaucgccgacaccaccgacgcugugcgggauccccagacccuggagauccuggacaucaccccuugcagcuucggcggcgugagcgugaucaccccaggcaccaacaccagcaaccagguggccgugcuguaccagggcgugaacugcaccgaggugcccguggccauccacgccgaccagcugacacccaccuggcgggucuacagcaccggcagcaacguguuccagacccgggccgguugccugaucggcgccgagcacgugaacaacagcuacgagugcgacauccccaucggcgccggcaucugugccagcuaccagacccagaccaauucaccccggagggcaaggagcguggccagccagagcaucaucgccuacaccaugagccugggcgccgagaacagcguggccuacagcaacaacagcaucgccauccccaccaacuucaccaucagcgugaccaccgagauucugcccgugagcaugaccaagaccagcguggacugcaccauguacaucugcggcgacagcaccgagugcagcaaccugcugcugcaguacggcagcuucugcacccagcugaaccgggcccugaccggcaucgccguggagcaggacaagaacacccaggagguguucgcccaggugaagcagaucuacaagaccccucccaucaaggacuucggcggcuucaacuucagccagauccugcccgaccccagcaagcccagcaagcggagcuucaucgaggaccugcuguucaacaaggugacccuagccgacgccggcuucaucaagcaguacggcgacugccucggcgacauagccgcccgggaccugaucugcgcccagaaguucaacggccugaccgugcugccuccccugcugaccgacgagaugaucgcccaguacaccagcgcccuguuagccggaaccaucaccagcggcuggacuuucggcgcuggagccgcucugcagauccccuucgccaugcagauggccuaccgguucaacggcaucggcgugacccagaacgugcuguacgagaaccagaagcugaucgccaaccaguucaacagcgccaucggcaagauccaggacagccugagcagcaccgcuagcgcccugggcaagcugcaggacguggugaaccagaacgcccaggcccugaacacccuggugaagcagcugagcagcaacuucggcgccaucagcagcgugcugaacgacauccugagccggcuggacaaggucgaggccgaggugcagaucgaccggcugaucacuggccggcugcagagccugcagaccuacgugacccagcagcugauccgggccgccgagauucgggccagcgccaaccuggccgccaccaagaugagcgagugcgugcugggccagagcaagcggguggacuucugcggcaagggcuaccaccugaugagcuuuccccagagcgcaccccacggagugguguuccugcacgugaccuacgugcccgcccaggagaagaacuucaccaccgccccagccaucugccacgacggcaaggcccacuuuccccgggagggcguguucgugagcaacggcacccacugguucgugacccagcggaacuucuacgagccccagaucaucaccaccgacaacaccuucgugagcggcaacugcgacguggugaucggcaucgugaacaacaccguguacgauccccugcagcccgagcuggacagcuucaaggaggagcuggacaaguacuucaagaaucacaccagccccgacguggaccugggcgacaucagcggcaucaacgccagcguggugaacauccagaaggagaucgaucggcugaacgagguggccaagaaccugaacgagagccugaucgaccugcaggagcugggcaaguacgagcaguacaucaaguggcccugguacaucuggcugggcuucaucgccggccugaucgccaucgugauggugaccaucaugcugugcugcaugaccagcugcugcagcugccugaagggcuguugcagcugcggcagcugcugcaaguucgacgaggacgacagcgagcccgugcugaagggcgugaagcugcacuacaccugaugacucgagcugguacugcaugcacgcaaugcuagcugccccuuucccguccuggguaccccgagucucccccgaccucgggucccagguaugcucccaccuccaccugccccacucaccaccucugcuaguuccagacaccucccaagcacgcagcaaugcagcucaaaacgcuuagccuagccacacccccacgggaaacagcagugauuaaccuuuagcaauaaacgaaaguuuaacuaagcuauacuaaccccaggguuggucaauuucgugccagccacacccuggagcuagcaaaaaaaaaaaaaaaaaaaaaaaaaaaaaaaaaaaaaaaaaaaaaaaaaaaaaaaaaaaaaaaaaaaaaaaaaaaaaaaaaaaaaaaaaaaaaaaaaaaa

SEQ ID NO: 26310 - RNA, 4273 nt, Artificial Sequence
  SARS-CoV-2/Wuhan/WIV05/2019__EPI_ISL_402128 spike protein mRNA gc (1-1273)(N501Y_D614G)
agaauaaacuaguauucuucugguccccacagacucagagagaacccgccaccauguucguguuccuggugcugcugccccuggugagcagccagugcgugaaccugaccacccggacccagcugccaccagccuacaccaacagcuucacccggggcgucuacuaccccgacaagguguuccggagcagcguccugcacagcacccaggaccuguuccugcccuucuucagcaacgugaccugguuccacgccauccacgugagcggcaccaacggcaccaagcgguucgacaaccccgugcugcccuucaacgacggcguguacuucgccagcaccgagaagagcaacaucauccggggcuggaucuucggcaccacccuggacagcaagacccagagccugcugaucgugaauaacgccaccaacguggugaucaaggugugcgaguuccaguucugcaacgaccccuuccugggcguguacuaccacaagaacaacaagagcuggauggagagcgaguuccggguguacagcagcgccaacaacugcaccuucgaguacgugagccagcccuuccugauggaccuggagggcaagcagggcaacuucaagaaccugcgggaguucguguucaagaacaucgacggcuacuucaagaucuacagcaagcacaccccaaucaaccuggugcgggaucugccccagggcuucucagcccuggagccccugguggaccugcccaucggcaucaacaucacccgguuccagacccugcuggcccugcaccggagcuaccugaccccaggcgacagcagcagcggguggacagcaggcgcggcugcuuacuacgugggcuaccugcagccccggaccuuccugcugaaguacaacgagaacggcaccaucaccgacgccguggacugcgcccuggacccucugagcgagaccaagugcacccugaagagcuucaccguggagaagggcaucuaccagaccagcaacuuccgggugcagcccaccgagagcaucgugcgguuccccaacaucaccaaccugugccccuucggcgagguguucaacgccacccgguucgccagcguguacgccuggaaccggaagcggaucagcaacugcguggccgacuacagcgugcuguacaacagcgccagcuucagcaccuucaagugcuacggcgugagccccaccaagcugaacgaccugugcuucaccaacguguacgccgacagcuucgugauccguggcgacgaggugcggcagaucgcacccggccagacaggcaagaucgccgacuacaacuacaagcugcccgacgacuucaccggcugcgugaucgccuggaacagcaacaaccucgacagcaaggugggcggcaacuacaacuaccuguaccggcuguuccggaagagcaaccugaagcccuucgagcgggacaucagcaccgagaucuaccaagccggcuccaccccuugcaacggcguggagggcuucaacugcuacuucccucugcagagcuacggcuuccagcccaccuacggcgugggcuaccagcccuaccgggugguggugcugagcuucgagcugcugcacgccccagccaccguguguggccccaagaagagcaccaaccuggugaagaacaagugcgugaacuucaacuucaacggccuuaccggcaccggcgugcugaccgagagcaacaagaaauuccugcccuuucagcaguucggccgggacaucgccgacaccaccgacgcugugcgggauccccagacccuggagauccuggacaucaccccuugcagcuucggcggcgugagcgugaucaccccaggcaccaacaccagcaaccagguggccgugcuguaccagggcgugaacugcaccgaggugcccguggccauccacgccgaccagcugacacccaccuggcgggucuacagcaccggcagcaacguguuccagacccgggccgguugccugaucggcgccgagcacgugaacaacagcuacgagugcgacauccccaucggcgccggcaucugugccagcuaccagacccagaccaauucaccccggagggcaaggagcguggccagccagagcaucaucgccuacaccaugagccugggcgccgagaacagcguggccuacagcaacaacagcaucgccauccccaccaacuucaccaucagcgugaccaccgagauucugcccgugagcaugaccaagaccagcguggacugcaccauguacaucugcggcgacagcaccgagugcagcaaccugcugcugcaguacggcagcuucugcacccagcugaaccgggcccugaccggcaucgccguggagcaggacaagaacacccaggagguguucgcccaggugaagcagaucuacaagaccccucccaucaaggacuucggcggcuucaacuucagccagauccugcccgaccccagcaagcccagcaagcggagcuucaucgaggaccugcuguucaacaaggugacccuagccgacgccggcuucaucaagcaguacggcgacugccucggcgacauagccgcccgggaccugaucugcgcccagaaguucaacggccugaccgugcugccuccccugcugaccgacgagaugaucgcccaguacaccagcgcccuguuagccggaaccaucaccagcggcuggacuuucggcgcuggagccgcucugcagauccccuucgccaugcagauggccuaccgguucaacggcaucggcgugacccagaacgugcuguacgagaaccagaagcugaucgccaaccaguucaacagcgccaucggcaagauccaggacagccugagcagcaccgcuagcgcccugggcaagcugcaggacguggugaaccagaacgcccaggcccugaacacccuggugaagcagcugagcagcaacuucggcgccaucagcagcgugcugaacgacauccugagccggcuggacaaggucgaggccgaggugcagaucgaccggcugaucacuggccggcugcagagccugcagaccuacgugacccagcagcugauccgggccgccgagauucgggccagcgccaaccuggccgccaccaagaugagcgagugcgugcugggccagagcaagcggguggacuucugcggcaagggcuaccaccugaugagcuuuccccagagcgcaccccacggagugguguuccugcacgugaccuacgugcccgcccaggagaagaacuucaccaccgccccagccaucugccacgacggcaaggcccacuuuccccgggagggcguguucgugagcaacggcacccacugguucgugacccagcggaacuucuacgagccccagaucaucaccaccgacaacaccuucgugagcggcaacugcgacguggugaucggcaucgugaacaacaccguguacgauccccugcagcccgagcuggacagcuucaaggaggagcuggacaaguacuucaagaaucacaccagccccgacguggaccugggcgacaucagcggcaucaacgccagcguggugaacauccagaaggagaucgaucggcugaacgagguggccaagaaccugaacgagagccugaucgaccugcaggagcugggcaaguacgagcaguacaucaaguggcccugguacaucuggcugggcuucaucgccggccugaucgccaucgugauggugaccaucaugcugugcugcaugaccagcugcugcagcugccugaagggcuguugcagcugcggcagcugcugcaaguucgacgaggacgacagcgagcccgugcugaagggcgugaagcugcacuacaccugaugacucgagcugguacugcaugcacgcaaugcuagcugccccuuucccguccuggguaccccgagucucccccgaccucgggucccagguaugcucccaccuccaccugccccacucaccaccucugcuaguuccagacaccucccaagcacgcagcaaugcagcucaaaacgcuuagccuagccacacccccacgggaaacagcagugauuaaccuuuagcaauaaacgaaaguuuaacuaagcuauacuaaccccaggguuggucaauuucgugccagccacacccuggagcuagcaaaaaaaaaaaaaaaaaaaaaaaaaaaaaaaaaaaaaaaaaaaaaaaaaaaaaaaaaaaaaaaaaaaaaaaaaaaaaaaaaaaaaaaaaaaaaaaaaaaa

SEQ ID NO: 26311 - RNA, 4267 nt, Artificial Sequence
  SARS-CoV-2/Wuhan/WIV05/2019__EPI_ISL_402128 spike protein mRNA gc (1-1273)(H69del_V70del_D614G)
agaauaaacuaguauucuucugguccccacagacucagagagaacccgccaccauguucguguuccuggugcugcugccccuggugagcagccagugcgugaaccugaccacccggacccagcugccaccagccuacaccaacagcuucacccggggcgucuacuaccccgacaagguguuccggagcagcguccugcacagcacccaggaccuguuccugcccuucuucagcaacgugaccugguuccacgccaucagcggcaccaacggcaccaagcgguucgacaaccccgugcugcccuucaacgacggcguguacuucgccagcaccgagaagagcaacaucauccggggcuggaucuucggcaccacccuggacagcaagacccagagccugcugaucgugaauaacgccaccaacguggugaucaaggugugcgaguuccaguucugcaacgaccccuuccugggcguguacuaccacaagaacaacaagagcuggauggagagcgaguuccggguguacagcagcgccaacaacugcaccuucgaguacgugagccagcccuuccugauggaccuggagggcaagcagggcaacuucaagaaccugcgggaguucguguucaagaacaucgacggcuacuucaagaucuacagcaagcacaccccaaucaaccuggugcgggaucugccccagggcuucucagcccuggagccccugguggaccugcccaucggcaucaacaucacccgguuccagacccugcuggcccugcaccggagcuaccugaccccaggcgacagcagcagcggguggacagcaggcgcggcugcuuacuacgugggcuaccugcagccccggaccuuccugcugaaguacaacgagaacggcaccaucaccgacgccguggacugcgcccuggacccucugagcgagaccaagugcacccugaagagcuucaccguggagaagggcaucuaccagaccagcaacuuccgggugcagcccaccgagagcaucgugcgguuccccaacaucaccaaccugugccccuucggcgagguguucaacgccacccgguucgccagcguguacgccuggaaccggaagcggaucagcaacugcguggccgacuacagcgugcuguacaacagcgccagcuucagcaccuucaagugcuacggcgugagccccaccaagcugaacgaccugugcuucaccaacguguacgccgacagcuucgugauccguggcgacgaggugcggcagaucgcacccggccagacaggcaagaucgccgacuacaacuacaagcugcccgacgacuucaccggcugcgugaucgccuggaacagcaacaaccucgacagcaaggugggcggcaacuacaacuaccuguaccggcuguuccggaagagcaaccugaagcccuucgagcgggacaucagcaccgagaucuaccaagccggcuccaccccuugcaacggcguggagggcuucaacugcuacuucccucugcagagcuacggcuuccagcccaccaacggcgugggcuaccagcccuaccgggugguggugcugagcuucgagcugcugcacgccccagccaccguguguggccccaagaagagcaccaaccuggugaagaacaagugcgugaacuucaacuucaacggccuuaccggcaccggcgugcugaccgagagcaacaagaaauuccugcccuuucagcaguucggccgggacaucgccgacaccaccgacgcugugcgggauccccagacccuggagauccuggacaucaccccuugcagcuucggcggcgugagcgugaucaccccaggcaccaacaccagcaaccagguggccgugcuguaccagggcgugaacugcaccgaggugcccguggccauccacgccgaccagcugacacccaccuggcgggucuacagcaccggcagcaacguguuccagacccgggccgguugccugaucggcgccgagcacgugaacaacagcuacgagugcgacauccccaucggcgccggcaucugugccagcuaccagacccagaccaauucaccccggagggcaaggagcguggccagccagagcaucaucgccuacaccaugagccugggcgccgagaacagcguggccuacagcaacaacagcaucgccauccccaccaacuucaccaucagcgugaccaccgagauucugcccgugagcaugaccaagaccagcguggacugcaccauguacaucugcggcgacagcaccgagugcagcaaccugcugcugcaguacggcagcuucugcacccagcugaaccgggcccugaccggcaucgccguggagcaggacaagaacacccaggagguguucgcccaggugaagcagaucuacaagaccccucccaucaaggacuucggcggcuucaacuucagccagauccugcccgaccccagcaagcccagcaagcggagcuucaucgaggaccugcuguucaacaaggugacccuagccgacgccggcuucaucaagcaguacggcgacugccucggcgacauagccgcccgggaccugaucugcgcccagaaguucaacggccugaccgugcugccuccccugcugaccgacgagaugaucgcccaguacaccagcgcccuguuagccggaaccaucaccagcggcuggacuuucggcgcuggagccgcucugcagauccccuucgccaugcagauggccuaccgguucaacggcaucggcgugacccagaacgugcuguacgagaaccagaagcugaucgccaaccaguucaacagcgccaucggcaagauccaggacagccugagcagcaccgcuagcgcccugggcaagcugcaggacguggugaaccagaacgcccaggcccugaacacccuggugaagcagcugagcagcaacuucggcgccaucagcagcgugcugaacgacauccugagccggcuggacaaggucgaggccgaggugcagaucgaccggcugaucacuggccggcugcagagccugcagaccuacgugacccagcagcugauccgggccgccgagauucgggccagcgccaaccuggccgccaccaagaugagcgagugcgugcugggccagagcaagcggguggacuucugcggcaagggcuaccaccugaugagcuuuccccagagcgcaccccacggagugguguuccugcacgugaccuacgugcccgcccaggagaagaacuucaccaccgccccagccaucugccacgacggcaaggcccacuuuccccgggagggcguguucgugagcaacggcacccacugguucgugacccagcggaacuucuacgagccccagaucaucaccaccgacaacaccuucgugagcggcaacugcgacguggugaucggcaucgugaacaacaccguguacgauccccugcagcccgagcuggacagcuucaaggaggagcuggacaaguacuucaagaaucacaccagccccgacguggaccugggcgacaucagcggcaucaacgccagcguggugaacauccagaaggagaucgaucggcugaacgagguggccaagaaccugaacgagagccugaucgaccugcaggagcugggcaaguacgagcaguacaucaaguggcccugguacaucuggcugggcuucaucgccggccugaucgccaucgugauggugaccaucaugcugugcugcaugaccagcugcugcagcugccugaagggcuguugcagcugcggcagcugcugcaaguucgacgaggacgacagcgagcccgugcugaagggcgugaagcugcacuacaccugaugacucgagcugguacugcaugcacgcaaugcuagcugccccuuucccguccuggguaccccgagucucccccgaccucgggucccagguaugcucccaccuccaccugccccacucaccaccucugcuaguuccagacaccucccaagcacgcagcaaugcagcucaaaacgcuuagccuagccacacccccacgggaaacagcagugauuaaccuuuagcaauaaacgaaaguuuaacuaagcuauacuaaccccaggguuggucaauuucgugccagccacacccuggagcuagcaaaaaaaaaaaaaaaaaaaaaaaaaaaaaaaaaaaaaaaaaaaaaaaaaaaaaaaaaaaaaaaaaaaaaaaaaaaaaaaaaaaaaaaaaaaaaaaaaaaa

SEQ ID NO: 26312 - RNA, 4273 nt, Artificial Sequence
  SARS-CoV-2/Wuhan/WIV05/2019__EPI_ISL_402128 spike protein mRNA gc (1-1273)(Y453F_D614G)
agaauaaacuaguauucuucugguccccacagacucagagagaacccgccaccauguucguguuccuggugcugcugccccuggugagcagccagugcgugaaccugaccacccggacccagcugccaccagccuacaccaacagcuucacccggggcgucuacuaccccgacaagguguuccggagcagcguccugcacagcacccaggaccuguuccugcccuucuucagcaacgugaccugguuccacgccauccacgugagcggcaccaacggcaccaagcgguucgacaaccccgugcugcccuucaacgacggcguguacuucgccagcaccgagaagagcaacaucauccggggcuggaucuucggcaccacccuggacagcaagacccagagccugcugaucgugaauaacgccaccaacguggugaucaaggugugcgaguuccaguucugcaacgaccccuuccugggcguguacuaccacaagaacaacaagagcuggauggagagcgaguuccggguguacagcagcgccaacaacugcaccuucgaguacgugagccagcccuuccugauggaccuggagggcaagcagggcaacuucaagaaccugcgggaguucguguucaagaacaucgacggcuacuucaagaucuacagcaagcacaccccaaucaaccuggugcgggaucugccccagggcuucucagcccuggagccccugguggaccugcccaucggcaucaacaucacccgguuccagacccugcuggcccugcaccggagcuaccugaccccaggcgacagcagcagcggguggacagcaggcgcggcugcuuacuacgugggcuaccugcagccccggaccuuccugcugaaguacaacgagaacggcaccaucaccgacgccguggacugcgcccuggacccucugagcgagaccaagugcacccugaagagcuucaccguggagaagggcaucuaccagaccagcaacuuccgggugcagcccaccgagagcaucgugcgguuccccaacaucaccaaccugugccccuucggcgagguguucaacgccacccgguucgccagcguguacgccuggaaccggaagcggaucagcaacugcguggccgacuacagcgugcuguacaacagcgccagcuucagcaccuucaagugcuacggcgugagccccaccaagcugaacgaccugugcuucaccaacguguacgccgacagcuucgugauccguggcgacgaggugcggcagaucgcacccggccagacaggcaagaucgccgacuacaacuacaagcugcccgacgacuucaccggcugcgugaucgccuggaacagcaacaaccucgacagcaaggugggcggcaacuacaacuaccuguuccggcuguuccggaagagcaaccugaagcccuucgagcgggacaucagcaccgagaucuaccaagccggcuccaccccuugcaacggcguggagggcuucaacugcuacuucccucugcagagcuacggcuuccagcccaccaacggcgugggcuaccagcccuaccgggugguggugcugagcuucgagcugcugcacgccccagccaccguguguggccccaagaagagcaccaaccuggugaagaacaagugcgugaacuucaacuucaacggccuuaccggcaccggcgugcugaccgagagcaacaagaaauuccugcccuuucagcaguucggccgggacaucgccgacaccaccgacgcugugcgggauccccagacccuggagauccuggacaucaccccuugcagcuucggcggcgugagcgugaucaccccaggcaccaacaccagcaaccagguggccgugcuguaccagggcgugaacugcaccgaggugcccguggccauccacgccgaccagcugacacccaccuggcgggucuacagcaccggcagcaacguguuccagacccgggccgguugccugaucggcgccgagcacgugaacaacagcuacgagugcgacauccccaucggcgccggcaucugugccagcuaccagacccagaccaauucaccccggagggcaaggagcguggccagccagagcaucaucgccuacaccaugagccugggcgccgagaacagcguggccuacagcaacaacagcaucgccauccccaccaacuucaccaucagcgugaccaccgagauucugcccgugagcaugaccaagaccagcguggacugcaccauguacaucugcggcgacagcaccgagugcagcaaccugcugcugcaguacggcagcuucugcacccagcugaaccgggcccugaccggcaucgccguggagcaggacaagaacacccaggagguguucgcccaggugaagcagaucuacaagaccccucccaucaaggacuucggcggcuucaacuucagccagauccugcccgaccccagcaagcccagcaagcggagcuucaucgaggaccugcuguucaacaaggugacccuagccgacgccggcuucaucaagcaguacggcgacugccucggcgacauagccgcccgggaccugaucugcgcccagaaguucaacggccugaccgugcugccuccccugcugaccgacgagaugaucgcccaguacaccagcgcccuguuagccggaaccaucaccagcggcuggacuuucggcgcuggagccgcucugcagauccccuucgccaugcagauggccuaccgguucaacggcaucggcgugacccagaacgugcuguacgagaaccagaagcugaucgccaaccaguucaacagcgccaucggcaagauccaggacagccugagcagcaccgcuagcgcccugggcaagcugcaggacguggugaaccagaacgcccaggcccugaacacccuggugaagcagcugagcagcaacuucggcgccaucagcagcgugcugaacgacauccugagccggcuggacaaggucgaggccgaggugcagaucgaccggcugaucacuggccggcugcagagccugcagaccuacgugacccagcagcugauccgggccgccgagauucgggccagcgccaaccuggccgccaccaagaugagcgagugcgugcugggccagagcaagcggguggacuucugcggcaagggcuaccaccugaugagcuuuccccagagcgcaccccacggagugguguuccugcacgugaccuacgugcccgcccaggagaagaacuucaccaccgccccagccaucugccacgacggcaaggcccacuuuccccgggagggcguguucgugagcaacggcacccacugguucgugacccagcggaacuucuacgagccccagaucaucaccaccgacaacaccuucgugagcggcaacugcgacguggugaucggcaucgugaacaacaccguguacgauccccugcagcccgagcuggacagcuucaaggaggagcuggacaaguacuucaagaaucacaccagccccgacguggaccugggcgacaucagcggcaucaacgccagcguggugaacauccagaaggagaucgaucggcugaacgagguggccaagaaccugaacgagagccugaucgaccugcaggagcugggcaaguacgagcaguacaucaaguggcccugguacaucuggcugggcuucaucgccggccugaucgccaucgugauggugaccaucaugcugugcugcaugaccagcugcugcagcugccugaagggcuguugcagcugcggcagcugcugcaaguucgacgaggacgacagcgagcccgugcugaagggcgugaagcugcacuacaccugaugacucgagcugguacugcaugcacgcaaugcuagcugccccuuucccguccuggguaccccgagucucccccgaccucgggucccagguaugcucccaccuccaccugccccacucaccaccucugcuaguuccagacaccucccaagcacgcagcaaugcagcucaaaacgcuuagccuagccacacccccacgggaaacagcagugauuaaccuuuagcaauaaacgaaaguuuaacuaagcuauacuaaccccaggguuggucaauuucgugccagccacacccuggagcuagcaaaaaaaaaaaaaaaaaaaaaaaaaaaaaaaaaaaaaaaaaaaaaaaaaaaaaaaaaaaaaaaaaaaaaaaaaaaaaaaaaaaaaaaaaaaaaaaaaaaa

SEQ ID NO: 26313 - RNA, 4273 nt, Artificial Sequence
  SARS-CoV-2/Wuhan/WIV05/2019__EPI_ISL_402128 spike protein mRNA gc (1-1273)(D614G_I692V)
agaauaaacuaguauucuucugguccccacagacucagagagaacccgccaccauguucguguuccuggugcugcugccccuggugagcagccagugcgugaaccugaccacccggacccagcugccaccagccuacaccaacagcuucacccggggcgucuacuaccccgacaagguguuccggagcagcguccugcacagcacccaggaccuguuccugcccuucuucagcaacgugaccugguuccacgccauccacgugagcggcaccaacggcaccaagcgguucgacaaccccgugcugcccuucaacgacggcguguacuucgccagcaccgagaagagcaacaucauccggggcuggaucuucggcaccacccuggacagcaagacccagagccugcugaucgugaauaacgccaccaacguggugaucaaggugugcgaguuccaguucugcaacgaccccuuccugggcguguacuaccacaagaacaacaagagcuggauggagagcgaguuccggguguacagcagcgccaacaacugcaccuucgaguacgugagccagcccuuccugauggaccuggagggcaagcagggcaacuucaagaaccugcgggaguucguguucaagaacaucgacggcuacuucaagaucuacagcaagcacaccccaaucaaccuggugcgggaucugccccagggcuucucagcccuggagccccugguggaccugcccaucggcaucaacaucacccgguuccagacccugcuggcccugcaccggagcuaccugaccccaggcgacagcagcagcggguggacagcaggcgcggcugcuuacuacgugggcuaccugcagccccggaccuuccugcugaaguacaacgagaacggcaccaucaccgacgccguggacugcgcccuggacccucugagcgagaccaagugcacccugaagagcuucaccguggagaagggcaucuaccagaccagcaacuuccgggugcagcccaccgagagcaucgugcgguuccccaacaucaccaaccugugccccuucggcgagguguucaacgccacccgguucgccagcguguacgccuggaaccggaagcggaucagcaacugcguggccgacuacagcgugcuguacaacagcgccagcuucagcaccuucaagugcuacggcgugagccccaccaagcugaacgaccugugcuucaccaacguguacgccgacagcuucgugauccguggcgacgaggugcggcagaucgcacccggccagacaggcaagaucgccgacuacaacuacaagcugcccgacgacuucaccggcugcgugaucgccuggaacagcaacaaccucgacagcaaggugggcggcaacuacaacuaccuguaccggcuguuccggaagagcaaccugaagcccuucgagcgggacaucagcaccgagaucuaccaagccggcuccaccccuugcaacggcguggagggcuucaacugcuacuucccucugcagagcuacggcuuccagcccaccaacggcgugggcuaccagcccuaccgggugguggugcugagcuucgagcugcugcacgccccagccaccguguguggccccaagaagagcaccaaccuggugaagaacaagugcgugaacuucaacuucaacggccuuaccggcaccggcgugcugaccgagagcaacaagaaauuccugcccuuucagcaguucggccgggacaucgccgacaccaccgacgcugugcgggauccccagacccuggagauccuggacaucaccccuugcagcuucggcggcgugagcgugaucaccccaggcaccaacaccagcaaccagguggccgugcuguaccagggcgugaacugcaccgaggugcccguggccauccacgccgaccagcugacacccaccuggcgggucuacagcaccggcagcaacguguuccagacccgggccgguugccugaucggcgccgagcacgugaacaacagcuacgagugcgacauccccaucggcgccggcaucugugccagcuaccagacccagaccaauucaccccggagggcaaggagcguggccagccagagcgugaucgccuacaccaugagccugggcgccgagaacagcguggccuacagcaacaacagcaucgccauccccaccaacuucaccaucagcgugaccaccgagauucugcccgugagcaugaccaagaccagcguggacugcaccauguacaucugcggcgacagcaccgagugcagcaaccugcugcugcaguacggcagcuucugcacccagcugaaccgggcccugaccggcaucgccguggagcaggacaagaacacccaggagguguucgcccaggugaagcagaucuacaagaccccucccaucaaggacuucggcggcuucaacuucagccagauccugcccgaccccagcaagcccagcaagcggagcuucaucgaggaccugcuguucaacaaggugacccuagccgacgccggcuucaucaagcaguacggcgacugccucggcgacauagccgcccgggaccugaucugcgcccagaaguucaacggccugaccgugcugccuccccugcugaccgacgagaugaucgcccaguacaccagcgcccuguuagccggaaccaucaccagcggcuggacuuucggcgcuggagccgcucugcagauccccuucgccaugcagauggccuaccgguucaacggcaucggcgugacccagaacgugcuguacgagaaccagaagcugaucgccaaccaguucaacagcgccaucggcaagauccaggacagccugagcagcaccgcuagcgcccugggcaagcugcaggacguggugaaccagaacgcccaggcccugaacacccuggugaagcagcugagcagcaacuucggcgccaucagcagcgugcugaacgacauccugagccggcuggacaaggucgaggccgaggugcagaucgaccggcugaucacuggccggcugcagagccugcagaccuacgugacccagcagcugauccgggccgccgagauucgggccagcgccaaccuggccgccaccaagaugagcgagugcgugcugggccagagcaagcggguggacuucugcggcaagggcuaccaccugaugagcuuuccccagagcgcaccccacggagugguguuccugcacgugaccuacgugcccgcccaggagaagaacuucaccaccgccccagccaucugccacgacggcaaggcccacuuuccccgggagggcguguucgugagcaacggcacccacugguucgugacccagcggaacuucuacgagccccagaucaucaccaccgacaacaccuucgugagcggcaacugcgacguggugaucggcaucgugaacaacaccguguacgauccccugcagcccgagcuggacagcuucaaggaggagcuggacaaguacuucaagaaucacaccagccccgacguggaccugggcgacaucagcggcaucaacgccagcguggugaacauccagaaggagaucgaucggcugaacgagguggccaagaaccugaacgagagccugaucgaccugcaggagcugggcaaguacgagcaguacaucaaguggcccugguacaucuggcugggcuucaucgccggccugaucgccaucgugauggugaccaucaugcugugcugcaugaccagcugcugcagcugccugaagggcuguugcagcugcggcagcugcugcaaguucgacgaggacgacagcgagcccgugcugaagggcgugaagcugcacuacaccugaugacucgagcugguacugcaugcacgcaaugcuagcugccccuuucccguccuggguaccccgagucucccccgaccucgggucccagguaugcucccaccuccaccugccccacucaccaccucugcuaguuccagacaccucccaagcacgcagcaaugcagcucaaaacgcuuagccuagccacacccccacgggaaacagcagugauuaaccuuuagcaauaaacgaaaguuuaacuaagcuauacuaaccccaggguuggucaauuucgugccagccacacccuggagcuagcaaaaaaaaaaaaaaaaaaaaaaaaaaaaaaaaaaaaaaaaaaaaaaaaaaaaaaaaaaaaaaaaaaaaaaaaaaaaaaaaaaaaaaaaaaaaaaaaaaaa

SEQ ID NO: 26314 - RNA, 4273 nt, Artificial Sequence
  SARS-CoV-2/Wuhan/WIV05/2019__EPI_ISL_402128 spike protein mRNA gc (1-1273)(D614G_M1229I)
agaauaaacuaguauucuucugguccccacagacucagagagaacccgccaccauguucguguuccuggugcugcugccccuggugagcagccagugcgugaaccugaccacccggacccagcugccaccagccuacaccaacagcuucacccggggcgucuacuaccccgacaagguguuccggagcagcguccugcacagcacccaggaccuguuccugcccuucuucagcaacgugaccugguuccacgccauccacgugagcggcaccaacggcaccaagcgguucgacaaccccgugcugcccuucaacgacggcguguacuucgccagcaccgagaagagcaacaucauccggggcuggaucuucggcaccacccuggacagcaagacccagagccugcugaucgugaauaacgccaccaacguggugaucaaggugugcgaguuccaguucugcaacgaccccuuccugggcguguacuaccacaagaacaacaagagcuggauggagagcgaguuccggguguacagcagcgccaacaacugcaccuucgaguacgugagccagcccuuccugauggaccuggagggcaagcagggcaacuucaagaaccugcgggaguucguguucaagaacaucgacggcuacuucaagaucuacagcaagcacaccccaaucaaccuggugcgggaucugccccagggcuucucagcccuggagccccugguggaccugcccaucggcaucaacaucacccgguuccagacccugcuggcccugcaccggagcuaccugaccccaggcgacagcagcagcggguggacagcaggcgcggcugcuuacuacgugggcuaccugcagccccggaccuuccugcugaaguacaacgagaacggcaccaucaccgacgccguggacugcgcccuggacccucugagcgagaccaagugcacccugaagagcuucaccguggagaagggcaucuaccagaccagcaacuuccgggugcagcccaccgagagcaucgugcgguuccccaacaucaccaaccugugccccuucggcgagguguucaacgccacccgguucgccagcguguacgccuggaaccggaagcggaucagcaacugcguggccgacuacagcgugcuguacaacagcgccagcuucagcaccuucaagugcuacggcgugagccccaccaagcugaacgaccugugcuucaccaacguguacgccgacagcuucgugauccguggcgacgaggugcggcagaucgcacccggccagacaggcaagaucgccgacuacaacuacaagcugcccgacgacuucaccggcugcgugaucgccuggaacagcaacaaccucgacagcaaggugggcggcaacuacaacuaccuguaccggcuguuccggaagagcaaccugaagcccuucgagcgggacaucagcaccgagaucuaccaagccggcuccaccccuugcaacggcguggagggcuucaacugcuacuucccucugcagagcuacggcuuccagcccaccaacggcgugggcuaccagcccuaccgggugguggugcugagcuucgagcugcugcacgccccagccaccguguguggccccaagaagagcaccaaccuggugaagaacaagugcgugaacuucaacuucaacggccuuaccggcaccggcgugcugaccgagagcaacaagaaauuccugcccuuucagcaguucggccgggacaucgccgacaccaccgacgcugugcgggauccccagacccuggagauccuggacaucaccccuugcagcuucggcggcgugagcgugaucaccccaggcaccaacaccagcaaccagguggccgugcuguaccagggcgugaacugcaccgaggugcccguggccauccacgccgaccagcugacacccaccuggcgggucuacagcaccggcagcaacguguuccagacccgggccgguugccugaucggcgccgagcacgugaacaacagcuacgagugcgacauccccaucggcgccggcaucugugccagcuaccagacccagaccaauucaccccggagggcaaggagcguggccagccagagcaucaucgccuacaccaugagccugggcgccgagaacagcguggccuacagcaacaacagcaucgccauccccaccaacuucaccaucagcgugaccaccgagauucugcccgugagcaugaccaagaccagcguggacugcaccauguacaucugcggcgacagcaccgagugcagcaaccugcugcugcaguacggcagcuucugcacccagcugaaccgggcccugaccggcaucgccguggagcaggacaagaacacccaggagguguucgcccaggugaagcagaucuacaagaccccucccaucaaggacuucggcggcuucaacuucagccagauccugcccgaccccagcaagcccagcaagcggagcuucaucgaggaccugcuguucaacaaggugacccuagccgacgccggcuucaucaagcaguacggcgacugccucggcgacauagccgcccgggaccugaucugcgcccagaaguucaacggccugaccgugcugccuccccugcugaccgacgagaugaucgcccaguacaccagcgcccuguuagccggaaccaucaccagcggcuggacuuucggcgcuggagccgcucugcagauccccuucgccaugcagauggccuaccgguucaacggcaucggcgugacccagaacgugcuguacgagaaccagaagcugaucgccaaccaguucaacagcgccaucggcaagauccaggacagccugagcagcaccgcuagcgcccugggcaagcugcaggacguggugaaccagaacgcccaggcccugaacacccuggugaagcagcugagcagcaacuucggcgccaucagcagcgugcugaacgacauccugagccggcuggacaaggucgaggccgaggugcagaucgaccggcugaucacuggccggcugcagagccugcagaccuacgugacccagcagcugauccgggccgccgagauucgggccagcgccaaccuggccgccaccaagaugagcgagugcgugcugggccagagcaagcggguggacuucugcggcaagggcuaccaccugaugagcuuuccccagagcgcaccccacggagugguguuccugcacgugaccuacgugcccgcccaggagaagaacuucaccaccgccccagccaucugccacgacggcaaggcccacuuuccccgggagggcguguucgugagcaacggcacccacugguucgugacccagcggaacuucuacgagccccagaucaucaccaccgacaacaccuucgugagcggcaacugcgacguggugaucggcaucgugaacaacaccguguacgauccccugcagcccgagcuggacagcuucaaggaggagcuggacaaguacuucaagaaucacaccagccccgacguggaccugggcgacaucagcggcaucaacgccagcguggugaacauccagaaggagaucgaucggcugaacgagguggccaagaaccugaacgagagccugaucgaccugcaggagcugggcaaguacgagcaguacaucaaguggcccugguacaucuggcugggcuucaucgccggccugaucgccaucgugaucgugaccaucaugcugugcugcaugaccagcugcugcagcugccugaagggcuguugcagcugcggcagcugcugcaaguucgacgaggacgacagcgagcccgugcugaagggcgugaagcugcacuacaccugaugacucgagcugguacugcaugcacgcaaugcuagcugccccuuucccguccuggguaccccgagucucccccgaccucgggucccagguaugcucccaccuccaccugccccacucaccaccucugcuaguuccagacaccucccaagcacgcagcaaugcagcucaaaacgcuuagccuagccacacccccacgggaaacagcagugauuaaccuuuagcaauaaacgaaaguuuaacuaagcuauacuaaccccaggguuggucaauuucgugccagccacacccuggagcuagcaaaaaaaaaaaaaaaaaaaaaaaaaaaaaaaaaaaaaaaaaaaaaaaaaaaaaaaaaaaaaaaaaaaaaaaaaaaaaaaaaaaaaaaaaaaaaaaaaaaa

SEQ ID NO: 26315 - RNA, 4267 nt, Artificial Sequence
  SARS-CoV-2/Wuhan/WIV05/2019__EPI_ISL_402128 spike protein mRNA gc (1-1273)(H69del_V70del_A222V_Y453F_S477N_D614G_I692V)
agaauaaacuaguauucuucugguccccacagacucagagagaacccgccaccauguucguguuccuggugcugcugccccuggugagcagccagugcgugaaccugaccacccggacccagcugccaccagccuacaccaacagcuucacccggggcgucuacuaccccgacaagguguuccggagcagcguccugcacagcacccaggaccuguuccugcccuucuucagcaacgugaccugguuccacgccaucagcggcaccaacggcaccaagcgguucgacaaccccgugcugcccuucaacgacggcguguacuucgccagcaccgagaagagcaacaucauccggggcuggaucuucggcaccacccuggacagcaagacccagagccugcugaucgugaauaacgccaccaacguggugaucaaggugugcgaguuccaguucugcaacgaccccuuccugggcguguacuaccacaagaacaacaagagcuggauggagagcgaguuccggguguacagcagcgccaacaacugcaccuucgaguacgugagccagcccuuccugauggaccuggagggcaagcagggcaacuucaagaaccugcgggaguucguguucaagaacaucgacggcuacuucaagaucuacagcaagcacaccccaaucaaccuggugcgggaucugccccagggcuucucagugcuggagccccugguggaccugcccaucggcaucaacaucacccgguuccagacccugcuggcccugcaccggagcuaccugaccccaggcgacagcagcagcggguggacagcaggcgcggcugcuuacuacgugggcuaccugcagccccggaccuuccugcugaaguacaacgagaacggcaccaucaccgacgccguggacugcgcccuggacccucugagcgagaccaagugcacccugaagagcuucaccguggagaagggcaucuaccagaccagcaacuuccgggugcagcccaccgagagcaucgugcgguuccccaacaucaccaaccugugccccuucggcgagguguucaacgccacccgguucgccagcguguacgccuggaaccggaagcggaucagcaacugcguggccgacuacagcgugcuguacaacagcgccagcuucagcaccuucaagugcuacggcgugagccccaccaagcugaacgaccugugcuucaccaacguguacgccgacagcuucgugauccguggcgacgaggugcggcagaucgcacccggccagacaggcaagaucgccgacuacaacuacaagcugcccgacgacuucaccggcugcgugaucgccuggaacagcaacaaccucgacagcaaggugggcggcaacuacaacuaccuguuccggcuguuccggaagagcaaccugaagcccuucgagcgggacaucagcaccgagaucuaccaagccggcaacaccccuugcaacggcguggagggcuucaacugcuacuucccucugcagagcuacggcuuccagcccaccaacggcgugggcuaccagcccuaccgggugguggugcugagcuucgagcugcugcacgccccagccaccguguguggccccaagaagagcaccaaccuggugaagaacaagugcgugaacuucaacuucaacggccuuaccggcaccggcgugcugaccgagagcaacaagaaauuccugcccuuucagcaguucggccgggacaucgccgacaccaccgacgcugugcgggauccccagacccuggagauccuggacaucaccccuugcagcuucggcggcgugagcgugaucaccccaggcaccaacaccagcaaccagguggccgugcuguaccagggcgugaacugcaccgaggugcccguggccauccacgccgaccagcugacacccaccuggcgggucuacagcaccggcagcaacguguuccagacccgggccgguugccugaucggcgccgagcacgugaacaacagcuacgagugcgacauccccaucggcgccggcaucugugccagcuaccagacccagaccaauucaccccggagggcaaggagcguggccagccagagcgugaucgccuacaccaugagccugggcgccgagaacagcguggccuacagcaacaacagcaucgccauccccaccaacuucaccaucagcgugaccaccgagauucugcccgugagcaugaccaagaccagcguggacugcaccauguacaucugcggcgacagcaccgagugcagcaaccugcugcugcaguacggcagcuucugcacccagcugaaccgggcccugaccggcaucgccguggagcaggacaagaacacccaggagguguucgcccaggugaagcagaucuacaagaccccucccaucaaggacuucggcggcuucaacuucagccagauccugcccgaccccagcaagcccagcaagcggagcuucaucgaggaccugcuguucaacaaggugacccuagccgacgccggcuucaucaagcaguacggcgacugccucggcgacauagccgcccgggaccugaucugcgcccagaaguucaacggccugaccgugcugccuccccugcugaccgacgagaugaucgcccaguacaccagcgcccuguuagccggaaccaucaccagcggcuggacuuucggcgcuggagccgcucugcagauccccuucgccaugcagauggccuaccgguucaacggcaucggcgugacccagaacgugcuguacgagaaccagaagcugaucgccaaccaguucaacagcgccaucggcaagauccaggacagccugagcagcaccgcuagcgcccugggcaagcugcaggacguggugaaccagaacgcccaggcccugaacacccuggugaagcagcugagcagcaacuucggcgccaucagcagcgugcugaacgacauccugagccggcuggacaaggucgaggccgaggugcagaucgaccggcugaucacuggccggcugcagagccugcagaccuacgugacccagcagcugauccgggccgccgagauucgggccagcgccaaccuggccgccaccaagaugagcgagugcgugcugggccagagcaagcggguggacuucugcggcaagggcuaccaccugaugagcuuuccccagagcgcaccccacggagugguguuccugcacgugaccuacgugcccgcccaggagaagaacuucaccaccgccccagccaucugccacgacggcaaggcccacuuuccccgggagggcguguucgugagcaacggcacccacugguucgugacccagcggaacuucuacgagccccagaucaucaccaccgacaacaccuucgugagcggcaacugcgacguggugaucggcaucgugaacaacaccguguacgauccccugcagcccgagcuggacagcuucaaggaggagcuggacaaguacuucaagaaucacaccagccccgacguggaccugggcgacaucagcggcaucaacgccagcguggugaacauccagaaggagaucgaucggcugaacgagguggccaagaaccugaacgagagccugaucgaccugcaggagcugggcaaguacgagcaguacaucaaguggcccugguacaucuggcugggcuucaucgccggccugaucgccaucgugauggugaccaucaugcugugcugcaugaccagcugcugcagcugccugaagggcuguugcagcugcggcagcugcugcaaguucgacgaggacgacagcgagcccgugcugaagggcgugaagcugcacuacaccugaugacucgagcugguacugcaugcacgcaaugcuagcugccccuuucccguccuggguaccccgagucucccccgaccucgggucccagguaugcucccaccuccaccugccccacucaccaccucugcuaguuccagacaccucccaagcacgcagcaaugcagcucaaaacgcuuagccuagccacacccccacgggaaacagcagugauuaaccuuuagcaauaaacgaaaguuuaacuaagcuauacuaaccccaggguuggucaauuucgugccagccacacccuggagcuagcaaaaaaaaaaaaaaaaaaaaaaaaaaaaaaaaaaaaaaaaaaaaaaaaaaaaaaaaaaaaaaaaaaaaaaaaaaaaaaaaaaaaaaaaaaaaaaaaaaaa

SEQ ID NO: 26316 - RNA, 4267 nt, Artificial Sequence
  SARS-CoV-2/Wuhan/WIV05/2019__EPI_ISL_402128 spike protein mRNA gc (1-1273)(H69del_V70del_Y453F_D614G_I692V_M1229I)
agaauaaacuaguauucuucugguccccacagacucagagagaacccgccaccauguucguguuccuggugcugcugccccuggugagcagccagugcgugaaccugaccacccggacccagcugccaccagccuacaccaacagcuucacccggggcgucuacuaccccgacaagguguuccggagcagcguccugcacagcacccaggaccuguuccugcccuucuucagcaacgugaccugguuccacgccaucagcggcaccaacggcaccaagcgguucgacaaccccgugcugcccuucaacgacggcguguacuucgccagcaccgagaagagcaacaucauccggggcuggaucuucggcaccacccuggacagcaagacccagagccugcugaucgugaauaacgccaccaacguggugaucaaggugugcgaguuccaguucugcaacgaccccuuccugggcguguacuaccacaagaacaacaagagcuggauggagagcgaguuccggguguacagcagcgccaacaacugcaccuucgaguacgugagccagcccuuccugauggaccuggagggcaagcagggcaacuucaagaaccugcgggaguucguguucaagaacaucgacggcuacuucaagaucuacagcaagcacaccccaaucaaccuggugcgggaucugccccagggcuucucagcccuggagccccugguggaccugcccaucggcaucaacaucacccgguuccagacccugcuggcccugcaccggagcuaccugaccccaggcgacagcagcagcggguggacagcaggcgcggcugcuuacuacgugggcuaccugcagccccggaccuuccugcugaaguacaacgagaacggcaccaucaccgacgccguggacugcgcccuggacccucugagcgagaccaagugcacccugaagagcuucaccguggagaagggcaucuaccagaccagcaacuuccgggugcagcccaccgagagcaucgugcgguuccccaacaucaccaaccugugccccuucggcgagguguucaacgccacccgguucgccagcguguacgccuggaaccggaagcggaucagcaacugcguggccgacuacagcgugcuguacaacagcgccagcuucagcaccuucaagugcuacggcgugagccccaccaagcugaacgaccugugcuucaccaacguguacgccgacagcuucgugauccguggcgacgaggugcggcagaucgcacccggccagacaggcaagaucgccgacuacaacuacaagcugcccgacgacuucaccggcugcgugaucgccuggaacagcaacaaccucgacagcaaggugggcggcaacuacaacuaccuguuccggcuguuccggaagagcaaccugaagcccuucgagcgggacaucagcaccgagaucuaccaagccggcuccaccccuugcaacggcguggagggcuucaacugcuacuucccucugcagagcuacggcuuccagcccaccaacggcgugggcuaccagcccuaccgggugguggugcugagcuucgagcugcugcacgccccagccaccguguguggccccaagaagagcaccaaccuggugaagaacaagugcgugaacuucaacuucaacggccuuaccggcaccggcgugcugaccgagagcaacaagaaauuccugcccuuucagcaguucggccgggacaucgccgacaccaccgacgcugugcgggauccccagacccuggagauccuggacaucaccccuugcagcuucggcggcgugagcgugaucaccccaggcaccaacaccagcaaccagguggccgugcuguaccagggcgugaacugcaccgaggugcccguggccauccacgccgaccagcugacacccaccuggcgggucuacagcaccggcagcaacguguuccagacccgggccgguugccugaucggcgccgagcacgugaacaacagcuacgagugcgacauccccaucggcgccggcaucugugccagcuaccagacccagaccaauucaccccggagggcaaggagcguggccagccagagcgugaucgccuacaccaugagccugggcgccgagaacagcguggccuacagcaacaacagcaucgccauccccaccaacuucaccaucagcgugaccaccgagauucugcccgugagcaugaccaagaccagcguggacugcaccauguacaucugcggcgacagcaccgagugcagcaaccugcugcugcaguacggcagcuucugcacccagcugaaccgggcccugaccggcaucgccguggagcaggacaagaacacccaggagguguucgcccaggugaagcagaucuacaagaccccucccaucaaggacuucggcggcuucaacuucagccagauccugcccgaccccagcaagcccagcaagcggagcuucaucgaggaccugcuguucaacaaggugacccuagccgacgccggcuucaucaagcaguacggcgacugccucggcgacauagccgcccgggaccugaucugcgcccagaaguucaacggccugaccgugcugccuccccugcugaccgacgagaugaucgcccaguacaccagcgcccuguuagccggaaccaucaccagcggcuggacuuucggcgcuggagccgcucugcagauccccuucgccaugcagauggccuaccgguucaacggcaucggcgugacccagaacgugcuguacgagaaccagaagcugaucgccaaccaguucaacagcgccaucggcaagauccaggacagccugagcagcaccgcuagcgcccugggcaagcugcaggacguggugaaccagaacgcccaggcccugaacacccuggugaagcagcugagcagcaacuucggcgccaucagcagcgugcugaacgacauccugagccggcuggacaaggucgaggccgaggugcagaucgaccggcugaucacuggccggcugcagagccugcagaccuacgugacccagcagcugauccgggccgccgagauucgggccagcgccaaccuggccgccaccaagaugagcgagugcgugcugggccagagcaagcggguggacuucugcggcaagggcuaccaccugaugagcuuuccccagagcgcaccccacggagugguguuccugcacgugaccuacgugcccgcccaggagaagaacuucaccaccgccccagccaucugccacgacggcaaggcccacuuuccccgggagggcguguucgugagcaacggcacccacugguucgugacccagcggaacuucuacgagccccagaucaucaccaccgacaacaccuucgugagcggcaacugcgacguggugaucggcaucgugaacaacaccguguacgauccccugcagcccgagcuggacagcuucaaggaggagcuggacaaguacuucaagaaucacaccagccccgacguggaccugggcgacaucagcggcaucaacgccagcguggugaacauccagaaggagaucgaucggcugaacgagguggccaagaaccugaacgagagccugaucgaccugcaggagcugggcaaguacgagcaguacaucaaguggcccugguacaucuggcugggcuucaucgccggccugaucgccaucgugaucgugaccaucaugcugugcugcaugaccagcugcugcagcugccugaagggcuguugcagcugcggcagcugcugcaaguucgacgaggacgacagcgagcccgugcugaagggcgugaagcugcacuacaccugaugacucgagcugguacugcaugcacgcaaugcuagcugccccuuucccguccuggguaccccgagucucccccgaccucgggucccagguaugcucccaccuccaccugccccacucaccaccucugcuaguuccagacaccucccaagcacgcagcaaugcagcucaaaacgcuuagccuagccacacccccacgggaaacagcagugauuaaccuuuagcaauaaacgaaaguuuaacuaagcuauacuaaccccaggguuggucaauuucgugccagccacacccuggagcuagcaaaaaaaaaaaaaaaaaaaaaaaaaaaaaaaaaaaaaaaaaaaaaaaaaaaaaaaaaaaaaaaaaaaaaaaaaaaaaaaaaaaaaaaaaaaaaaaaaaaa

SEQ ID NO: 26317 - RNA, 4264 nt, Artificial Sequence
  SARS-CoV-2/Wuhan/WIV05/2019__EPI_ISL_402128 spike protein mRNA gc (1-1273)(H69del_V70del_Y144del_N501Y_A570D_D614G_P681H_T716I_S982 A_D1118H)
agaauaaacuaguauucuucugguccccacagacucagagagaacccgccaccauguucguguuccuggugcugcugccccuggugagcagccagugcgugaaccugaccacccggacccagcugccaccagccuacaccaacagcuucacccggggcgucuacuaccccgacaagguguuccggagcagcguccugcacagcacccaggaccuguuccugcccuucuucagcaacgugaccugguuccacgccaucagcggcaccaacggcaccaagcgguucgacaaccccgugcugcccuucaacgacggcguguacuucgccagcaccgagaagagcaacaucauccggggcuggaucuucggcaccacccuggacagcaagacccagagccugcugaucgugaauaacgccaccaacguggugaucaaggugugcgaguuccaguucugcaacgaccccuuccugggcguguaccacaagaacaacaagagcuggauggagagcgaguuccggguguacagcagcgccaacaacugcaccuucgaguacgugagccagcccuuccugauggaccuggagggcaagcagggcaacuucaagaaccugcgggaguucguguucaagaacaucgacggcuacuucaagaucuacagcaagcacaccccaaucaaccuggugcgggaucugccccagggcuucucagcccuggagccccugguggaccugcccaucggcaucaacaucacccgguuccagacccugcuggcccugcaccggagcuaccugaccccaggcgacagcagcagcggguggacagcaggcgcggcugcuuacuacgugggcuaccugcagccccggaccuuccugcugaaguacaacgagaacggcaccaucaccgacgccguggacugcgcccuggacccucugagcgagaccaagugcacccugaagagcuucaccguggagaagggcaucuaccagaccagcaacuuccgggugcagcccaccgagagcaucgugcgguuccccaacaucaccaaccugugccccuucggcgagguguucaacgccacccgguucgccagcguguacgccuggaaccggaagcggaucagcaacugcguggccgacuacagcgugcuguacaacagcgccagcuucagcaccuucaagugcuacggcgugagccccaccaagcugaacgaccugugcuucaccaacguguacgccgacagcuucgugauccguggcgacgaggugcggcagaucgcacccggccagacaggcaagaucgccgacuacaacuacaagcugcccgacgacuucaccggcugcgugaucgccuggaacagcaacaaccucgacagcaaggugggcggcaacuacaacuaccuguaccggcuguuccggaagagcaaccugaagcccuucgagcgggacaucagcaccgagaucuaccaagccggcuccaccccuugcaacggcguggagggcuucaacugcuacuucccucugcagagcuacggcuuccagcccaccuacggcgugggcuaccagcccuaccgggugguggugcugagcuucgagcugcugcacgccccagccaccguguguggccccaagaagagcaccaaccuggugaagaacaagugcgugaacuucaacuucaacggccuuaccggcaccggcgugcugaccgagagcaacaagaaauuccugcccuuucagcaguucggccgggacaucgacgacaccaccgacgcugugcgggauccccagacccuggagauccuggacaucaccccuugcagcuucggcggcgugagcgugaucaccccaggcaccaacaccagcaaccagguggccgugcuguaccagggcgugaacugcaccgaggugcccguggccauccacgccgaccagcugacacccaccuggcgggucuacagcaccggcagcaacguguuccagacccgggccgguugccugaucggcgccgagcacgugaacaacagcuacgagugcgacauccccaucggcgccggcaucugugccagcuaccagacccagaccaauucacaccggagggcaaggagcguggccagccagagcaucaucgccuacaccaugagccugggcgccgagaacagcguggccuacagcaacaacagcaucgccauccccaucaacuucaccaucagcgugaccaccgagauucugcccgugagcaugaccaagaccagcguggacugcaccauguacaucugcggcgacagcaccgagugcagcaaccugcugcugcaguacggcagcuucugcacccagcugaaccgggcccugaccggcaucgccguggagcaggacaagaacacccaggagguguucgcccaggugaagcagaucuacaagaccccucccaucaaggacuucggcggcuucaacuucagccagauccugcccgaccccagcaagcccagcaagcggagcuucaucgaggaccugcuguucaacaaggugacccuagccgacgccggcuucaucaagcaguacggcgacugccucggcgacauagccgcccgggaccugaucugcgcccagaaguucaacggccugaccgugcugccuccccugcugaccgacgagaugaucgcccaguacaccagcgcccuguuagccggaaccaucaccagcggcuggacuuucggcgcuggagccgcucugcagauccccuucgccaugcagauggccuaccgguucaacggcaucggcgugacccagaacgugcuguacgagaaccagaagcugaucgccaaccaguucaacagcgccaucggcaagauccaggacagccugagcagcaccgcuagcgcccugggcaagcugcaggacguggugaaccagaacgcccaggcccugaacacccuggugaagcagcugagcagcaacuucggcgccaucagcagcgugcugaacgacauccuggcccggcuggacaaggucgaggccgaggugcagaucgaccggcugaucacuggccggcugcagagccugcagaccuacgugacccagcagcugauccgggccgccgagauucgggccagcgccaaccuggccgccaccaagaugagcgagugcgugcugggccagagcaagcggguggacuucugcggcaagggcuaccaccugaugagcuuuccccagagcgcaccccacggagugguguuccugcacgugaccuacgugcccgcccaggagaagaacuucaccaccgccccagccaucugccacgacggcaaggcccacuuuccccgggagggcguguucgugagcaacggcacccacugguucgugacccagcggaacuucuacgagccccagaucaucaccacccacaacaccuucgugagcggcaacugcgacguggugaucggcaucgugaacaacaccguguacgauccccugcagcccgagcuggacagcuucaaggaggagcuggacaaguacuucaagaaucacaccagccccgacguggaccugggcgacaucagcggcaucaacgccagcguggugaacauccagaaggagaucgaucggcugaacgagguggccaagaaccugaacgagagccugaucgaccugcaggagcugggcaaguacgagcaguacaucaaguggcccugguacaucuggcugggcuucaucgccggccugaucgccaucgugauggugaccaucaugcugugcugcaugaccagcugcugcagcugccugaagggcuguugcagcugcggcagcugcugcaaguucgacgaggacgacagcgagcccgugcugaagggcgugaagcugcacuacaccugaugacucgagcugguacugcaugcacgcaaugcuagcugccccuuucccguccuggguaccccgagucucccccgaccucgggucccagguaugcucccaccuccaccugccccacucaccaccucugcuaguuccagacaccucccaagcacgcagcaaugcagcucaaaacgcuuagccuagccacacccccacgggaaacagcagugauuaaccuuuagcaauaaacgaaaguuuaacuaagcuauacuaaccccaggguuggucaauuucgugccagccacacccuggagcuagcaaaaaaaaaaaaaaaaaaaaaaaaaaaaaaaaaaaaaaaaaaaaaaaaaaaaaaaaaaaaaaaaaaaaaaaaaaaaaaaaaaaaaaaaaaaaaaaaaaaa

SEQ ID NO: 26318 - RNA, 4273 nt, Artificial Sequence
  SARS-CoV-2/Wuhan/WIV05/2019__EPI_ISL_402128 spike protein mRNA gc (1-1273)(K417N_E484K_N501Y_D614G)
agaauaaacuaguauucuucugguccccacagacucagagagaacccgccaccauguucguguuccuggugcugcugccccuggugagcagccagugcgugaaccugaccacccggacccagcugccaccagccuacaccaacagcuucacccggggcgucuacuaccccgacaagguguuccggagcagcguccugcacagcacccaggaccuguuccugcccuucuucagcaacgugaccugguuccacgccauccacgugagcggcaccaacggcaccaagcgguucgacaaccccgugcugcccuucaacgacggcguguacuucgccagcaccgagaagagcaacaucauccggggcuggaucuucggcaccacccuggacagcaagacccagagccugcugaucgugaauaacgccaccaacguggugaucaaggugugcgaguuccaguucugcaacgaccccuuccugggcguguacuaccacaagaacaacaagagcuggauggagagcgaguuccggguguacagcagcgccaacaacugcaccuucgaguacgugagccagcccuuccugauggaccuggagggcaagcagggcaacuucaagaaccugcgggaguucguguucaagaacaucgacggcuacuucaagaucuacagcaagcacaccccaaucaaccuggugcgggaucugccccagggcuucucagcccuggagccccugguggaccugcccaucggcaucaacaucacccgguuccagacccugcuggcccugcaccggagcuaccugaccccaggcgacagcagcagcggguggacagcaggcgcggcugcuuacuacgugggcuaccugcagccccggaccuuccugcugaaguacaacgagaacggcaccaucaccgacgccguggacugcgcccuggacccucugagcgagaccaagugcacccugaagagcuucaccguggagaagggcaucuaccagaccagcaacuuccgggugcagcccaccgagagcaucgugcgguuccccaacaucaccaaccugugccccuucggcgagguguucaacgccacccgguucgccagcguguacgccuggaaccggaagcggaucagcaacugcguggccgacuacagcgugcuguacaacagcgccagcuucagcaccuucaagugcuacggcgugagccccaccaagcugaacgaccugugcuucaccaacguguacgccgacagcuucgugauccguggcgacgaggugcggcagaucgcacccggccagacaggcaacaucgccgacuacaacuacaagcugcccgacgacuucaccggcugcgugaucgccuggaacagcaacaaccucgacagcaaggugggcggcaacuacaacuaccuguaccggcuguuccggaagagcaaccugaagcccuucgagcgggacaucagcaccgagaucuaccaagccggcuccaccccuugcaacggcgugaagggcuucaacugcuacuucccucugcagagcuacggcuuccagcccaccuacggcgugggcuaccagcccuaccgggugguggugcugagcuucgagcugcugcacgccccagccaccguguguggccccaagaagagcaccaaccuggugaagaacaagugcgugaacuucaacuucaacggccuuaccggcaccggcgugcugaccgagagcaacaagaaauuccugcccuuucagcaguucggccgggacaucgccgacaccaccgacgcugugcgggauccccagacccuggagauccuggacaucaccccuugcagcuucggcggcgugagcgugaucaccccaggcaccaacaccagcaaccagguggccgugcuguaccagggcgugaacugcaccgaggugcccguggccauccacgccgaccagcugacacccaccuggcgggucuacagcaccggcagcaacguguuccagacccgggccgguugccugaucggcgccgagcacgugaacaacagcuacgagugcgacauccccaucggcgccggcaucugugccagcuaccagacccagaccaauucaccccggagggcaaggagcguggccagccagagcaucaucgccuacaccaugagccugggcgccgagaacagcguggccuacagcaacaacagcaucgccauccccaccaacuucaccaucagcgugaccaccgagauucugcccgugagcaugaccaagaccagcguggacugcaccauguacaucugcggcgacagcaccgagugcagcaaccugcugcugcaguacggcagcuucugcacccagcugaaccgggcccugaccggcaucgccguggagcaggacaagaacacccaggagguguucgcccaggugaagcagaucuacaagaccccucccaucaaggacuucggcggcuucaacuucagccagauccugcccgaccccagcaagcccagcaagcggagcuucaucgaggaccugcuguucaacaaggugacccuagccgacgccggcuucaucaagcaguacggcgacugccucggcgacauagccgcccgggaccugaucugcgcccagaaguucaacggccugaccgugcugccuccccugcugaccgacgagaugaucgcccaguacaccagcgcccuguuagccggaaccaucaccagcggcuggacuuucggcgcuggagccgcucugcagauccccuucgccaugcagauggccuaccgguucaacggcaucggcgugacccagaacgugcuguacgagaaccagaagcugaucgccaaccaguucaacagcgccaucggcaagauccaggacagccugagcagcaccgcuagcgcccugggcaagcugcaggacguggugaaccagaacgcccaggcccugaacacccuggugaagcagcugagcagcaacuucggcgccaucagcagcgugcugaacgacauccugagccggcuggacaaggucgaggccgaggugcagaucgaccggcugaucacuggccggcugcagagccugcagaccuacgugacccagcagcugauccgggccgccgagauucgggccagcgccaaccuggccgccaccaagaugagcgagugcgugcugggccagagcaagcggguggacuucugcggcaagggcuaccaccugaugagcuuuccccagagcgcaccccacggagugguguuccugcacgugaccuacgugcccgcccaggagaagaacuucaccaccgccccagccaucugccacgacggcaaggcccacuuuccccgggagggcguguucgugagcaacggcacccacugguucgugacccagcggaacuucuacgagccccagaucaucaccaccgacaacaccuucgugagcggcaacugcgacguggugaucggcaucgugaacaacaccguguacgauccccugcagcccgagcuggacagcuucaaggaggagcuggacaaguacuucaagaaucacaccagccccgacguggaccugggcgacaucagcggcaucaacgccagcguggugaacauccagaaggagaucgaucggcugaacgagguggccaagaaccugaacgagagccugaucgaccugcaggagcugggcaaguacgagcaguacaucaaguggcccugguacaucuggcugggcuucaucgccggccugaucgccaucgugauggugaccaucaugcugugcugcaugaccagcugcugcagcugccugaagggcuguugcagcugcggcagcugcugcaaguucgacgaggacgacagcgagcccgugcugaagggcgugaagcugcacuacaccugaugacucgagcugguacugcaugcacgcaaugcuagcugccccuuucccguccuggguaccccgagucucccccgaccucgggucccagguaugcucccaccuccaccugccccacucaccaccucugcuaguuccagacaccucccaagcacgcagcaaugcagcucaaaacgcuuagccuagccacacccccacgggaaacagcagugauuaaccuuuagcaauaaacgaaaguuuaacuaagcuauacuaaccccaggguuggucaauuucgugccagccacacccuggagcuagcaaaaaaaaaaaaaaaaaaaaaaaaaaaaaaaaaaaaaaaaaaaaaaaaaaaaaaaaaaaaaaaaaaaaaaaaaaaaaaaaaaaaaaaaaaaaaaaaaaaa

SEQ ID NO: 26319 - RNA, 4264 nt, Artificial Sequence
  SARS-CoV-2/Wuhan/WIV05/2019__EPI_ISL_402128 spike protein mRNA gc (1-1273)(L18F_D80A_D215G_L242del_A243del_L244del_R246I_K417N_E484 K_N501Y_D614G_A701V)
agaauaaacuaguauucuucugguccccacagacucagagagaacccgccaccauguucguguuccuggugcugcugccccuggugagcagccagugcgugaacuucaccacccggacccagcugccaccagccuacaccaacagcuucacccggggcgucuacuaccccgacaagguguuccggagcagcguccugcacagcacccaggaccuguuccugcccuucuucagcaacgugaccugguuccacgccauccacgugagcggcaccaacggcaccaagcgguucgccaaccccgugcugcccuucaacgacggcguguacuucgccagcaccgagaagagcaacaucauccggggcuggaucuucggcaccacccuggacagcaagacccagagccugcugaucgugaauaacgccaccaacguggugaucaaggugugcgaguuccaguucugcaacgaccccuuccugggcguguacuaccacaagaacaacaagagcuggauggagagcgaguuccggguguacagcagcgccaacaacugcaccuucgaguacgugagccagcccuuccugauggaccuggagggcaagcagggcaacuucaagaaccugcgggaguucguguucaagaacaucgacggcuacuucaagaucuacagcaagcacaccccaaucaaccuggugcggggccugccccagggcuucucagcccuggagccccugguggaccugcccaucggcaucaacaucacccgguuccagacccugcacaucagcuaccugaccccaggcgacagcagcagcggguggacagcaggcgcggcugcuuacuacgugggcuaccugcagccccggaccuuccugcugaaguacaacgagaacggcaccaucaccgacgccguggacugcgcccuggacccucugagcgagaccaagugcacccugaagagcuucaccguggagaagggcaucuaccagaccagcaacuuccgggugcagcccaccgagagcaucgugcgguuccccaacaucaccaaccugugccccuucggcgagguguucaacgccacccgguucgccagcguguacgccuggaaccggaagcggaucagcaacugcguggccgacuacagcgugcuguacaacagcgccagcuucagcaccuucaagugcuacggcgugagccccaccaagcugaacgaccugugcuucaccaacguguacgccgacagcuucgugauccguggcgacgaggugcggcagaucgcacccggccagacaggcaacaucgccgacuacaacuacaagcugcccgacgacuucaccggcugcgugaucgccuggaacagcaacaaccucgacagcaaggugggcggcaacuacaacuaccuguaccggcuguuccggaagagcaaccugaagcccuucgagcgggacaucagcaccgagaucuaccaagccggcuccaccccuugcaacggcgugaagggcuucaacugcuacuucccucugcagagcuacggcuuccagcccaccuacggcgugggcuaccagcccuaccgggugguggugcugagcuucgagcugcugcacgccccagccaccguguguggccccaagaagagcaccaaccuggugaagaacaagugcgugaacuucaacuucaacggccuuaccggcaccggcgugcugaccgagagcaacaagaaauuccugcccuuucagcaguucggccgggacaucgccgacaccaccgacgcugugcgggauccccagacccuggagauccuggacaucaccccuugcagcuucggcggcgugagcgugaucaccccaggcaccaacaccagcaaccagguggccgugcuguaccagggcgugaacugcaccgaggugcccguggccauccacgccgaccagcugacacccaccuggcgggucuacagcaccggcagcaacguguuccagacccgggccgguugccugaucggcgccgagcacgugaacaacagcuacgagugcgacauccccaucggcgccggcaucugugccagcuaccagacccagaccaauucaccccggagggcaaggagcguggccagccagagcaucaucgccuacaccaugagccugggcguggagaacagcguggccuacagcaacaacagcaucgccauccccaccaacuucaccaucagcgugaccaccgagauucugcccgugagcaugaccaagaccagcguggacugcaccauguacaucugcggcgacagcaccgagugcagcaaccugcugcugcaguacggcagcuucugcacccagcugaaccgggcccugaccggcaucgccguggagcaggacaagaacacccaggagguguucgcccaggugaagcagaucuacaagaccccucccaucaaggacuucggcggcuucaacuucagccagauccugcccgaccccagcaagcccagcaagcggagcuucaucgaggaccugcuguucaacaaggugacccuagccgacgccggcuucaucaagcaguacggcgacugccucggcgacauagccgcccgggaccugaucugcgcccagaaguucaacggccugaccgugcugccuccccugcugaccgacgagaugaucgcccaguacaccagcgcccuguuagccggaaccaucaccagcggcuggacuuucggcgcuggagccgcucugcagauccccuucgccaugcagauggccuaccgguucaacggcaucggcgugacccagaacgugcuguacgagaaccagaagcugaucgccaaccaguucaacagcgccaucggcaagauccaggacagccugagcagcaccgcuagcgcccugggcaagcugcaggacguggugaaccagaacgcccaggcccugaacacccuggugaagcagcugagcagcaacuucggcgccaucagcagcgugcugaacgacauccugagccggcuggacaaggucgaggccgaggugcagaucgaccggcugaucacuggccggcugcagagccugcagaccuacgugacccagcagcugauccgggccgccgagauucgggccagcgccaaccuggccgccaccaagaugagcgagugcgugcugggccagagcaagcggguggacuucugcggcaagggcuaccaccugaugagcuuuccccagagcgcaccccacggagugguguuccugcacgugaccuacgugcccgcccaggagaagaacuucaccaccgccccagccaucugccacgacggcaaggcccacuuuccccgggagggcguguucgugagcaacggcacccacugguucgugacccagcggaacuucuacgagccccagaucaucaccaccgacaacaccuucgugagcggcaacugcgacguggugaucggcaucgugaacaacaccguguacgauccccugcagcccgagcuggacagcuucaaggaggagcuggacaaguacuucaagaaucacaccagccccgacguggaccugggcgacaucagcggcaucaacgccagcguggugaacauccagaaggagaucgaucggcugaacgagguggccaagaaccugaacgagagccugaucgaccugcaggagcugggcaaguacgagcaguacaucaaguggcccugguacaucuggcugggcuucaucgccggccugaucgccaucgugauggugaccaucaugcugugcugcaugaccagcugcugcagcugccugaagggcuguugcagcugcggcagcugcugcaaguucgacgaggacgacagcgagcccgugcugaagggcgugaagcugcacuacaccugaugacucgagcugguacugcaugcacgcaaugcuagcugccccuuucccguccuggguaccccgagucucccccgaccucgggucccagguaugcucccaccuccaccugccccacucaccaccucugcuaguuccagacaccucccaagcacgcagcaaugcagcucaaaacgcuuagccuagccacacccccacgggaaacagcagugauuaaccuuuagcaauaaacgaaaguuuaacuaagcuauacuaaccccaggguuggucaauuucgugccagccacacccuggagcuagcaaaaaaaaaaaaaaaaaaaaaaaaaaaaaaaaaaaaaaaaaaaaaaaaaaaaaaaaaaaaaaaaaaaaaaaaaaaaaaaaaaaaaaaaaaaaaaaaaaaa

SEQ ID NO: 26320 - RNA, 4273 nt, Artificial Sequence
  SARS-CoV-2/Wuhan/WIV05/2019__EPI_ISL_402128 spike protein mRNA gc (1-1273)(E484K_D614G)
agaauaaacuaguauucuucugguccccacagacucagagagaacccgccaccauguucguguuccuggugcugcugccccuggugagcagccagugcgugaaccugaccacccggacccagcugccaccagccuacaccaacagcuucacccggggcgucuacuaccccgacaagguguuccggagcagcguccugcacagcacccaggaccuguuccugcccuucuucagcaacgugaccugguuccacgccauccacgugagcggcaccaacggcaccaagcgguucgacaaccccgugcugcccuucaacgacggcguguacuucgccagcaccgagaagagcaacaucauccggggcuggaucuucggcaccacccuggacagcaagacccagagccugcugaucgugaauaacgccaccaacguggugaucaaggugugcgaguuccaguucugcaacgaccccuuccugggcguguacuaccacaagaacaacaagagcuggauggagagcgaguuccggguguacagcagcgccaacaacugcaccuucgaguacgugagccagcccuuccugauggaccuggagggcaagcagggcaacuucaagaaccugcgggaguucguguucaagaacaucgacggcuacuucaagaucuacagcaagcacaccccaaucaaccuggugcgggaucugccccagggcuucucagcccuggagccccugguggaccugcccaucggcaucaacaucacccgguuccagacccugcuggcccugcaccggagcuaccugaccccaggcgacagcagcagcggguggacagcaggcgcggcugcuuacuacgugggcuaccugcagccccggaccuuccugcugaaguacaacgagaacggcaccaucaccgacgccguggacugcgcccuggacccucugagcgagaccaagugcacccugaagagcuucaccguggagaagggcaucuaccagaccagcaacuuccgggugcagcccaccgagagcaucgugcgguuccccaacaucaccaaccugugccccuucggcgagguguucaacgccacccgguucgccagcguguacgccuggaaccggaagcggaucagcaacugcguggccgacuacagcgugcuguacaacagcgccagcuucagcaccuucaagugcuacggcgugagccccaccaagcugaacgaccugugcuucaccaacguguacgccgacagcuucgugauccguggcgacgaggugcggcagaucgcacccggccagacaggcaagaucgccgacuacaacuacaagcugcccgacgacuucaccggcugcgugaucgccuggaacagcaacaaccucgacagcaaggugggcggcaacuacaacuaccuguaccggcuguuccggaagagcaaccugaagcccuucgagcgggacaucagcaccgagaucuaccaagccggcuccaccccuugcaacggcgugaagggcuucaacugcuacuucccucugcagagcuacggcuuccagcccaccaacggcgugggcuaccagcccuaccgggugguggugcugagcuucgagcugcugcacgccccagccaccguguguggccccaagaagagcaccaaccuggugaagaacaagugcgugaacuucaacuucaacggccuuaccggcaccggcgugcugaccgagagcaacaagaaauuccugcccuuucagcaguucggccgggacaucgccgacaccaccgacgcugugcgggauccccagacccuggagauccuggacaucaccccuugcagcuucggcggcgugagcgugaucaccccaggcaccaacaccagcaaccagguggccgugcuguaccagggcgugaacugcaccgaggugcccguggccauccacgccgaccagcugacacccaccuggcgggucuacagcaccggcagcaacguguuccagacccgggccgguugccugaucggcgccgagcacgugaacaacagcuacgagugcgacauccccaucggcgccggcaucugugccagcuaccagacccagaccaauucaccccggagggcaaggagcguggccagccagagcaucaucgccuacaccaugagccugggcgccgagaacagcguggccuacagcaacaacagcaucgccauccccaccaacuucaccaucagcgugaccaccgagauucugcccgugagcaugaccaagaccagcguggacugcaccauguacaucugcggcgacagcaccgagugcagcaaccugcugcugcaguacggcagcuucugcacccagcugaaccgggcccugaccggcaucgccguggagcaggacaagaacacccaggagguguucgcccaggugaagcagaucuacaagaccccucccaucaaggacuucggcggcuucaacuucagccagauccugcccgaccccagcaagcccagcaagcggagcuucaucgaggaccugcuguucaacaaggugacccuagccgacgccggcuucaucaagcaguacggcgacugccucggcgacauagccgcccgggaccugaucugcgcccagaaguucaacggccugaccgugcugccuccccugcugaccgacgagaugaucgcccaguacaccagcgcccuguuagccggaaccaucaccagcggcuggacuuucggcgcuggagccgcucugcagauccccuucgccaugcagauggccuaccgguucaacggcaucggcgugacccagaacgugcuguacgagaaccagaagcugaucgccaaccaguucaacagcgccaucggcaagauccaggacagccugagcagcaccgcuagcgcccugggcaagcugcaggacguggugaaccagaacgcccaggcccugaacacccuggugaagcagcugagcagcaacuucggcgccaucagcagcgugcugaacgacauccugagccggcuggacaaggucgaggccgaggugcagaucgaccggcugaucacuggccggcugcagagccugcagaccuacgugacccagcagcugauccgggccgccgagauucgggccagcgccaaccuggccgccaccaagaugagcgagugcgugcugggccagagcaagcggguggacuucugcggcaagggcuaccaccugaugagcuuuccccagagcgcaccccacggagugguguuccugcacgugaccuacgugcccgcccaggagaagaacuucaccaccgccccagccaucugccacgacggcaaggcccacuuuccccgggagggcguguucgugagcaacggcacccacugguucgugacccagcggaacuucuacgagccccagaucaucaccaccgacaacaccuucgugagcggcaacugcgacguggugaucggcaucgugaacaacaccguguacgauccccugcagcccgagcuggacagcuucaaggaggagcuggacaaguacuucaagaaucacaccagccccgacguggaccugggcgacaucagcggcaucaacgccagcguggugaacauccagaaggagaucgaucggcugaacgagguggccaagaaccugaacgagagccugaucgaccugcaggagcugggcaaguacgagcaguacaucaaguggcccugguacaucuggcugggcuucaucgccggccugaucgccaucgugauggugaccaucaugcugugcugcaugaccagcugcugcagcugccugaagggcuguugcagcugcggcagcugcugcaaguucgacgaggacgacagcgagcccgugcugaagggcgugaagcugcacuacaccugaugacucgagcugguacugcaugcacgcaaugcuagcugccccuuucccguccuggguaccccgagucucccccgaccucgggucccagguaugcucccaccuccaccugccccacucaccaccucugcuaguuccagacaccucccaagcacgcagcaaugcagcucaaaacgcuuagccuagccacacccccacgggaaacagcagugauuaaccuuuagcaauaaacgaaaguuuaacuaagcuauacuaaccccaggguuggucaauuucgugccagccacacccuggagcuagcaaaaaaaaaaaaaaaaaaaaaaaaaaaaaaaaaaaaaaaaaaaaaaaaaaaaaaaaaaaaaaaaaaaaaaaaaaaaaaaaaaaaaaaaaaaaaaaaaaaa

SEQ ID NO: 26321 - RNA, 4273 nt, Artificial Sequence
  SARS-CoV-2/Wuhan/WIV05/2019__EPI_ISL_402128 spike protein mRNA gc (1-1273)(L18F_T20N_P26S_D138Y_R190S_K417T_E484K_N501Y_D614G_H655Y _T1027I)
agaauaaacuaguauucuucugguccccacagacucagagagaacccgccaccauguucguguuccuggugcugcugccccuggugagcagccagugcgugaacuucaccaaccggacccagcugccaagcgccuacaccaacagcuucacccggggcgucuacuaccccgacaagguguuccggagcagcguccugcacagcacccaggaccuguuccugcccuucuucagcaacgugaccugguuccacgccauccacgugagcggcaccaacggcaccaagcgguucgacaaccccgugcugcccuucaacgacggcguguacuucgccagcaccgagaagagcaacaucauccggggcuggaucuucggcaccacccuggacagcaagacccagagccugcugaucgugaauaacgccaccaacguggugaucaaggugugcgaguuccaguucugcaacuaccccuuccugggcguguacuaccacaagaacaacaagagcuggauggagagcgaguuccggguguacagcagcgccaacaacugcaccuucgaguacgugagccagcccuuccugauggaccuggagggcaagcagggcaacuucaagaaccugagcgaguucguguucaagaacaucgacggcuacuucaagaucuacagcaagcacaccccaaucaaccuggugcgggaucugccccagggcuucucagcccuggagccccugguggaccugcccaucggcaucaacaucacccgguuccagacccugcuggcccugcaccggagcuaccugaccccaggcgacagcagcagcggguggacagcaggcgcggcugcuuacuacgugggcuaccugcagccccggaccuuccugcugaaguacaacgagaacggcaccaucaccgacgccguggacugcgcccuggacccucugagcgagaccaagugcacccugaagagcuucaccguggagaagggcaucuaccagaccagcaacuuccgggugcagcccaccgagagcaucgugcgguuccccaacaucaccaaccugugccccuucggcgagguguucaacgccacccgguucgccagcguguacgccuggaaccggaagcggaucagcaacugcguggccgacuacagcgugcuguacaacagcgccagcuucagcaccuucaagugcuacggcgugagccccaccaagcugaacgaccugugcuucaccaacguguacgccgacagcuucgugauccguggcgacgaggugcggcagaucgcacccggccagacaggcaccaucgccgacuacaacuacaagcugcccgacgacuucaccggcugcgugaucgccuggaacagcaacaaccucgacagcaaggugggcggcaacuacaacuaccuguaccggcuguuccggaagagcaaccugaagcccuucgagcgggacaucagcaccgagaucuaccaagccggcuccaccccuugcaacggcgugaagggcuucaacugcuacuucccucugcagagcuacggcuuccagcccaccuacggcgugggcuaccagcccuaccgggugguggugcugagcuucgagcugcugcacgccccagccaccguguguggccccaagaagagcaccaaccuggugaagaacaagugcgugaacuucaacuucaacggccuuaccggcaccggcgugcugaccgagagcaacaagaaauuccugcccuuucagcaguucggccgggacaucgccgacaccaccgacgcugugcgggauccccagacccuggagauccuggacaucaccccuugcagcuucggcggcgugagcgugaucaccccaggcaccaacaccagcaaccagguggccgugcuguaccagggcgugaacugcaccgaggugcccguggccauccacgccgaccagcugacacccaccuggcgggucuacagcaccggcagcaacguguuccagacccgggccgguugccugaucggcgccgaguacgugaacaacagcuacgagugcgacauccccaucggcgccggcaucugugccagcuaccagacccagaccaauucaccccggagggcaaggagcguggccagccagagcaucaucgccuacaccaugagccugggcgccgagaacagcguggccuacagcaacaacagcaucgccauccccaccaacuucaccaucagcgugaccaccgagauucugcccgugagcaugaccaagaccagcguggacugcaccauguacaucugcggcgacagcaccgagugcagcaaccugcugcugcaguacggcagcuucugcacccagcugaaccgggcccugaccggcaucgccguggagcaggacaagaacacccaggagguguucgcccaggugaagcagaucuacaagaccccucccaucaaggacuucggcggcuucaacuucagccagauccugcccgaccccagcaagcccagcaagcggagcuucaucgaggaccugcuguucaacaaggugacccuagccgacgccggcuucaucaagcaguacggcgacugccucggcgacauagccgcccgggaccugaucugcgcccagaaguucaacggccugaccgugcugccuccccugcugaccgacgagaugaucgcccaguacaccagcgcccuguuagccggaaccaucaccagcggcuggacuuucggcgcuggagccgcucugcagauccccuucgccaugcagauggccuaccgguucaacggcaucggcgugacccagaacgugcuguacgagaaccagaagcugaucgccaaccaguucaacagcgccaucggcaagauccaggacagccugagcagcaccgcuagcgcccugggcaagcugcaggacguggugaaccagaacgcccaggcccugaacacccuggugaagcagcugagcagcaacuucggcgccaucagcagcgugcugaacgacauccugagccggcuggacaaggucgaggccgaggugcagaucgaccggcugaucacuggccggcugcagagccugcagaccuacgugacccagcagcugauccgggccgccgagauucgggccagcgccaaccuggccgccaucaagaugagcgagugcgugcugggccagagcaagcggguggacuucugcggcaagggcuaccaccugaugagcuuuccccagagcgcaccccacggagugguguuccugcacgugaccuacgugcccgcccaggagaagaacuucaccaccgccccagccaucugccacgacggcaaggcccacuuuccccgggagggcguguucgugagcaacggcacccacugguucgugacccagcggaacuucuacgagccccagaucaucaccaccgacaacaccuucgugagcggcaacugcgacguggugaucggcaucgugaacaacaccguguacgauccccugcagcccgagcuggacagcuucaaggaggagcuggacaaguacuucaagaaucacaccagccccgacguggaccugggcgacaucagcggcaucaacgccagcguggugaacauccagaaggagaucgaucggcugaacgagguggccaagaaccugaacgagagccugaucgaccugcaggagcugggcaaguacgagcaguacaucaaguggcccugguacaucuggcugggcuucaucgccggccugaucgccaucgugauggugaccaucaugcugugcugcaugaccagcugcugcagcugccugaagggcuguugcagcugcggcagcugcugcaaguucgacgaggacgacagcgagcccgugcugaagggcgugaagcugcacuacaccugaugacucgagcugguacugcaugcacgcaaugcuagcugccccuuucccguccuggguaccccgagucucccccgaccucgggucccagguaugcucccaccuccaccugccccacucaccaccucugcuaguuccagacaccucccaagcacgcagcaaugcagcucaaaacgcuuagccuagccacacccccacgggaaacagcagugauuaaccuuuagcaauaaacgaaaguuuaacuaagcuauacuaaccccaggguuggucaauuucgugccagccacacccuggagcuagcaaaaaaaaaaaaaaaaaaaaaaaaaaaaaaaaaaaaaaaaaaaaaaaaaaaaaaaaaaaaaaaaaaaaaaaaaaaaaaaaaaaaaaaaaaaaaaaaaaaa

SEQ ID NO: 26322 - RNA, 4273 nt, Artificial Sequence
  SARS-CoV-2/Wuhan/WIV05/2019__EPI_ISL_402128 spike protein mRNA gc (1-1273)(S13I_W152C_L452R_D614G)
agaauaaacuaguauucuucugguccccacagacucagagagaacccgccaccauguucguguuccuggugcugcugccccuggugagcauccagugcgugaaccugaccacccggacccagcugccaccagccuacaccaacagcuucacccggggcgucuacuaccccgacaagguguuccggagcagcguccugcacagcacccaggaccuguuccugcccuucuucagcaacgugaccugguuccacgccauccacgugagcggcaccaacggcaccaagcgguucgacaaccccgugcugcccuucaacgacggcguguacuucgccagcaccgagaagagcaacaucauccggggcuggaucuucggcaccacccuggacagcaagacccagagccugcugaucgugaauaacgccaccaacguggugaucaaggugugcgaguuccaguucugcaacgaccccuuccugggcguguacuaccacaagaacaacaagagcugcauggagagcgaguuccggguguacagcagcgccaacaacugcaccuucgaguacgugagccagcccuuccugauggaccuggagggcaagcagggcaacuucaagaaccugcgggaguucguguucaagaacaucgacggcuacuucaagaucuacagcaagcacaccccaaucaaccuggugcgggaucugccccagggcuucucagcccuggagccccugguggaccugcccaucggcaucaacaucacccgguuccagacccugcuggcccugcaccggagcuaccugaccccaggcgacagcagcagcggguggacagcaggcgcggcugcuuacuacgugggcuaccugcagccccggaccuuccugcugaaguacaacgagaacggcaccaucaccgacgccguggacugcgcccuggacccucugagcgagaccaagugcacccugaagagcuucaccguggagaagggcaucuaccagaccagcaacuuccgggugcagcccaccgagagcaucgugcgguuccccaacaucaccaaccugugccccuucggcgagguguucaacgccacccgguucgccagcguguacgccuggaaccggaagcggaucagcaacugcguggccgacuacagcgugcuguacaacagcgccagcuucagcaccuucaagugcuacggcgugagccccaccaagcugaacgaccugugcuucaccaacguguacgccgacagcuucgugauccguggcgacgaggugcggcagaucgcacccggccagacaggcaagaucgccgacuacaacuacaagcugcccgacgacuucaccggcugcgugaucgccuggaacagcaacaaccucgacagcaaggugggcggcaacuacaacuaccgcuaccggcuguuccggaagagcaaccugaagcccuucgagcgggacaucagcaccgagaucuaccaagccggcuccaccccuugcaacggcguggagggcuucaacugcuacuucccucugcagagcuacggcuuccagcccaccaacggcgugggcuaccagcccuaccgggugguggugcugagcuucgagcugcugcacgccccagccaccguguguggccccaagaagagcaccaaccuggugaagaacaagugcgugaacuucaacuucaacggccuuaccggcaccggcgugcugaccgagagcaacaagaaauuccugcccuuucagcaguucggccgggacaucgccgacaccaccgacgcugugcgggauccccagacccuggagauccuggacaucaccccuugcagcuucggcggcgugagcgugaucaccccaggcaccaacaccagcaaccagguggccgugcuguaccagggcgugaacugcaccgaggugcccguggccauccacgccgaccagcugacacccaccuggcgggucuacagcaccggcagcaacguguuccagacccgggccgguugccugaucggcgccgagcacgugaacaacagcuacgagugcgacauccccaucggcgccggcaucugugccagcuaccagacccagaccaauucaccccggagggcaaggagcguggccagccagagcaucaucgccuacaccaugagccugggcgccgagaacagcguggccuacagcaacaacagcaucgccauccccaccaacuucaccaucagcgugaccaccgagauucugcccgugagcaugaccaagaccagcguggacugcaccauguacaucugcggcgacagcaccgagugcagcaaccugcugcugcaguacggcagcuucugcacccagcugaaccgggcccugaccggcaucgccguggagcaggacaagaacacccaggagguguucgcccaggugaagcagaucuacaagaccccucccaucaaggacuucggcggcuucaacuucagccagauccugcccgaccccagcaagcccagcaagcggagcuucaucgaggaccugcuguucaacaaggugacccuagccgacgccggcuucaucaagcaguacggcgacugccucggcgacauagccgcccgggaccugaucugcgcccagaaguucaacggccugaccgugcugccuccccugcugaccgacgagaugaucgcccaguacaccagcgcccuguuagccggaaccaucaccagcggcuggacuuucggcgcuggagccgcucugcagauccccuucgccaugcagauggccuaccgguucaacggcaucggcgugacccagaacgugcuguacgagaaccagaagcugaucgccaaccaguucaacagcgccaucggcaagauccaggacagccugagcagcaccgcuagcgcccugggcaagcugcaggacguggugaaccagaacgcccaggcccugaacacccuggugaagcagcugagcagcaacuucggcgccaucagcagcgugcugaacgacauccugagccggcuggacaaggucgaggccgaggugcagaucgaccggcugaucacuggccggcugcagagccugcagaccuacgugacccagcagcugauccgggccgccgagauucgggccagcgccaaccuggccgccaccaagaugagcgagugcgugcugggccagagcaagcggguggacuucugcggcaagggcuaccaccugaugagcuuuccccagagcgcaccccacggagugguguuccugcacgugaccuacgugcccgcccaggagaagaacuucaccaccgccccagccaucugccacgacggcaaggcccacuuuccccgggagggcguguucgugagcaacggcacccacugguucgugacccagcggaacuucuacgagccccagaucaucaccaccgacaacaccuucgugagcggcaacugcgacguggugaucggcaucgugaacaacaccguguacgauccccugcagcccgagcuggacagcuucaaggaggagcuggacaaguacuucaagaaucacaccagccccgacguggaccugggcgacaucagcggcaucaacgccagcguggugaacauccagaaggagaucgaucggcugaacgagguggccaagaaccugaacgagagccugaucgaccugcaggagcugggcaaguacgagcaguacaucaaguggcccugguacaucuggcugggcuucaucgccggccugaucgccaucgugauggugaccaucaugcugugcugcaugaccagcugcugcagcugccugaagggcuguugcagcugcggcagcugcugcaaguucgacgaggacgacagcgagcccgugcugaagggcgugaagcugcacuacaccugaugacucgagcugguacugcaugcacgcaaugcuagcugccccuuucccguccuggguaccccgagucucccccgaccucgggucccagguaugcucccaccuccaccugccccacucaccaccucugcuaguuccagacaccucccaagcacgcagcaaugcagcucaaaacgcuuagccuagccacacccccacgggaaacagcagugauuaaccuuuagcaauaaacgaaaguuuaacuaagcuauacuaaccccaggguuggucaauuucgugccagccacacccuggagcuagcaaaaaaaaaaaaaaaaaaaaaaaaaaaaaaaaaaaaaaaaaaaaaaaaaaaaaaaaaaaaaaaaaaaaaaaaaaaaaaaaaaaaaaaaaaaaaaaaaaaa

SEQ ID NO: 26323 - RNA, 4273 nt, Artificial Sequence
  SARS-CoV-2/Wuhan/WIV05/2019__EPI_ISL_402128 spike protein mRNA gc (1-1273)
agaauaaacuaguauucuucugguccccacagacucagagagaacccgccaccauguucguguuccuggugcugcugccccuggugagcagccagugcgugaaccugaccacccggacccagcugcccccugccuacaccaacagcuucacccggggcguguacuaccccgacaagguguuccggagcagcgugcugcacagcacccaggaccuguuccugcccuucuucagcaacgugaccugguuccacgccauccacgugagcggcaccaacggcaccaagcgguucgacaacccagugcugcccuucaacgacggcguguacuucgccagcaccgagaagucaaacaucauccggggcuggaucuucggcaccacccuggacagcaagacacagagccugcugaucgugaacaacgccaccaacguggugaucaaggugugcgaguuucaguucugcaacgaccccuuccugggcguguacuaccacaagaacaacaagagcuggauggagagcgaguuccgggucuacagcagcgcuaacaauugcaccuucgaguacgugagccagcccuuccugauggaccucgagggcaagcagggcaacuucaagaaccugcgggaguucguguucaagaacaucgauggcuacuucaagaucuacagcaagcacacccccaucaaccuggugcgggaccugccccagggauucagcgcccuggagccucugguggaccugcccaucggcaucaacaucaccagguuccagacccugcuggcccugcaccggagcuaccugacccccggcgacagcagcagcggcuggaccgccggcgccgccgcauacuacgugggcuaccugcagccacggaccuuccugcugaaguacaacgagaacggcaccaucaccgacgccguggacugcgcccuggacccccugagcgagaccaagugcacccuaaagagcuucaccguggagaagggcaucuaccagaccagcaacuuccgggugcagcccacugagagcaucgugcgguuccccaacauuaccaaccugugucccuucggcgagguguucaacgccacccgguucgccagcguguacgccuggaaccggaagcggaucagcaacugcguggccgacuacagcgugcuguacaacagcgccagcuucagcaccuucaagugcuacggcgugagcccuaccaagcugaacgaccugugcuucaccaacguguacgcugacagcuucgugauccggggcgacgaggugcggcagaucgcccccggccagaccggcaagaucgccgacuacaacuacaagcugcccgacgacuucaccggcugcgugaucgccuggaacagcaacaaccuggacagcaaggugggcggcaacuacaacuaccuguaccggcuguuccguaagagcaaccugaagccauucgagcgggacaucagcaccgagaucuaccaggccggcagcacccccugcaacgguguggagggcuuuaacugcuacuucccccugcagagcuacggcuuccagcccaccaacggcgugggcuaccagcccuaccgggugguggugcugagcuucgagcugcugcacgcccccgccaccgugugcggcccuaaaaagagcaccaaccuggugaagaacaagugcgugaacuucaauuucaacggccugaccggcaccggcgugcugaccgagagcaacaagaaguuccugcccuuccagcaguucggccgggauaucgccgacaccaccgacgcagugcgggacccccagacccuggagauccuggacaucaccccaugcagcuucggcggcgugagcgucaucacccccggcacaaacaccagcaaccagguggccgugcuguaccaggacgugaacugcaccgaggugcccguggccauccacgccgaccagcugacccccaccuggcggguguacagcaccggaagcaacguguuccagacccgggccggcugccugaucggcgccgagcacgugaacaacuccuacgagugcgacauccccaucggcgcuggcaucugcgccagcuaccagacccagaccaacagcccccggcgggcccggagcguggccagccagagcaucaucgccuacaccaugagcuuaggcgccgagaacagcguggccuacagcaacaacagcaucgcgaucccuaccaacuucaccaucagcgugaccaccgagauacugcccgugagcaugaccaagaccagcguggacuguaccauguacaucugcggcgacagcaccgagugcagcaaccugcugcugcaguacggcagcuucugcacccagcugaaccgggcccugaccggcaucgccguggagcaggacaagaacacccaagagguguucgcccaggugaagcagaucuacaagacucccccaaucaaggacuucggcggcuucaacuucagccagauccugcccgaccccagcaagcccagcaagcggagcuucaucgaggaccugcuguucaacaaggugacccuggccgacgccggcuucaucaagcaguacggcgauugccugggcgacaucgccgcucgggaccugaucugcgcccagaaguucaacgggcugaccgugcugcccccucugcugaccgacgagaugaucgcccaguacaccagcgcccugcuugccggcaccaucaccagcggcuggaccuucggcgccggcgcagcccugcagauccccuucgccaugcagauggccuaccgguucaacggcaucggcgugacccagaacgugcuguacgagaaccagaagcugaucgccaaccaguucaacagcgccaucggcaagauccaggacagccugagcagcaccgccagcgcccugggcaagcugcaggacguggugaaccagaacgcucaggcccugaacacccuggugaagcagcugagcagcaacuucggcgccaucagcucagugcugaaugacauccugagcaggcuggacaagguggaggccgaggugcagaucgaccggcugaucaccggccggcugcagagccugcagaccuacgugacccagcagcugauccgggccgccgagauccgggccagcgccaaccuggcagccaccaagaugagcgagugcgugcugggccagagcaagcggguggacuuuugcggcaagggcuaccaccugaugagcuucccccagagcgccccacacggcgugguguuccuccacgucacauacgugcccgcccaggagaagaacuucaccaccgcccccgccauuugccacgacggcaaggcucacuucccccgggagggcguguucgugagcaacggaacccacugguucgugacccagcggaacuucuacgagccccagaucaucaccaccgacaacaccuucgugagcggcaacugcgacguggugaucggcaucgugaacaacaccguguacgacccccugcagccugagcuggacagcuucaaggaggagcuggacaaguacuucaagaaccacaccagccccgauguggaccugggcgacaucagcggcaucaacgccagcguggugaacauccagaaggagaucgaccggcugaacgagguggccaagaaccugaacgagagccugaucgaccugcaggagcugggcaaguacgagcaguacaucaaguggcccugguacaucuggcugggcuucaucgccggccugaucgccaucgugauggugaccaucaugcugugcugcaugaccagcugcuguagcugccugaagggcugcugcagcugcggcagcugcugcaaguucgacgaggacgacagcgagccagugcugaagggcgugaagcugcacuacaccugaugacucgagcugguacugcaugcacgcaaugcuagcugccccuuucccguccuggguaccccgagucucccccgaccucgggucccagguaugcucccaccuccaccugccccacucaccaccucugcuaguuccagacaccucccaagcacgcagcaaugcagcucaaaacgcuuagccuagccacacccccacgggaaacagcagugauuaaccuuuagcaauaaacgaaaguuuaacuaagcuauacuaaccccaggguuggucaauuucgugccagccacacccuggagcuagcaaaaaaaaaaaaaaaaaaaaaaaaaaaaaaaaaaaaaaaaaaaaaaaaaaaaaaaaaaaaaaaaaaaaaaaaaaaaaaaaaaaaaaaaaaaaaaaaaaaa

SEQ ID NO: 26324 - RNA, 4273 nt, Artificial Sequence
  SARS-CoV-2/Wuhan/WIV05/2019__EPI_ISL_402128 spike protein mRNA gc (1-1273)(D614G)
agaauaaacuaguauucuucugguccccacagacucagagagaacccgccaccauguucguguuccuggugcugcugccccuggugagcagccagugcgugaaccugaccacccggacccagcugcccccugccuacaccaacagcuucacccggggcguguacuaccccgacaagguguuccggagcagcgugcugcacagcacccaggaccuguuccugcccuucuucagcaacgugaccugguuccacgccauccacgugagcggcaccaacggcaccaagcgguucgacaacccagugcugcccuucaacgacggcguguacuucgccagcaccgagaagucaaacaucauccggggcuggaucuucggcaccacccuggacagcaagacacagagccugcugaucgugaacaacgccaccaacguggugaucaaggugugcgaguuucaguucugcaacgaccccuuccugggcguguacuaccacaagaacaacaagagcuggauggagagcgaguuccgggucuacagcagcgcuaacaauugcaccuucgaguacgugagccagcccuuccugauggaccucgagggcaagcagggcaacuucaagaaccugcgggaguucguguucaagaacaucgauggcuacuucaagaucuacagcaagcacacccccaucaaccuggugcgggaccugccccagggauucagcgcccuggagccucugguggaccugcccaucggcaucaacaucaccagguuccagacccugcuggcccugcaccggagcuaccugacccccggcgacagcagcagcggcuggaccgccggcgccgccgcauacuacgugggcuaccugcagccacggaccuuccugcugaaguacaacgagaacggcaccaucaccgacgccguggacugcgcccuggacccccugagcgagaccaagugcacccuaaagagcuucaccguggagaagggcaucuaccagaccagcaacuuccgggugcagcccacugagagcaucgugcgguuccccaacauuaccaaccugugucccuucggcgagguguucaacgccacccgguucgccagcguguacgccuggaaccggaagcggaucagcaacugcguggccgacuacagcgugcuguacaacagcgccagcuucagcaccuucaagugcuacggcgugagcccuaccaagcugaacgaccugugcuucaccaacguguacgcugacagcuucgugauccggggcgacgaggugcggcagaucgcccccggccagaccggcaagaucgccgacuacaacuacaagcugcccgacgacuucaccggcugcgugaucgccuggaacagcaacaaccuggacagcaaggugggcggcaacuacaacuaccuguaccggcuguuccguaagagcaaccugaagccauucgagcgggacaucagcaccgagaucuaccaggccggcagcacccccugcaacgguguggagggcuuuaacugcuacuucccccugcagagcuacggcuuccagcccaccaacggcgugggcuaccagcccuaccgggugguggugcugagcuucgagcugcugcacgcccccgccaccgugugcggcccuaaaaagagcaccaaccuggugaagaacaagugcgugaacuucaauuucaacggccugaccggcaccggcgugcugaccgagagcaacaagaaguuccugcccuuccagcaguucggccgggauaucgccgacaccaccgacgcagugcgggacccccagacccuggagauccuggacaucaccccaugcagcuucggcggcgugagcgucaucacccccggcacaaacaccagcaaccagguggccgugcuguaccagggagugaacugcaccgaggugcccguggccauccacgccgaccagcugacccccaccuggcggguguacagcaccggcagcaacguguuccagacccgggccggcugccugaucggcgccgagcacgugaacaacuccuacgagugcgacauccccaucggcgcuggcaucugcgccagcuaccagacccagaccaacagcccccggcgggcccggagcguggccagccagagcaucaucgccuacaccaugagcuuaggcgccgagaacagcguggccuacagcaacaacagcaucgcgaucccuaccaacuucaccaucagcgugaccaccgagauacugcccgugagcaugaccaagaccagcguggacuguaccauguacaucugcggcgacagcaccgagugcagcaaccugcugcugcaguacggcagcuucugcacccagcugaaccgggcccugaccggcaucgccguggagcaggacaagaacacccaagagguguucgcccaggugaagcagaucuacaagacucccccaaucaaggacuucggcggcuucaacuucagccagauccugcccgaccccagcaagcccagcaagcggagcuucaucgaggaccugcuguucaacaaggugacccuggccgacgccggcuucaucaagcaguacggcgacugccugggggauaucgccgcucgggaccugaucugcgcccagaaguucaacggccugaccgugcugcccccucugcugaccgacgagaugaucgcccaguacaccagcgcccugcuugccggcaccaucaccagcggcuggaccuucggcgccggcgcagcccugcagauccccuucgccaugcagauggccuaccgguucaacggcaucggcgugacccagaacgugcuguacgagaaccagaagcugaucgccaaccaguucaacagcgccaucggcaagauccaggacagccugagcagcaccgccagcgcccugggcaagcugcaggacguggugaaccagaacgcucaggcccugaacacccuggugaagcagcugagcagcaacuucggcgccaucagcucagugcugaaugacauccugagcaggcuggacaagguggaggccgaggugcagaucgaccggcugaucaccggccggcugcagagccugcagaccuacgugacccagcagcugauccgggccgccgagauccgggccagcgccaaccuggcagccaccaagaugagcgagugcgugcugggccagagcaagcggguggacuuuugcggcaagggcuaccaccugaugagcuucccccagagcgccccacacggcgugguguuccuccacgucacauacgugcccgcccaggagaagaacuucaccaccgcccccgccauuugccacgacggcaaggcucacuucccccgggagggaguguucgugagcaacggcacccacugguucgugacccagcggaacuucuacgagccccagaucaucaccaccgacaacaccuucgugagcggcaacugcgacguggugaucggcaucgugaacaacaccguguacgacccccugcagccugagcuggacagcuucaaggaggagcuggacaaguacuucaagaaccacaccagccccgacguggaucugggcgacaucagcggcaucaacgccagcguggugaacauccagaaggagaucgaccggcugaacgagguggccaagaaccugaacgagagccugaucgaccugcaggagcugggcaaguacgagcaguacaucaaguggcccugguacaucuggcugggcuucaucgccggccugaucgccaucgugauggugaccaucaugcugugcugcaugaccagcugcuguagcugccugaagggcugcugcagcugcggcagcugcugcaaguucgacgaggacgacagcgagccagugcugaagggcgugaagcugcacuacaccugaugacucgagcugguacugcaugcacgcaaugcuagcugccccuuucccguccuggguaccccgagucucccccgaccucgggucccagguaugcucccaccuccaccugccccacucaccaccucugcuaguuccagacaccucccaagcacgcagcaaugcagcucaaaacgcuuagccuagccacacccccacgggaaacagcagugauuaaccuuuagcaauaaacgaaaguuuaacuaagcuauacuaaccccaggguuggucaauuucgugccagccacacccuggagcuagcaaaaaaaaaaaaaaaaaaaaaaaaaaaaaaaaaaaaaaaaaaaaaaaaaaaaaaaaaaaaaaaaaaaaaaaaaaaaaaaaaaaaaaaaaaaaaaaaaaaa

SEQ ID NO: 26325 - RNA, 4273 nt, Artificial Sequence
  SARS-CoV-2/Wuhan/WIV05/2019__EPI_ISL_402128 spike protein mRNA gc (1-1273)(A222V_D614G)
agaauaaacuaguauucuucugguccccacagacucagagagaacccgccaccauguucguguuccuggugcugcugccccuggugagcagccagugcgugaaccugaccacccggacccagcugcccccugccuacaccaacagcuucacccggggcguguacuaccccgacaagguguuccggagcagcgugcugcacagcacccaggaccuguuccugcccuucuucagcaacgugaccugguuccacgccauccacgugagcggcaccaacggcaccaagcgguucgacaacccagugcugcccuucaacgacggcguguacuucgccagcaccgagaagucaaacaucauccggggcuggaucuucggcaccacccuggacagcaagacacagagccugcugaucgugaacaacgccaccaacguggugaucaaggugugcgaguuucaguucugcaacgaccccuuccugggcguguacuaccacaagaacaacaagagcuggauggagagcgaguuccgggucuacagcagcgcuaacaauugcaccuucgaguacgugagccagcccuuccugauggaccucgagggcaagcagggcaacuucaagaaccugcgggaguucguguucaagaacaucgauggcuacuucaagaucuacagcaagcacacccccaucaaccuggugcgggaccugccccagggauucagcgugcuggagccucugguggaccugcccaucggcaucaacaucaccagguuccagacccugcuggcccugcaccggagcuaccugacccccggcgacagcagcagcggcuggaccgccggcgccgccgccuacuacgugggcuaccugcagccacggaccuuccugcugaaguacaacgagaacggcaccaucaccgacgcaguggacugcgcccuggacccccugagcgagaccaagugcacccuaaagagcuucaccguggagaagggcaucuaccagaccagcaacuuccgggugcagcccacugagagcaucgugcgguuccccaacauuaccaaccugugucccuucggcgagguguucaacgccacccgguucgccagcguguacgccuggaaccggaagcggaucagcaacugcguggccgacuacagcgugcuguacaacagcgccagcuucagcaccuucaagugcuacggcgugagcccuaccaagcugaacgaccugugcuucaccaacguguacgccgacagcuucgugauccggggcgacgaggugcggcagaucgcucccggccagaccggcaagaucgccgacuacaacuacaagcugcccgacgacuucaccggcugcgugaucgccuggaacagcaacaaccuggacagcaaggugggcggcaacuacaacuaccuguaccggcuguuccguaagagcaaccugaagccauucgagcgggacaucagcaccgagaucuaccaggccggcagcacccccugcaacgguguggagggcuuuaacugcuacuucccccugcagagcuacggcuuccagcccaccaacggcgugggcuaccagcccuaccgggugguggugcugagcuucgagcugcugcacgcccccgccaccgugugcggcccuaaaaagagcaccaaccuggugaagaacaagugcgugaacuucaauuucaacggccugaccggcaccggcgugcugaccgagagcaacaagaaguuccugcccuuccagcaguucggccgggauaucgccgacaccaccgacgccgugcgggacccccagacccuggagauccuggacaucaccccaugcagcuucggcggcgucagcgugaucacccccggcacaaacaccagcaaccagguggcagugcuguaccagggagugaacugcaccgaggugcccguggccauccacgccgaccagcugacccccaccuggcggguguacagcaccggcagcaacguguuccagacccgggccggcugccugaucggcgccgagcacgugaacaacuccuacgagugcgacauccccaucggcgccggcaucugcgcuagcuaccagacccagaccaacagcccccggcgggcccggagcguggccagccagagcaucaucgccuacaccaugagcuuaggcgccgagaacagcguggccuacagcaacaacagcaucgccaucccuaccaacuucaccaucagcgugaccaccgagauacugcccgugagcaugaccaagaccagcguggacuguaccauguacaucugcggcgacagcaccgagugcagcaaccugcugcugcaguacggcagcuucugcacccagcugaaccgggcgcugaccggcaucgccguggagcaggacaagaacacccaagagguguucgcccaggugaagcagaucuacaagacucccccaaucaaggacuucggcggcuucaacuucagccagauccugcccgaccccagcaagcccagcaagcggagcuucaucgaggaccugcuguucaacaaggugacccuggccgacgccggcuucaucaagcaguacggcgacugccugggggauaucgccgcccgggaccugaucugcgcucagaaguucaacggccugaccgugcugcccccucugcugaccgacgagaugaucgcccaguacaccagcgcccugcuugccggcaccaucaccagcggcuggaccuucggcgccggcgccgcacugcagauccccuucgccaugcagauggccuaccgguucaacggcaucggcgugacccagaacgugcuguacgagaaccagaagcugaucgccaaccaguucaacagcgccaucggcaagauccaggacagccugagcagcaccgccagcgcccugggcaagcugcaggacguggugaaccagaacgcccaggcucugaacacccuggugaagcagcugagcagcaacuucggcgccaucagcucagugcugaaugacauccugagcaggcuggacaagguggaggccgaggugcagaucgaccggcugaucaccggccggcugcagagccugcagaccuacgugacccagcagcugauccgggccgccgagauccgggccagcgccaaccuggccgcaaccaagaugagcgagugcgugcugggccagagcaagcggguggacuuuugcggcaagggcuaccaccugaugagcuucccccagagcgccccacacggcguggucuuccuccacgugacauacgugcccgcccaggagaagaacuucaccaccgcccccgccauuugccacgacggcaaggcccacuucccccgggagggaguguucgugagcaacggcacccacugguucgugacccagcggaacuucuacgagccccagaucaucaccaccgacaacaccuucgugagcggcaacugcgacguggugaucggcaucgugaacaacaccguguacgacccccugcagccugagcuggacagcuucaaggaggagcuggacaaguacuucaagaaccacaccagccccgacguggaucugggcgacaucagcggcaucaacgcuagcguggugaacauccagaaggagaucgaccggcugaacgagguggccaagaaccugaacgagagccugaucgaccugcaggagcugggcaaguacgagcaguacaucaaguggcccugguacaucuggcugggcuucaucgccggccugaucgccaucgugauggugaccaucaugcugugcugcaugaccagcugcuguagcugccugaagggcugcugcagcugcggcagcugcugcaaguucgacgaggacgacagcgagccagugcugaagggcgugaagcugcacuacaccugaugacucgagcugguacugcaugcacgcaaugcuagcugccccuuucccguccuggguaccccgagucucccccgaccucgggucccagguaugcucccaccuccaccugccccacucaccaccucugcuaguuccagacaccucccaagcacgcagcaaugcagcucaaaacgcuuagccuagccacacccccacgggaaacagcagugauuaaccuuuagcaauaaacgaaaguuuaacuaagcuauacuaaccccaggguuggucaauuucgugccagccacacccuggagcuagcaaaaaaaaaaaaaaaaaaaaaaaaaaaaaaaaaaaaaaaaaaaaaaaaaaaaaaaaaaaaaaaaaaaaaaaaaaaaaaaaaaaaaaaaaaaaaaaaaaaa

SEQ ID NO: 26326 - RNA, 4273 nt, Artificial Sequence
  SARS-CoV-2/Wuhan/WIV05/2019__EPI_ISL_402128 spike protein mRNA gc (1-1273)(N439K_D614G)
agaauaaacuaguauucuucugguccccacagacucagagagaacccgccaccauguucguguuccuggugcugcugccccuggugagcagccagugcgugaaccugaccacccggacccagcugcccccugccuacaccaacagcuucacccggggcguguacuaccccgacaagguguuccggagcagcgugcugcacagcacccaggaccuguuccugcccuucuucagcaacgugaccugguuccacgccauccacgugagcggcaccaacggcaccaagcgguucgacaacccagugcugcccuucaacgacggcguguacuucgccagcaccgagaagucaaacaucauccggggcuggaucuucggcaccacccuggacagcaagacacagagccugcugaucgugaacaacgccaccaacguggugaucaaggugugcgaguuucaguucugcaacgaccccuuccugggcguguacuaccacaagaacaacaagagcuggauggagagcgaguuccgggucuacagcagcgcuaacaauugcaccuucgaguacgugagccagcccuuccugauggaccucgagggcaagcagggcaacuucaagaaccugcgggaguucguguucaagaacaucgauggcuacuucaagaucuacagcaagcacacccccaucaaccuggugcgggaccugccccagggauucagcgcccuggagccucugguggaccugcccaucggcaucaacaucaccagguuccagacccugcuggcccugcaccggagcuaccugacccccggcgacagcagcagcggcuggaccgccggcgccgccgcauacuacgugggcuaccugcagccacggaccuuccugcugaaguacaacgagaacggcaccaucaccgacgccguggacugcgcccuggacccccugagcgagaccaagugcacccuaaagagcuucaccguggagaagggcaucuaccagaccagcaacuuccgggugcagcccacugagagcaucgugcgguuccccaacauuaccaaccugugucccuucggcgagguguucaacgccacccgguucgccagcguguacgccuggaaccggaagcggaucagcaacugcguggccgacuacagcgugcuguacaacagcgccagcuucagcaccuucaagugcuacggcgugagcccuaccaagcugaacgaccugugcuucaccaacguguacgcugacagcuucgugauccggggcgacgaggugcggcagaucgcccccggccagaccggcaagaucgccgacuacaacuacaagcugcccgacgacuucaccggcugcgugaucgccuggaacagcaagaaccuggacagcaaggugggcggcaacuacaacuaccuguaccggcuguuccguaagagcaaccugaagccauucgagcgggacaucagcaccgagaucuaccaggccggcagcacccccugcaacgguguggagggcuuuaacugcuacuucccccugcagagcuacggcuuccagcccaccaacggcgugggcuaccagcccuaccgggugguggugcugagcuucgagcugcugcacgcccccgccaccgugugcggcccuaaaaagagcaccaaccuggugaagaacaagugcgugaacuucaacuucaauggccugaccggcaccggcgugcugaccgagagcaacaagaaguuccugcccuuccagcaguucggccgggauaucgccgacaccaccgacgcagugcgggacccccagacccuggagauccuggacaucaccccaugcagcuucggcggcgugagcgucaucacccccggcacaaacaccagcaaccagguggccgugcuguaccagggagugaacugcaccgaggugcccguggccauccacgccgaccagcugacccccaccuggcggguguacagcaccggcagcaacguguuccagacccgggccggcugccugaucggcgccgagcacgugaacaacuccuacgagugcgacauccccaucggcgcuggcaucugcgccagcuaccagacccagaccaacagcccccggcgggcccggagcguggccagccagagcaucaucgccuacaccaugagcuuaggcgccgagaacagcguggccuacagcaacaacagcaucgcgaucccuaccaacuucaccaucagcgugaccaccgagauacugcccgugagcaugaccaagaccagcguggacuguaccauguacaucugcggcgacagcaccgagugcagcaaccugcugcugcaguacggcagcuucugcacccagcugaaccgggcccugaccggcaucgccguggagcaggacaagaacacccaagagguguucgcccaggugaagcagaucuacaagacucccccaaucaaggacuucggcggcuucaacuucagccagauccugcccgaccccagcaagcccagcaagcggagcuucaucgaggaccugcuguucaacaaggugacccuggccgacgccggcuucaucaagcaguacggcgacugccugggggauaucgccgcucgggaccugaucugcgcccagaaguucaacggccugaccgugcugcccccucugcugaccgacgagaugaucgcccaguacaccagcgcccugcuugccggcaccaucaccagcggcuggaccuucggcgccggcgcagcccugcagauccccuucgccaugcagauggccuaccgguucaacggcaucggcgugacccagaacgugcuguacgagaaccagaagcugaucgccaaccaguucaacagcgccaucggcaagauccaggacagccugagcagcaccgccagcgcccugggcaagcugcaggacguggugaaccagaacgcucaggcccugaacacccuggugaagcagcugagcagcaacuucggcgccaucagcucagugcugaacgacauccugagcaggcuggacaagguggaggccgaggugcagaucgaccggcugaucaccggccggcugcagagccugcagaccuacgugacccagcagcugauccgggccgccgagauccgggccagcgccaaucuggcagccaccaagaugagcgagugcgugcugggccagagcaagcggguggacuuuugcggcaagggcuaccaccugaugagcuucccccagagcgccccacacggcgugguguuccuccacgucacauacgugcccgcccaggagaagaacuucaccaccgcccccgccauuugccacgacggcaaggcucacuucccccgggagggaguguucgugagcaacggcacccacugguucgugacccagcggaacuucuacgagccccagaucaucaccaccgacaacaccuucgugagcggcaacugcgacguggugaucggcaucgugaacaacaccguguacgacccccugcagccugagcuggacagcuucaaggaggagcuggacaaguacuucaagaaccacaccagccccgacguggaucugggcgacaucagcggcaucaacgccagcguggugaacauccagaaggagaucgaccggcugaacgagguggccaagaaccugaacgagagccugaucgaccugcaggagcugggcaaguacgagcaguacaucaaguggcccugguacaucuggcugggcuucaucgccggccugaucgccaucgugauggugaccaucaugcugugcugcaugaccagcugcuguagcugccugaagggcugcugcagcugcggcagcugcugcaaguucgacgaggacgacagcgagccagugcugaagggcgugaagcugcacuacaccugaugacucgagcugguacugcaugcacgcaaugcuagcugccccuuucccguccuggguaccccgagucucccccgaccucgggucccagguaugcucccaccuccaccugccccacucaccaccucugcuaguuccagacaccucccaagcacgcagcaaugcagcucaaaacgcuuagccuagccacacccccacgggaaacagcagugauuaaccuuuagcaauaaacgaaaguuuaacuaagcuauacuaaccccaggguuggucaauuucgugccagccacacccuggagcuagcaaaaaaaaaaaaaaaaaaaaaaaaaaaaaaaaaaaaaaaaaaaaaaaaaaaaaaaaaaaaaaaaaaaaaaaaaaaaaaaaaaaaaaaaaaaaaaaaaaaa

SEQ ID NO: 26327 - RNA, 4273 nt, Artificial Sequence
  SARS-CoV-2/Wuhan/WIV05/2019__EPI_ISL_402128 spike protein mRNA gc (1-1273)(S477N_D614G)
agaauaaacuaguauucuucugguccccacagacucagagagaacccgccaccauguucguguuccuggugcugcugccccuggugagcagccagugcgugaaccugaccacccggacccagcugcccccugccuacaccaacagcuucacccggggcguguacuaccccgacaagguguuccggagcagcgugcugcacagcacccaggaccuguuccugcccuucuucagcaacgugaccugguuccacgccauccacgugagcggcaccaacggcaccaagcgguucgacaacccagugcugcccuucaacgacggcguguacuucgccagcaccgagaagucaaacaucauccggggcuggaucuucggcaccacccuggacagcaagacacagagccugcugaucgugaacaacgccaccaacguggugaucaaggugugcgaguuucaguucugcaacgaccccuuccugggcguguacuaccacaagaacaacaagagcuggauggagagcgaguuccgggucuacagcagcgcuaacaauugcaccuucgaguacgugagccagcccuuccugauggaccucgagggcaagcagggcaacuucaagaaccugcgggaguucguguucaagaacaucgauggcuacuucaagaucuacagcaagcacacccccaucaaccuggugcgggaccugccccagggauucagcgcccuggagccucugguggaccugcccaucggcaucaacaucaccagguuccagacccugcuggcccugcaccggagcuaccugacccccggcgacagcagcagcggcuggaccgccggcgccgccgcauacuacgugggcuaccugcagccacggaccuuccugcugaaguacaacgagaacggcaccaucaccgacgccguggacugcgcccuggacccccugagcgagaccaagugcacccuaaagagcuucaccguggagaagggcaucuaccagaccagcaacuuccgggugcagcccacugagagcaucgugcgguuccccaacauuaccaaccugugucccuucggcgagguguucaacgccacccgguucgccagcguguacgccuggaaccggaagcggaucagcaacugcguggccgacuacagcgugcuguacaacagcgccagcuucagcaccuucaagugcuacggcgugagcccuaccaagcugaacgaccugugcuucaccaacguguacgcugacagcuucgugauccggggcgacgaggugcggcagaucgcccccggccagaccggcaagaucgccgacuacaacuacaagcugcccgacgacuucaccggcugcgugaucgccuggaacagcaacaaccuggacagcaaggugggcggcaacuacaacuaccuguaccggcuguuccguaagagcaaccugaagccauucgagcgggacaucagcaccgagaucuaccaggccggcaacacccccugcaacgguguggagggcuuuaacugcuacuucccccugcagagcuacggcuuccagcccaccaacggcgugggcuaccagcccuaccgggugguggugcugagcuucgagcugcugcacgcccccgccaccgugugcggcccuaaaaagagcaccaaccuggugaagaacaagugcgugaauuucaacuucaacggccugaccggcaccggcgugcugaccgagagcaacaagaaguuccugcccuuccagcaguucggccgggauaucgccgacaccaccgacgcagugcgggacccccagacccuggagauccuggacaucaccccaugcagcuucggcggcgugagcgucaucacccccggcacaaacaccagcaaccagguggccgugcuguaccagggagugaacugcaccgaggugcccguggccauccacgccgaccagcugacccccaccuggcggguguacagcaccggcagcaacguguuccagacccgggccggcugccugaucggcgccgagcacgugaacaacagcuacgagugcgacauccccaucggcgcuggcaucugcgccuccuaccagacccagaccaacagcccccggcgggcccggagcguggccagccagagcaucaucgccuacaccaugagcuuaggcgccgagaacagcguggccuacagcaacaacagcaucgcgaucccuaccaacuucaccaucagcgugaccaccgagauacugcccgugagcaugaccaagaccagcguggacuguaccauguacaucugcggcgacagcaccgagugcagcaaccugcugcugcaguacggcagcuucugcacccagcugaaccgggcccugaccggcaucgccguggagcaggacaagaacacccaagagguguucgcccaggugaagcagaucuacaagacucccccaaucaaggacuucggcggcuucaacuucagccagauccugcccgaccccagcaagcccagcaagcggagcuucaucgaggaccugcuguucaacaaggugacccuggccgacgccggcuucaucaagcaguacggcgacugccugggggauaucgccgcucgggaccugaucugcgcccagaaguucaacggccugaccgugcugcccccucugcugaccgacgagaugaucgcccaguacaccagcgcccugcuugccggcaccaucaccagcggcuggaccuucggcgccggcgcagcccugcagauccccuucgccaugcagauggccuaccgguucaacggcaucggcgugacccagaacgugcuguacgagaaccagaagcugaucgccaaccaguucaacagcgccaucggcaagauccaggacagccugagcagcaccgccagcgcccugggcaagcugcaggacguggugaaccagaacgcucaggcccugaacacccuggugaagcagcugagcagcaauuucggcgccaucagcagcgugcugaacgacauccugucaaggcuggacaagguggaggccgaggugcagaucgaccggcugaucaccggccggcugcagagccugcagaccuacgugacccagcagcugauccgggccgccgagauccgggccagcgccaaccuggcagccaccaagaugagcgagugcgugcugggccagagcaagcggguggacuuuugcggcaagggcuaccaccugaugagcuucccccagagcgccccacacggcgugguguuccuccacgucacauacgugcccgcccaggagaagaacuucaccaccgcccccgccauuugccacgacggcaaggcucacuucccccgggagggaguguucgugagcaacggcacccacugguucgugacccagcggaacuucuacgagccccagaucaucaccaccgacaacaccuucgugagcggcaacugcgacguggugaucggcaucgugaacaacaccguguacgacccccugcagccugagcuggacagcuucaaggaggagcuggacaaguacuucaagaaccacaccagccccgacguggaucugggcgacaucagcggcaucaacgccagcguggugaacauccagaaggagaucgaccggcugaacgagguggccaagaaccugaacgagagccugaucgaccugcaggagcugggcaaguacgagcaguacaucaaguggcccugguacaucuggcugggcuucaucgccggccugaucgccaucgugauggugaccaucaugcugugcugcaugaccagcugcuguagcugccugaagggcugcugcagcugcggcagcugcugcaaguucgacgaggacgacagcgagccagugcugaagggcgugaagcugcacuacaccugaugacucgagcugguacugcaugcacgcaaugcuagcugccccuuucccguccuggguaccccgagucucccccgaccucgggucccagguaugcucccaccuccaccugccccacucaccaccucugcuaguuccagacaccucccaagcacgcagcaaugcagcucaaaacgcuuagccuagccacacccccacgggaaacagcagugauuaaccuuuagcaauaaacgaaaguuuaacuaagcuauacuaaccccaggguuggucaauuucgugccagccacacccuggagcuagcaaaaaaaaaaaaaaaaaaaaaaaaaaaaaaaaaaaaaaaaaaaaaaaaaaaaaaaaaaaaaaaaaaaaaaaaaaaaaaaaaaaaaaaaaaaaaaaaaaaa

SEQ ID NO: 26328 - RNA, 4273 nt, Artificial Sequence
  SARS-CoV-2/Wuhan/WIV05/2019__EPI_ISL_402128 spike protein mRNA gc (1-1273)(N501Y_D614G)
agaauaaacuaguauucuucugguccccacagacucagagagaacccgccaccauguucguguuccuggugcugcugccccuggugagcagccagugcgugaaccugaccacccggacccagcugcccccugccuacaccaacagcuucacccggggcguguacuaccccgacaagguguuccggagcagcgugcugcacagcacccaggaccuguuccugcccuucuucagcaacgugaccugguuccacgccauccacgugagcggcaccaacggcaccaagcgguucgacaacccagugcugcccuucaacgacggcguguacuucgccagcaccgagaagucaaacaucauccggggcuggaucuucggcaccacccuggacagcaagacacagagccugcugaucgugaacaacgccaccaacguggugaucaaggugugcgaguuucaguucugcaacgaccccuuccugggcguguacuaccacaagaacaacaagagcuggauggagagcgaguuccgggucuacagcagcgcuaacaauugcaccuucgaguacgugagccagcccuuccugauggaccucgagggcaagcagggcaacuucaagaaccugcgggaguucguguucaagaacaucgauggcuacuucaagaucuacagcaagcacacccccaucaaccuggugcgggaccugccccagggauucagcgcccuggagccucugguggaccugcccaucggcaucaacaucaccagguuccagacccugcuggcccugcaccggagcuaccugacccccggcgacagcagcagcggcuggaccgccggcgccgccgcauacuacgugggcuaccugcagccacggaccuuccugcugaaguacaacgagaacggcaccaucaccgacgccguggacugcgcccuggacccccugagcgagaccaagugcacccuaaagagcuucaccguggagaagggcaucuaccagaccagcaacuuccgggugcagcccacugagagcaucgugcgguuccccaacauuaccaaccugugucccuucggcgagguguucaacgccacccgguucgccagcguguacgccuggaaccggaagcggaucagcaacugcguggccgacuacagcgugcuguacaacagcgccagcuucagcaccuucaagugcuacggcgugagcccuaccaagcugaacgaccugugcuucaccaacguguacgcugacagcuucgugauccggggcgacgaggugcggcagaucgcccccggccagaccggcaagaucgccgacuacaacuacaagcugcccgacgacuucaccggcugcgugaucgccuggaacagcaacaaccuggacagcaaggugggcggcaacuacaacuaccuguaccggcuguuccguaagagcaaccugaagccauucgagcgggacaucagcaccgagaucuaccaggccggcagcacccccugcaacgguguggagggcuuuaacugcuacuucccccugcagagcuacggcuuccagcccaccuacggcgugggcuaccagcccuaccgggugguggugcugagcuucgagcugcugcacgcccccgccaccgugugcggcccuaaaaagagcaccaaccuggugaagaacaagugcgugaacuucaacuucaauggccugaccggcaccggcgugcugaccgagagcaacaagaaguuccugcccuuccagcaguucggccgggauaucgccgacaccaccgacgcagugcgggacccccagacccuggagauccuggacaucaccccaugcagcuucggcggcgugagcgucaucacccccggcacaaacaccagcaaccagguggccgugcuguaccagggagugaacugcaccgaggugcccguggccauccacgccgaccagcugacccccaccuggcggguguacagcaccggcagcaacguguuccagacccgggccggcugccugaucggcgccgagcacgugaacaacuccuacgagugcgacauccccaucggcgcuggcaucugcgccagcuaccagacccagaccaacagcccccggcgggcccggagcguggccagccagagcaucaucgccuacaccaugagcuuaggcgccgagaacagcguggccuacagcaacaacagcaucgcgaucccuaccaacuucaccaucagcgugaccaccgagauacugcccgugagcaugaccaagaccagcguggacuguaccauguacaucugcggcgacagcaccgagugcagcaaccugcugcugcaguacggcagcuucugcacccagcugaaccgggcccugaccggcaucgccguggagcaggacaagaacacccaagagguguucgcccaggugaagcagaucuacaagacucccccaaucaaggacuucggcggcuucaacuucagccagauccugcccgaccccagcaagcccagcaagcggagcuucaucgaggaccugcuguucaacaaggugacccuggccgacgccggcuucaucaagcaguacggcgacugccugggggauaucgccgcucgggaccugaucugcgcccagaaguucaacggccugaccgugcugcccccucugcugaccgacgagaugaucgcccaguacaccagcgcccugcuugccggcaccaucaccagcggcuggaccuucggcgccggcgcagcccugcagauccccuucgccaugcagauggccuaccgguucaacggcaucggcgugacccagaacgugcuguacgagaaccagaagcugaucgccaaccaguucaacagcgccaucggcaagauccaggacagccugagcagcaccgccagcgcccugggcaagcugcaggacguggugaaccagaacgcucaggcccugaacacccuggugaagcagcugagcagcaacuucggcgccaucagcucagugcugaacgacauccugagcaggcuggacaagguggaggccgaggugcagaucgaccggcugaucaccggccggcugcagagccugcagaccuacgugacccagcagcugauccgggccgccgagauccgggccagcgccaaucuggcagccaccaagaugagcgagugcgugcugggccagagcaagcggguggacuuuugcggcaagggcuaccaccugaugagcuucccccagagcgccccacacggcgugguguuccuccacgucacauacgugcccgcccaggagaagaacuucaccaccgcccccgccauuugccacgacggcaaggcucacuucccccgggagggaguguucgugagcaacggcacccacugguucgugacccagcggaacuucuacgagccccagaucaucaccaccgacaacaccuucgugagcggcaacugcgacguggugaucggcaucgugaacaacaccguguacgacccccugcagccugagcuggacagcuucaaggaggagcuggacaaguacuucaagaaccacaccagccccgacguggaucugggcgacaucagcggcaucaacgccagcguggugaacauccagaaggagaucgaccggcugaacgagguggccaagaaccugaacgagagccugaucgaccugcaggagcugggcaaguacgagcaguacaucaaguggcccugguacaucuggcugggcuucaucgccggccugaucgccaucgugauggugaccaucaugcugugcugcaugaccagcugcuguagcugccugaagggcugcugcagcugcggcagcugcugcaaguucgacgaggacgacagcgagccagugcugaagggcgugaagcugcacuacaccugaugacucgagcugguacugcaugcacgcaaugcuagcugccccuuucccguccuggguaccccgagucucccccgaccucgggucccagguaugcucccaccuccaccugccccacucaccaccucugcuaguuccagacaccucccaagcacgcagcaaugcagcucaaaacgcuuagccuagccacacccccacgggaaacagcagugauuaaccuuuagcaauaaacgaaaguuuaacuaagcuauacuaaccccaggguuggucaauuucgugccagccacacccuggagcuagcaaaaaaaaaaaaaaaaaaaaaaaaaaaaaaaaaaaaaaaaaaaaaaaaaaaaaaaaaaaaaaaaaaaaaaaaaaaaaaaaaaaaaaaaaaaaaaaaaaaa

SEQ ID NO: 26329 - RNA, 4267 nt, Artificial Sequence
  SARS-CoV-2/Wuhan/WIV05/2019__EPI_ISL_402128 spike protein mRNA gc (1-1273)(H69del_V70del_D614G)
agaauaaacuaguauucuucugguccccacagacucagagagaacccgccaccauguucguguuccuggugcugcugccccuggugagcagccagugcgugaaccugaccacccggacccagcugcccccugccuacaccaacagcuucacccggggcguguacuaccccgacaagguguuccggagcagcgugcugcacagcacccaggaccuguuccugcccuucuucagcaacgugaccugguuccacgccaucagcggcaccaacggcaccaagcgguucgacaacccagugcugcccuucaacgacggcguguacuucgccagcaccgagaagucaaacaucauccggggcuggaucuucggcaccacccuggacagcaagacacagagccugcugaucgugaacaacgccaccaacguggugaucaaggugugcgaguuucaguucugcaacgaccccuuccugggcguguacuaccacaagaacaacaagagcuggauggagagcgaguuccggguguacagcagcgcuaacaauugcaccuucgaguacgucagccagcccuuccugauggaccucgagggcaagcagggcaacuucaagaaccugcgggaguucguguucaagaacaucgauggcuacuucaagaucuacagcaagcacacccccaucaaccuggugcgggaccugccccagggauucagcgcccuggagccucugguggaccugcccaucggcaucaacaucaccagguuccagacccugcuggcccugcaccggagcuaccugacccccggcgacagcagcagcggcuggaccgccggcgccgccgcauacuacgugggcuaccugcagccacggaccuuccugcugaaguacaacgagaacggcaccaucaccgacgccguggacugcgcccuggacccccugagcgagaccaagugcacccuaaagagcuucaccguggagaagggcaucuaccagaccagcaacuuccgggugcagcccacugagagcaucgugcgguuccccaacauuaccaaccugugucccuucggcgagguguucaacgccacccgguucgccagcguguacgccuggaaccggaagcggaucagcaacugcguggccgacuacagcgugcuguacaacagcgccagcuucagcaccuucaagugcuacggcgugagcccuaccaagcugaacgaccugugcuucaccaacguguacgcugacagcuucgugauccggggcgacgaggugcggcagaucgcccccggccagaccggcaagaucgccgacuacaacuacaagcugcccgacgacuucaccggcugcgugaucgccuggaacagcaacaaccuggacagcaaggugggcggcaacuacaacuaccuguaccggcuguuccguaagagcaaccugaagccauucgagcgggacaucagcaccgagaucuaccaggccggcagcacccccugcaacgguguggagggcuuuaacugcuacuucccccugcagagcuacggcuuccagcccaccaacggcgugggcuaccagcccuaccgggugguggugcugagcuucgagcugcugcacgcccccgccaccgugugcggcccuaaaaagagcaccaaccuggugaagaacaagugcgugaacuucaauuucaacggccugaccggcaccggcgugcugaccgagagcaacaagaaguuccugcccuuccagcaguucggccgggauaucgccgacaccaccgacgcagugcgggacccccagacccuggagauccuggacaucaccccaugcagcuucggcggcgugagcgugaucacccccggcacaaacaccagcaaccaggucgccgugcuguaccagggagugaacugcaccgaggugcccguggccauccacgccgaccagcugacccccaccuggcggguguacagcaccggcagcaacguguuccagacccgggccggcugccugaucggcgccgagcacgugaacaacuccuacgagugcgacauccccaucggcgcuggcaucugcgccagcuaccagacccagaccaacagcccccggcgggcccggagcguggccagccagagcaucaucgccuacaccaugagcuuaggcgccgagaacagcguggccuacagcaacaacagcaucgcgaucccuaccaacuucaccaucagcgugaccaccgagauacugcccgugagcaugaccaagaccagcguggacuguaccauguacaucugcggcgacagcaccgagugcagcaaccugcugcugcaguacggcagcuucugcacccagcugaaccgggcccugaccggcaucgccguggagcaggacaagaacacccaagagguguucgcccaggugaagcagaucuacaagacucccccaaucaaggacuucggcggcuucaacuucagccagauccugcccgaccccagcaagcccagcaagcggagcuucaucgaggaccugcuguucaacaaggugacccuggccgacgccggcuucaucaagcaguacggcgacugccugggggauaucgccgcucgggaccugaucugcgcccagaaguucaacggccugaccgugcugcccccucugcugaccgacgagaugaucgcccaguacaccagcgcccugcuugccggcaccaucaccagcggcuggaccuucggcgccggcgcagcccugcagauccccuucgccaugcagauggccuaccgguucaacggcaucggcgugacccagaacgugcuguacgagaaccagaagcugaucgccaaccaguucaacagcgccaucggcaagauccaggacagccugagcagcaccgccagcgcccugggcaagcugcaggacguggugaaccagaacgcucaggcccugaacacccuggugaagcagcugagcagcaacuucggcgccaucagcucagugcugaaugacauccugagcaggcuggacaagguggaggccgaggugcagaucgaccggcugaucaccggccggcugcagagccugcagaccuacgugacccagcagcugauccgggccgccgagauccgggccagcgccaaccuggcagccaccaagaugagcgagugcgugcugggccagagcaagcggguggacuuuugcggcaagggcuaccaccugaugagcuucccccagagcgccccacacggcgugguguuccuccacgugacauacguccccgcccaggagaagaacuucaccaccgcccccgccauuugccacgacggcaaggcucacuucccccgggagggaguguucgugagcaacggcacccacugguucgugacccagcggaacuucuacgagccccagaucaucaccaccgacaacaccuucgugagcggcaacugcgacguggugaucggcaucgugaacaacaccguguacgacccccugcagccugagcuggacagcuucaaggaggagcuggacaaguacuucaagaaccacaccagccccgacguggaucugggcgacaucagcggcaucaacgccagcguggugaacauccagaaggagaucgaccggcugaacgagguggccaagaaccugaacgagagccugaucgaccugcaggagcugggcaaguacgagcaguacaucaaguggcccugguacaucuggcugggcuucaucgccggccugaucgccaucgugauggugaccaucaugcugugcugcaugaccagcugcuguagcugccugaagggcugcugcagcugcggcagcugcugcaaguucgacgaggacgacagcgagccagugcugaagggcgugaagcugcacuacaccugaugacucgagcugguacugcaugcacgcaaugcuagcugccccuuucccguccuggguaccccgagucucccccgaccucgggucccagguaugcucccaccuccaccugccccacucaccaccucugcuaguuccagacaccucccaagcacgcagcaaugcagcucaaaacgcuuagccuagccacacccccacgggaaacagcagugauuaaccuuuagcaauaaacgaaaguuuaacuaagcuauacuaaccccaggguuggucaauuucgugccagccacacccuggagcuagcaaaaaaaaaaaaaaaaaaaaaaaaaaaaaaaaaaaaaaaaaaaaaaaaaaaaaaaaaaaaaaaaaaaaaaaaaaaaaaaaaaaaaaaaaaaaaaaaaaaa

SEQ ID NO: 26330 - RNA, 4273 nt, Artificial Sequence
  SARS-CoV-2/Wuhan/WIV05/2019__EPI_ISL_402128 spike protein mRNA gc (1-1273)(Y453F_D614G)
agaauaaacuaguauucuucugguccccacagacucagagagaacccgccaccauguucguguuccuggugcugcugccccuggugagcagccagugcgugaaccugaccacccggacccagcugcccccugccuacaccaacagcuucacccggggcguguacuaccccgacaagguguuccggagcagcgugcugcacagcacccaggaccuguuccugcccuucuucagcaacgugaccugguuccacgccauccacgugagcggcaccaacggcaccaagcgguucgacaacccagugcugcccuucaacgacggcguguacuucgccagcaccgagaagucaaacaucauccggggcuggaucuucggcaccacccuggacagcaagacacagagccugcugaucgugaacaacgccaccaacguggugaucaaggugugcgaguuucaguucugcaacgaccccuuccugggcguguacuaccacaagaacaacaagagcuggauggagagcgaguuccgggucuacagcagcgcuaacaauugcaccuucgaguacgugagccagcccuuccugauggaccucgagggcaagcagggcaacuucaagaaccugcgggaguucguguucaagaacaucgauggcuacuucaagaucuacagcaagcacacccccaucaaccuggugcgggaccugccccagggauucagcgcccuggagccucugguggaccugcccaucggcaucaacaucaccagguuccagacccugcuggcccugcaccggagcuaccugacccccggcgacagcagcagcggcuggaccgccggcgccgccgcauacuacgugggcuaccugcagccacggaccuuccugcugaaguacaacgagaacggcaccaucaccgacgccguggacugcgcccuggacccccugagcgagaccaagugcacccuaaagagcuucaccguggagaagggcaucuaccagaccagcaacuuccgggugcagcccacugagagcaucgugcgguuccccaacauuaccaaccugugucccuucggcgagguguucaacgccacccgguucgccagcguguacgccuggaaccggaagcggaucagcaacugcguggccgacuacagcgugcuguacaacagcgccagcuucagcaccuucaagugcuacggcgugagcccuaccaagcugaacgaccugugcuucaccaacguguacgcugacagcuucgugauccggggcgacgaggugcggcagaucgcccccggccagaccggcaagaucgccgacuacaacuacaagcugcccgacgacuucaccggcugcgugaucgccuggaacagcaacaaccuggacagcaaggugggcggcaacuacaacuaccuguuccggcuguuccguaagagcaaccugaagccauuugagcgggacaucagcaccgagaucuaccaggccggcagcacccccugcaacgguguggagggcuucaacugcuacuucccccugcagagcuacggcuuccagcccaccaacggcgugggcuaccagcccuaccgggugguggugcugagcuucgagcugcugcacgcccccgccaccgugugcggcccuaaaaagagcaccaaccuggugaagaacaagugcgugaacuucaauuucaacggccugaccggcaccggcgugcugaccgagagcaacaagaaguuccugcccuuccagcaguucggccgggauaucgccgacaccaccgacgcagugcgggacccccagacccuggagauccuggacaucaccccaugcagcuucggcggcgugagcgucaucacccccggcacaaacaccagcaaccagguggccgugcuguaccagggagugaacugcaccgaggugcccguggccauccacgccgaccagcugacccccaccuggcggguguacagcaccggcagcaacguguuccagacccgggccggcugccugaucggcgccgagcacgugaacaacuccuacgagugcgacauccccaucggcgcuggcaucugcgccagcuaccagacccagaccaacagcccccggcgggcccggagcguggccagccagagcaucaucgccuacaccaugagcuuaggcgccgagaacagcguggccuacagcaacaacagcaucgcgaucccuaccaacuucaccaucagcgugaccaccgagauacugcccgugagcaugaccaagaccagcguggacuguaccauguacaucugcggcgacagcaccgagugcagcaaccugcugcugcaguacggcagcuucugcacccagcugaaccgggcccugaccggcaucgccguggagcaggacaagaacacccaagagguguucgcccaggugaagcagaucuacaagacucccccaaucaaggacuucggcggcuucaacuucagccagauccugcccgaccccagcaagcccagcaagcggagcuucaucgaggaccugcuguucaacaaggugacccuggccgacgccggcuucaucaagcaguacggcgacugccugggggauaucgccgcucgggaccugaucugcgcccagaaguucaacggccugaccgugcugcccccucugcugaccgacgagaugaucgcccaguacaccagcgcccugcuugccggcaccaucaccagcggcuggaccuucggcgccggcgcagcccugcagauccccuucgccaugcagauggccuaccgguucaacggcaucggcgugacccagaacgugcuguacgagaaccagaagcugaucgccaaccaguucaacagcgccaucggcaagauccaggacagccugagcagcaccgccagcgcccugggcaagcugcaggacguggugaaccagaacgcucaggcccugaacacccuggugaagcagcugagcagcaacuuuggcgccaucagcucagugcugaaugacauccugagcaggcuggacaagguggaggccgaggugcagaucgaccggcugaucaccggccggcugcagagccugcagaccuacgugacccagcagcugauccgggccgccgagauccgggccagcgccaaccuggcagccaccaagaugagcgagugcgugcugggccagagcaagcggguggacuucugcggcaagggcuaccaccugaugagcuucccccagagcgccccacacggcgugguguuccuccacgucacauacgugcccgcccaggagaagaacuucaccaccgcccccgccauuugccacgacggcaaggcucacuucccccgggagggaguguucgugagcaacggcacccacugguucgugacccagcggaacuucuacgagccccagaucaucaccaccgacaacaccuucgugagcggcaacugcgacguggugaucggcaucgugaacaacaccguguacgacccccugcagccugagcuggacagcuucaaggaggagcuggacaaguacuucaagaaccacaccagccccgacguggaucugggcgacaucagcggcaucaacgccagcguggugaacauccagaaggagaucgaccggcugaacgagguggccaagaaccugaacgagagccugaucgaccugcaggagcugggcaaguacgagcaguacaucaaguggcccugguacaucuggcugggcuucaucgccggccugaucgccaucgugauggugaccaucaugcugugcugcaugaccagcugcuguagcugccugaagggcugcugcagcugcggcagcugcugcaaguucgacgaggacgacagcgagccagugcugaagggcgugaagcugcacuacaccugaugacucgagcugguacugcaugcacgcaaugcuagcugccccuuucccguccuggguaccccgagucucccccgaccucgggucccagguaugcucccaccuccaccugccccacucaccaccucugcuaguuccagacaccucccaagcacgcagcaaugcagcucaaaacgcuuagccuagccacacccccacgggaaacagcagugauuaaccuuuagcaauaaacgaaaguuuaacuaagcuauacuaaccccaggguuggucaauuucgugccagccacacccuggagcuagcaaaaaaaaaaaaaaaaaaaaaaaaaaaaaaaaaaaaaaaaaaaaaaaaaaaaaaaaaaaaaaaaaaaaaaaaaaaaaaaaaaaaaaaaaaaaaaaaaaaa

SEQ ID NO: 26331 - RNA, 4273 nt, Artificial Sequence
  SARS-CoV-2/Wuhan/WIV05/2019__EPI_ISL_402128 spike protein mRNA gc (1-1273)(D614G_I692V)
agaauaaacuaguauucuucugguccccacagacucagagagaacccgccaccauguucguguuccuggugcugcugccccuggugagcagccagugcgugaaccugaccacccggacccagcugcccccugccuacaccaacagcuucacccggggcguguacuaccccgacaagguguuccggagcagcgugcugcacagcacccaggaccuguuccugcccuucuucagcaacgugaccugguuccacgccauccacgugagcggcaccaacggcaccaagcgguucgacaacccagugcugcccuucaacgacggcguguacuucgccagcaccgagaagucaaacaucauccggggcuggaucuucggcaccacccuggacagcaagacacagagccugcugaucgugaacaacgccaccaacguggugaucaaggugugcgaguuucaguucugcaacgaccccuuccugggcguguacuaccacaagaacaacaagagcuggauggagagcgaguuccgggucuacagcagcgcuaacaauugcaccuucgaguacgugagccagcccuuccugauggaccucgagggcaagcagggcaacuucaagaaccugcgggaguucguguucaagaacaucgauggcuacuucaagaucuacagcaagcacacccccaucaaccuggugcgggaccugccccagggauucagcgcccuggagccucugguggaccugcccaucggcaucaacaucaccagguuccagacccugcuggcccugcaccggagcuaccugacccccggcgacagcagcagcggcuggaccgccggcgccgccgcauacuacgugggcuaccugcagccacggaccuuccugcugaaguacaacgagaacggcaccaucaccgacgccguggacugcgcccuggacccccugagcgagaccaagugcacccuaaagagcuucaccguggagaagggcaucuaccagaccagcaacuuccgggugcagcccacugagagcaucgugcgguuccccaacauuaccaaccugugucccuucggcgagguguucaacgccacccgguucgccagcguguacgccuggaaccggaagcggaucagcaacugcguggccgacuacagcgugcuguacaacagcgccagcuucagcaccuucaagugcuacggcgugagcccuaccaagcugaacgaccugugcuucaccaacguguacgcugacagcuucgugauccggggcgacgaggugcggcagaucgcccccggccagaccggcaagaucgccgacuacaacuacaagcugcccgacgacuucaccggcugcgugaucgccuggaacagcaacaaccuggacagcaaggugggcggcaacuacaacuaccuguaccggcuguuccguaagagcaaccugaagccauucgagcgggacaucagcaccgagaucuaccaggccggcagcacccccugcaacgguguggagggcuuuaacugcuacuucccccugcagagcuacggcuuccagcccaccaacggcgugggcuaccagcccuaccgggugguggugcugagcuucgagcugcugcacgcccccgccaccgugugcggcccuaaaaagagcaccaaccuggugaagaacaagugcgugaacuucaauuucaacggccugaccggcaccggcgugcugaccgagagcaacaagaaguuccugcccuuccagcaguucggccgggauaucgccgacaccaccgacgcagugcgggacccccagacccuggagauccuggacaucaccccaugcagcuucggcggcgugagcgucaucacccccggcacaaacaccagcaaccagguggccgugcuguaccagggagugaacugcaccgaggugcccguggccauccacgccgaccagcugacccccaccuggcggguguacagcaccggcagcaacguguuccagacccgggccggcugccugaucggcgccgagcacgugaacaacuccuacgagugcgacauccccaucggcgcuggcaucugcgccagcuaccagacccagaccaacagcccccggcgggcccggagcguggccagccagagcgugaucgccuacaccaugagcuuaggcgccgagaacagcguggccuacagcaacaacagcaucgcgaucccuaccaacuucaccaucagcgugaccaccgagauccugcccgugagcaugaccaagaccagcguggacuguaccauguacauaugcggcgacagcaccgagugcagcaaccugcugcugcaguacggcagcuucugcacccagcugaaccgggcccugaccggcaucgccguggagcaggacaagaacacccaagagguguucgcccaggugaagcagaucuacaagacucccccaaucaaggacuucggcggcuucaacuucagccagauccugcccgaccccagcaagcccagcaagcggagcuucaucgaggaccugcuguucaacaaggugacccuggccgacgccggcuucaucaagcaguacggcgacugccugggggauaucgccgcucgggaccugaucugcgcccagaaguucaacggccugaccgugcugcccccucugcugaccgacgagaugaucgcccaguacaccagcgcccugcuugccggcaccaucaccagcggcuggaccuucggcgccggcgcagcccugcagauccccuucgccaugcagauggccuaccgguucaacggcaucggcgugacccagaacgugcuguacgagaaccagaagcugaucgccaaccaguucaacagcgccaucggcaagauccaggacagccugagcagcaccgccagcgcccugggcaagcugcaggacguggugaaccagaacgcucaggcccugaacacccuggugaagcagcugagcagcaacuucggcgccaucagcucagugcugaaugacauccugagcaggcuggacaagguggaggccgaggugcagaucgaccggcugaucaccggccggcugcagagccugcagaccuacgugacccagcagcugauccgggccgccgagauccgggccagcgccaaccuggcagccaccaagaugagcgagugcgugcugggccagagcaagcggguggacuuuugcggcaagggcuaccaccugaugagcuucccccagagcgccccacacggcguggucuuccuccacgugacauacgugcccgcccaggagaagaacuucaccaccgcccccgccaucugccacgacggcaaggcucacuucccccgggagggaguguucgugagcaacggcacccacugguucgugacccagcggaacuucuacgagccccagauuaucaccaccgacaacaccuucgugagcggcaacugcgacguggugaucggcaucgugaacaacaccguguacgacccccugcagccugagcuggacagcuucaaggaggagcuggacaaguacuucaagaaccacaccagccccgacguggaucugggcgacaucagcggcaucaacgccagcguggugaacauccagaaggagaucgaccggcugaacgagguggccaagaaccugaacgagagccugaucgaccugcaggagcugggcaaguacgagcaguacaucaaguggcccugguacaucuggcugggcuucaucgccggccugaucgccaucgugauggugaccaucaugcugugcugcaugaccagcugcuguagcugccugaagggcugcugcagcugcggcagcugcugcaaguucgacgaggacgacagcgagccagugcugaagggcgugaagcugcacuacaccugaugacucgagcugguacugcaugcacgcaaugcuagcugccccuuucccguccuggguaccccgagucucccccgaccucgggucccagguaugcucccaccuccaccugccccacucaccaccucugcuaguuccagacaccucccaagcacgcagcaaugcagcucaaaacgcuuagccuagccacacccccacgggaaacagcagugauuaaccuuuagcaauaaacgaaaguuuaacuaagcuauacuaaccccaggguuggucaauuucgugccagccacacccuggagcuagcaaaaaaaaaaaaaaaaaaaaaaaaaaaaaaaaaaaaaaaaaaaaaaaaaaaaaaaaaaaaaaaaaaaaaaaaaaaaaaaaaaaaaaaaaaaaaaaaaaaa

SEQ ID NO: 26332 - RNA, 4273 nt, Artificial Sequence
  SARS-CoV-2/Wuhan/WIV05/2019__EPI_ISL_402128 spike protein mRNA gc (1-1273)(D614G_M1229I)
agaauaaacuaguauucuucugguccccacagacucagagagaacccgccaccauguucguguuccuggugcugcugccccuggugagcagccagugcgugaaccugaccacccggacccagcugcccccugccuacaccaacagcuucacccggggcguguacuaccccgacaagguguuccggagcagcgugcugcacagcacccaggaccuguuccugcccuucuucagcaacgugaccugguuccacgccauccacgugagcggcaccaacggcaccaagcgguucgacaacccagugcugcccuucaacgacggcguguacuucgccagcaccgagaagucaaacaucauccggggcuggaucuucggcaccacccuggacagcaagacacagagccugcugaucgugaacaacgccaccaacguggugaucaaggugugcgaguuucaguucugcaacgaccccuuccugggcguguacuaccacaagaacaacaagagcuggauggagagcgaguuccgggucuacagcagcgcuaacaauugcaccuucgaguacgugagccagcccuuccugauggaccucgagggcaagcagggcaacuucaagaaccugcgggaguucguguucaagaacaucgauggcuacuucaagaucuacagcaagcacacccccaucaaccuggugcgggaccugccccagggauucagcgcccuggagccucugguggaccugcccaucggcaucaacaucaccagguuccagacccugcuggcccugcaccggagcuaccugacccccggcgacagcagcagcggcuggaccgccggcgccgccgcauacuacgugggcuaccugcagccacggaccuuccugcugaaguacaacgagaacggcaccaucaccgacgccguggacugcgcccuggacccccugagcgagaccaagugcacccuaaagagcuucaccguggagaagggcaucuaccagaccagcaacuuccgggugcagcccacugagagcaucgugcgguuccccaacauuaccaaccugugucccuucggcgagguguucaacgccacccgguucgccagcguguacgccuggaaccggaagcggaucagcaacugcguggccgacuacagcgugcuguacaacagcgccagcuucagcaccuucaagugcuacggcgugagcccuaccaagcugaacgaccugugcuucaccaacguguacgcugacagcuucgugauccggggcgacgaggugcggcagaucgcccccggccagaccggcaagaucgccgacuacaacuacaagcugcccgacgacuucaccggcugcgugaucgccuggaacagcaacaaccuggacagcaaggugggcggcaacuacaacuaccuguaccggcuguuccguaagagcaaccugaagccauucgagcgggacaucagcaccgagaucuaccaggccggcagcacccccugcaacgguguggagggcuuuaacugcuacuucccccugcagagcuacggcuuccagcccaccaacggcgugggcuaccagcccuaccgggugguggugcugagcuucgagcugcugcacgcccccgccaccgugugcggcccuaaaaagagcaccaaccuggugaagaacaagugcgugaacuucaauuucaacggccugaccggcaccggcgugcugaccgagagcaacaagaaguuccugcccuuccagcaguucggccgggauaucgccgacaccaccgacgcagugcgggacccccagacccuggagauccuggacaucaccccaugcagcuucggcggcgugagcgucaucacccccggcacaaacaccagcaaccagguggccgugcuguaccagggagugaacugcaccgaggugcccguggccauccacgccgaccagcugacccccaccuggcggguguacagcaccggcagcaacguguuccagacccgggccggcugccugaucggcgccgagcacgugaacaacuccuacgagugcgacauccccaucggcgcuggcaucugcgccagcuaccagacccagaccaacagcccccggcgggcccggagcguggccagccagagcaucaucgccuacaccaugagcuuaggcgccgagaacagcguggccuacagcaacaacagcaucgcgaucccuaccaacuucaccaucagcgugaccaccgagauacugcccgugagcaugaccaagaccagcguggacuguaccauguacaucugcggcgacagcaccgagugcagcaaccugcugcugcaguacggcagcuucugcacccagcugaaccgggcccugaccggcaucgccguggagcaggacaagaacacccaagagguguucgcccaggugaagcagaucuacaagacucccccaaucaaggacuucggcggcuucaacuucagccagauccugcccgaccccagcaagcccagcaagcggagcuucaucgaggaccugcuguucaacaaggugacccuggccgacgccggcuucaucaagcaguacggcgacugccugggggauaucgccgcucgggaccugaucugcgcccagaaguucaacggccugaccgugcugcccccucugcugaccgacgagaugaucgcccaguacaccagcgcccugcuugccggcaccaucaccagcggcuggaccuucggcgccggcgcagcccugcagauccccuucgccaugcagauggccuaccgguucaacggcaucggcgugacccagaacgugcuguacgagaaccagaagcugaucgccaaccaguucaacagcgccaucggcaagauccaggacagccugagcagcaccgccagcgcccugggcaagcugcaggacguggugaaccagaacgcucaggcccugaacacccuggugaagcagcugagcagcaacuucggcgccaucagcucagugcugaaugacauccugagcaggcuggacaagguggaggccgaggugcagaucgaccggcugaucaccggccggcugcagagccugcagaccuacgugacccagcagcugauccgggccgccgagauccgggccagcgccaaccuggcagccaccaagaugagcgagugcgugcugggccagagcaagcggguggacuuuugcggcaagggcuaccaccugaugagcuucccccagagcgccccacacggcgugguguuccuccacgucacauacgugcccgcccaggagaagaacuucaccaccgcccccgccauuugccacgacggcaaggcucacuucccccgggagggaguguucgugagcaacggcacccacugguucgugacccagcggaacuucuacgagccccagaucaucaccaccgacaacaccuucgugagcggcaacugcgacguggugaucggcaucgugaacaacaccguguacgacccccugcagccugagcuggacagcuucaaggaggagcuggacaaguacuucaagaaccacaccagccccgacguggaucugggcgacaucagcggcaucaacgccagcguggugaacauccagaaggagaucgaccggcugaacgagguggccaagaaccugaacgagagccugaucgaccugcaggagcugggcaaguacgagcaguacaucaaguggcccugguacaucuggcugggcuucaucgccggccugaucgccaucgugaucgugaccaucaugcugugcugcaugaccagcugcuguagcugccugaagggcugcugcagcugcggcagcugcugcaaguucgacgaggacgacagcgagccagugcugaagggcgugaagcugcacuacaccugaugacucgagcugguacugcaugcacgcaaugcuagcugccccuuucccguccuggguaccccgagucucccccgaccucgggucccagguaugcucccaccuccaccugccccacucaccaccucugcuaguuccagacaccucccaagcacgcagcaaugcagcucaaaacgcuuagccuagccacacccccacgggaaacagcagugauuaaccuuuagcaauaaacgaaaguuuaacuaagcuauacuaaccccaggguuggucaauuucgugccagccacacccuggagcuagcaaaaaaaaaaaaaaaaaaaaaaaaaaaaaaaaaaaaaaaaaaaaaaaaaaaaaaaaaaaaaaaaaaaaaaaaaaaaaaaaaaaaaaaaaaaaaaaaaaaa

SEQ ID NO: 26333 - RNA, 4267 nt, Artificial Sequence
  SARS-CoV-2/Wuhan/WIV05/2019__EPI_ISL_402128 spike protein mRNA gc (1-1273)(H69del_V70del_A222V_Y453F_S477N_D614G_I692V)
agaauaaacuaguauucuucugguccccacagacucagagagaacccgccaccauguucguguuccuggugcugcugccccuggugagcagccagugcgugaaccugaccacccggacccagcugcccccugccuacaccaacagcuucacccggggcguguacuaccccgacaagguguuccggagcagcgugcugcacagcacccaggaccuguuccugcccuucuucagcaacgugaccugguuccacgccaucagcggcaccaacggcaccaagcgguucgacaacccagugcugcccuucaacgacggcguguacuucgccagcaccgagaagucaaacaucauccggggcuggaucuucggcaccacccuggacagcaagacacagagccugcugaucgugaacaacgccaccaacguggugaucaaggugugcgaguuucaguucugcaacgaccccuuccugggcguguacuaccacaagaacaacaagagcuggauggagagcgaguuccggguguacagcagcgcuaacaauugcaccuucgaguacgucagccagcccuuccugauggaccucgagggcaagcagggcaacuucaagaaccugcgggaguucguguucaagaacaucgauggcuacuucaagaucuacagcaagcacacccccaucaaccuggugcgggaccugccccagggauucagcgugcuggagccucugguggaccugcccaucggcaucaacaucaccagguuccagacccugcuggcccugcaccggagcuaccugacccccggcgacagcagcagcggcuggaccgccggcgccgccgccuacuacgugggcuaccugcagccacggaccuuccugcugaaguacaacgagaacggcaccaucaccgacgcaguggacugcgcccuggacccccugagcgagaccaagugcacccuaaagagcuucaccguggagaagggcaucuaccagaccagcaacuuccgggugcagcccacugagagcaucgugcgguuccccaacauuaccaaccugugucccuucggcgagguguucaacgccacccgguucgccagcguguacgccuggaaccggaagcggaucagcaacugcguggccgacuacagcgugcuguacaacagcgccagcuucagcaccuucaagugcuacggcgugagcccuaccaagcugaacgaccugugcuucaccaacguguacgccgacagcuucgugauccggggcgacgaggugcggcagaucgcucccggccagaccggcaagaucgccgacuacaacuacaagcugcccgacgacuucaccggcugcgugaucgccuggaacagcaacaaccuggacagcaaggugggcggcaacuacaacuaccuguuccggcuguuccguaagagcaaccugaagccauuugagcgggacaucagcaccgagaucuaccaggccggcaacacccccugcaacgguguggagggcuucaacugcuacuucccccugcagagcuacggcuuccagcccaccaacggcgugggcuaccagcccuaccgggugguggugcugagcuucgagcugcugcacgcccccgccaccgugugcggcccuaaaaagagcaccaaccuggugaagaacaagugcgugaauuucaacuucaacggccugaccggcaccggcgugcugaccgagagcaacaagaaguuccugcccuuccagcaguucggccgggauaucgccgacaccaccgacgccgugcgggacccccagacccuggagauccuggacaucaccccaugcagcuucggcggcgugagcgucaucacccccggcacaaacaccagcaaccagguggcagugcuguaccagggagugaacugcaccgaggugcccguggccauccacgccgaccagcugacccccaccuggcggguguacagcaccggcagcaacguguuccagacccgggccggcugccugaucggcgccgagcacgugaacaacagcuacgagugcgacauccccaucggcgccggcaucugcgcuuccuaccagacccagaccaacagcccccggcgggcccggagcguggccagccagagcgugaucgccuacaccaugagcuuaggcgccgagaacagcguggccuacagcaacaacagcaucgccaucccuaccaacuucaccaucagcgugaccaccgagauccugcccgugagcaugaccaagaccagcguggacuguaccauguacauaugcggcgacagcaccgagugcagcaaccugcugcugcaguacggcagcuucugcacccagcugaaccgggcgcugaccggcaucgccguggagcaggacaagaacacccaagagguguucgcccaggugaagcagaucuacaagacucccccaaucaaggacuucggcggcuucaacuucagccagauccugcccgaccccagcaagcccagcaagcggagcuucaucgaggaccugcuguucaacaaggugacccuggccgacgccggcuucaucaagcaguacggcgacugccugggggauaucgccgcccgggaccugaucugcgcucagaaguucaacggccugaccgugcugcccccucugcugaccgacgagaugaucgcccaguacaccagcgcccugcuugccggcaccaucaccagcggcuggaccuucggcgccggcgccgcacugcagauccccuucgccaugcagauggccuaccgguucaacggcaucggcgugacccagaacgugcuguacgagaaccagaagcugaucgccaaccaguucaacagcgccaucggcaagauccaggacagccugagcagcaccgccagcgcccugggcaagcugcaggacguggugaaccagaacgcccaggcucugaacacccuggugaagcagcugagcagcaauuuuggcgccaucagcagcgugcugaacgacauccugucaaggcuggacaagguggaggccgaggugcagaucgaccggcugaucaccggccggcugcagagccugcagaccuacgugacccagcagcugauccgggccgccgagauccgggccagcgccaaccuggccgcaaccaagaugagcgagugcgugcugggccagagcaagcggguggacuucugcggcaagggcuaccaccugaugagcuucccccagagcgccccacacggcguggucuuccuccacgugacauacgugcccgcccaggagaagaacuucaccaccgcccccgccaucugccacgacggcaaggcccacuucccccgggagggaguguucgugagcaacggcacccacugguucgugacccagcggaacuucuacgagccccagauuaucaccaccgacaacaccuucgugagcggcaacugcgacguggugaucggcaucgugaacaacaccguguacgacccccugcagccugagcuggacagcuucaaggaggagcuggacaaguacuucaagaaccacaccagccccgacguggaucugggcgacaucagcggcaucaacgcuagcguggugaacauccagaaggagaucgaccggcugaacgagguggccaagaaccugaacgagagccugaucgaccugcaggagcugggcaaguacgagcaguacaucaaguggcccugguacaucuggcugggcuucaucgccggccugaucgccaucgugauggugaccaucaugcugugcugcaugaccagcugcuguagcugccugaagggcugcugcagcugcggcagcugcugcaaguucgacgaggacgacagcgagccagugcugaagggcgugaagcugcacuacaccugaugacucgagcugguacugcaugcacgcaaugcuagcugccccuuucccguccuggguaccccgagucucccccgaccucgggucccagguaugcucccaccuccaccugccccacucaccaccucugcuaguuccagacaccucccaagcacgcagcaaugcagcucaaaacgcuuagccuagccacacccccacgggaaacagcagugauuaaccuuuagcaauaaacgaaaguuuaacuaagcuauacuaaccccaggguuggucaauuucgugccagccacacccuggagcuagcaaaaaaaaaaaaaaaaaaaaaaaaaaaaaaaaaaaaaaaaaaaaaaaaaaaaaaaaaaaaaaaaaaaaaaaaaaaaaaaaaaaaaaaaaaaaaaaaaaaa

SEQ ID NO: 26334 - RNA, 4267 nt, Artificial Sequence
  SARS-CoV-2/Wuhan/WIV05/2019__EPI_ISL_402128 spike protein mRNA gc (1-1273)(H69del_V70del_Y453F_D614G_I692V_M1229I)
agaauaaacuaguauucuucugguccccacagacucagagagaacccgccaccauguucguguuccuggugcugcugccccuggugagcagccagugcgugaaccugaccacccggacccagcugcccccugccuacaccaacagcuucacccggggcguguacuaccccgacaagguguuccggagcagcgugcugcacagcacccaggaccuguuccugcccuucuucagcaacgugaccugguuccacgccaucagcggcaccaacggcaccaagcgguucgacaacccagugcugcccuucaacgacggcguguacuucgccagcaccgagaagucaaacaucauccggggcuggaucuucggcaccacccuggacagcaagacacagagccugcugaucgugaacaacgccaccaacguggugaucaaggugugcgaguuucaguucugcaacgaccccuuccugggcguguacuaccacaagaacaacaagagcuggauggagagcgaguuccggguguacagcagcgcuaacaauugcaccuucgaguacgucagccagcccuuccugauggaccucgagggcaagcagggcaacuucaagaaccugcgggaguucguguucaagaacaucgauggcuacuucaagaucuacagcaagcacacccccaucaaccuggugcgggaccugccccagggauucagcgcccuggagccucugguggaccugcccaucggcaucaacaucaccagguuccagacccugcuggcccugcaccggagcuaccugacccccggcgacagcagcagcggcuggaccgccggcgccgccgcauacuacgugggcuaccugcagccacggaccuuccugcugaaguacaacgagaacggcaccaucaccgacgccguggacugcgcccuggacccccugagcgagaccaagugcacccuaaagagcuucaccguggagaagggcaucuaccagaccagcaacuuccgggugcagcccacugagagcaucgugcgguuccccaacauuaccaaccugugucccuucggcgagguguucaacgccacccgguucgccagcguguacgccuggaaccggaagcggaucagcaacugcguggccgacuacagcgugcuguacaacagcgccagcuucagcaccuucaagugcuacggcgugagcccuaccaagcugaacgaccugugcuucaccaacguguacgcugacagcuucgugauccggggcgacgaggugcggcagaucgcccccggccagaccggcaagaucgccgacuacaacuacaagcugcccgacgacuucaccggcugcgugaucgccuggaacagcaacaaccuggacagcaaggugggcggcaacuacaacuaccuguuccggcuguuccguaagagcaaccugaagccauuugagcgggacaucagcaccgagaucuaccaggccggcagcacccccugcaacgguguggagggcuucaacugcuacuucccccugcagagcuacggcuuccagcccaccaacggcgugggcuaccagcccuaccgggugguggugcugagcuucgagcugcugcacgcccccgccaccgugugcggcccuaaaaagagcaccaaccuggugaagaacaagugcgugaacuucaauuucaacggccugaccggcaccggcgugcugaccgagagcaacaagaaguuccugcccuuccagcaguucggccgggauaucgccgacaccaccgacgcagugcgggacccccagacccuggagauccuggacaucaccccaugcagcuucggcggcgugagcgugaucacccccggcacaaacaccagcaaccaggucgccgugcuguaccagggagugaacugcaccgaggugcccguggccauccacgccgaccagcugacccccaccuggcggguguacagcaccggcagcaacguguuccagacccgggccggcugccugaucggcgccgagcacgugaacaacuccuacgagugcgacauccccaucggcgcuggcaucugcgccagcuaccagacccagaccaacagcccccggcgggcccggagcguggccagccagagcgugaucgccuacaccaugagcuuaggcgccgagaacagcguggccuacagcaacaacagcaucgcgaucccuaccaacuucaccaucagcgugaccaccgagauccugcccgugagcaugaccaagaccagcguggacuguaccauguacauaugcggcgacagcaccgagugcagcaaccugcugcugcaguacggcagcuucugcacccagcugaaccgggcccugaccggcaucgccguggagcaggacaagaacacccaagagguguucgcccaggugaagcagaucuacaagacucccccaaucaaggacuucggcggcuucaacuucagccagauccugcccgaccccagcaagcccagcaagcggagcuucaucgaggaccugcuguucaacaaggugacccuggccgacgccggcuucaucaagcaguacggcgacugccugggggauaucgccgcucgggaccugaucugcgcccagaaguucaacggccugaccgugcugcccccucugcugaccgacgagaugaucgcccaguacaccagcgcccugcuugccggcaccaucaccagcggcuggaccuucggcgccggcgcagcccugcagauccccuucgccaugcagauggccuaccgguucaacggcaucggcgugacccagaacgugcuguacgagaaccagaagcugaucgccaaccaguucaacagcgccaucggcaagauccaggacagccugagcagcaccgccagcgcccugggcaagcugcaggacguggugaaccagaacgcucaggcccugaacacccuggugaagcagcugagcagcaacuuuggcgccaucagcucagugcugaaugacauccugagcaggcuggacaagguggaggccgaggugcagaucgaccggcugaucaccggccggcugcagagccugcagaccuacgugacccagcagcugauccgggccgccgagauccgggccagcgccaaccuggcagccaccaagaugagcgagugcgugcugggccagagcaagcggguggacuucugcggcaagggcuaccaccugaugagcuucccccagagcgccccacacggcgugguguuccuccacgucacauacgugcccgcccaggagaagaacuucaccaccgcccccgccaucugccacgacggcaaggcucacuucccccgggagggaguguucgugagcaacggcacccacugguucgugacccagcggaacuucuacgagccccagauuaucaccaccgacaacaccuucgugagcggcaacugcgacguggugaucggcaucgugaacaacaccguguacgacccccugcagccugagcuggacagcuucaaggaggagcuggacaaguacuucaagaaccacaccagccccgacguggaucugggcgacaucagcggcaucaacgccagcguggugaacauccagaaggagaucgaccggcugaacgagguggccaagaaccugaacgagagccugaucgaccugcaggagcugggcaaguacgagcaguacaucaaguggcccugguacaucuggcugggcuucaucgccggccugaucgccaucgugaucgugaccaucaugcugugcugcaugaccagcugcuguagcugccugaagggcugcugcagcugcggcagcugcugcaaguucgacgaggacgacagcgagccagugcugaagggcgugaagcugcacuacaccugaugacucgagcugguacugcaugcacgcaaugcuagcugccccuuucccguccuggguaccccgagucucccccgaccucgggucccagguaugcucccaccuccaccugccccacucaccaccucugcuaguuccagacaccucccaagcacgcagcaaugcagcucaaaacgcuuagccuagccacacccccacgggaaacagcagugauuaaccuuuagcaauaaacgaaaguuuaacuaagcuauacuaaccccaggguuggucaauuucgugccagccacacccuggagcuagcaaaaaaaaaaaaaaaaaaaaaaaaaaaaaaaaaaaaaaaaaaaaaaaaaaaaaaaaaaaaaaaaaaaaaaaaaaaaaaaaaaaaaaaaaaaaaaaaaaaa

SEQ ID NO: 26335 - RNA, 4264 nt, Artificial Sequence
  SARS-CoV-2/Wuhan/WIV05/2019__EPI_ISL_402128 spike protein mRNA gc (1-1273)(H69del_V70del_Y144del_N501Y_A570D_D614G_P681H_T716I_S982 A_D1118H)
agaauaaacuaguauucuucugguccccacagacucagagagaacccgccaccauguucguguuccuggugcugcugccccuggugagcagccagugcgugaaccugaccacccggacccagcugcccccugccuacaccaacagcuucacccggggcguguacuaccccgacaagguguuccggagcagcgugcugcacagcacccaggaccuguuccugcccuucuucagcaacgugaccugguuccacgccaucagcggcaccaacggcaccaagcgguucgacaacccagugcugcccuucaacgacggcguguacuucgccagcaccgagaagucaaacaucauccggggcuggaucuucggcaccacccuggacagcaagacacagagccugcugaucgugaacaacgccaccaacguggugaucaaggugugcgaguuucaguucugcaacgaccccuuccugggcguguaccacaagaacaacaagagcuggauggagagcgaguuccggguguacagcagcgcuaacaauugcaccuucgaguacgucagccagcccuuccugauggaccucgagggcaagcagggcaacuucaagaaccugcgggaguucguguucaagaacaucgauggcuacuucaagaucuacagcaagcacacccccaucaaccuggugcgggaccugccccagggauucagcgcccuggagccucugguggaccugcccaucggcaucaacaucaccagguuccagacccugcuggcccugcaccggagcuaccugacccccggcgacagcagcagcggcuggaccgccggcgccgccgcauacuacgugggcuaccugcagccacggaccuuccugcugaaguacaacgagaacggcaccaucaccgacgccguggacugcgcccuggacccccugagcgagaccaagugcacccuaaagagcuucaccguggagaagggcaucuaccagaccagcaacuuccgggugcagcccacugagagcaucgugcgguuccccaacauuaccaaccugugucccuucggcgagguguucaacgccacccgguucgccagcguguacgccuggaaccggaagcggaucagcaacugcguggccgacuacagcgugcuguacaacagcgccagcuucagcaccuucaagugcuacggcgugagcccuaccaagcugaacgaccugugcuucaccaacguguacgcugacagcuucgugauccggggcgacgaggugcggcagaucgcccccggccagaccggcaagaucgccgacuacaacuacaagcugcccgacgacuucaccggcugcgugaucgccuggaacagcaacaaccuggacagcaaggugggcggcaacuacaacuaccuguaccggcuguuccguaagagcaaccugaagccauucgagcgggacaucagcaccgagaucuaccaggccggcagcacccccugcaacgguguggagggcuuuaacugcuacuucccccugcagagcuacggcuuccagcccaccuacggcgugggcuaccagcccuaccgggugguggugcugagcuucgagcugcugcacgcccccgccaccgugugcggcccuaaaaagagcaccaaccuggugaagaacaagugcgugaacuucaacuucaauggccugaccggcaccggcgugcugaccgagagcaacaagaaguuccugcccuuccagcaguucggccgggauaucgacgacaccaccgacgccgugcgggacccccagacccuggagauccuggacaucaccccaugcagcuucggcggcgugagcgugaucacccccggcacaaacaccagcaaccaggucgcagugcuguaccagggagugaacugcaccgaggugcccguggccauccacgccgaccagcugacccccaccuggcggguguacagcaccggcagcaacguguuccagacccgggccggcugccugaucggcgccgagcacgugaacaacuccuacgagugcgacauccccaucggcgccggcaucugcgcuagcuaccagacccagaccaacagccaccggcgggcccggagcguggccagccagagcaucaucgccuacaccaugagcuuaggcgccgagaacagcguggccuacagcaacaacagcaucgccauccccaucaacuucaccauaagcgugaccaccgagauccugccugugagcaugaccaagaccagcguggacuguaccauguacaucugcggcgacagcaccgagugcagcaaccugcugcugcaguacggcagcuucugcacccagcugaaccgggcgcugaccggcaucgccguggagcaggacaagaacacccaagagguguucgcccaggugaagcagaucuacaagaccccacccaucaaggacuucggcggcuucaacuucagccagauccugcccgaccccagcaagcccagcaagcggagcuucaucgaggaccugcuguucaacaaggugacucuggccgacgccggcuucaucaagcaguacggcgauugccugggggacaucgccgcccgggaccugaucugcgcucagaaguucaacggccugaccgugcugccuccccugcugaccgacgagaugaucgcccaguacaccagcgcccugcuugccggcaccaucaccagcggcuggaccuucggcgccggcgccgcacugcagauccccuucgccaugcagauggccuaccgguucaacggcaucggcgugacccagaacgugcuguacgagaaccagaagcugaucgccaaccaguucaacagcgccaucggcaagauccaggacagccugagcagcaccgccagcgcccugggcaagcugcaggacguggugaaccagaacgcccaggcucugaacacccuggugaagcagcugagcagcaacuucggcgccaucagcucagugcugaacgacauccuggccaggcuggacaagguggaggccgaggugcagaucgaccggcugaucaccggccggcugcagagccugcagaccuacgugacccagcagcugauccgggccgccgagauucgggccagcgccaaucuggcagccaccaagaugagcgagugcgugcugggccagagcaagcggguggacuuuugcggcaagggcuaccaccugaugagcuucccccagagcgcuccccacggcgugguguuccuccacgugaccuacgucccagcccaggagaagaacuucacaaccgcccccgccaucugccacgacggcaaggcccacuucccccgggagggaguguucgugagcaacggcacccacugguucgugacccagcggaacuucuacgagccccagaucaucaccacccacaacaccuucgugagcggcaacugcgacguggugaucggcaucgugaacaacaccguguacgacccccugcagcccgagcuggacagcuucaaggaggagcuggacaaguacuucaagaaccacaccagcccugacguggaucugggcgacaucagcggcaucaacgccagcguggugaacauccagaaggagaucgaccggcugaacgagguggccaagaaccugaacgagagccugaucgaccugcaggagcugggcaaguacgagcaguacaucaaguggcccugguacaucuggcugggcuucaucgccggccugaucgccaucgugauggugaccaucaugcugugcugcaugaccagcugcuguagcugccugaagggcugcugcagcugcggcagcugcugcaaguucgacgaggacgacagcgagcccgugcugaagggcgugaagcugcacuacaccugaugacucgagcugguacugcaugcacgcaaugcuagcugccccuuucccguccuggguaccccgagucucccccgaccucgggucccagguaugcucccaccuccaccugccccacucaccaccucugcuaguuccagacaccucccaagcacgcagcaaugcagcucaaaacgcuuagccuagccacacccccacgggaaacagcagugauuaaccuuuagcaauaaacgaaaguuuaacuaagcuauacuaaccccaggguuggucaauuucgugccagccacacccuggagcuagcaaaaaaaaaaaaaaaaaaaaaaaaaaaaaaaaaaaaaaaaaaaaaaaaaaaaaaaaaaaaaaaaaaaaaaaaaaaaaaaaaaaaaaaaaaaaaaaaaaaa

SEQ ID NO: 26336 - RNA, 4273 nt, Artificial Sequence
  SARS-CoV-2/Wuhan/WIV05/2019__EPI_ISL_402128 spike protein mRNA gc (1-1273)(K417N_E484K_N501Y_D614G)
agaauaaacuaguauucuucugguccccacagacucagagagaacccgccaccauguucguguuccuggugcugcugccccuggugagcagccagugcgugaaccugaccacccggacccagcugcccccugccuacaccaacagcuucacccggggcguguacuaccccgacaagguguuccggagcagcgugcugcacagcacccaggaccuguuccugcccuucuucagcaacgugaccugguuccacgccauccacgugagcggcaccaacggcaccaagcgguucgacaacccagugcugcccuucaacgacggcguguacuucgccagcaccgagaagucaaacaucauccggggcuggaucuucggcaccacccuggacagcaagacacagagccugcugaucgugaacaacgccaccaacguggugaucaaggugugcgaguuucaguucugcaacgaccccuuccugggcguguacuaccacaagaacaacaagagcuggauggagagcgaguuccgggucuacagcagcgcuaacaauugcaccuucgaguacgugagccagcccuuccugauggaccucgagggcaagcagggcaacuucaagaaccugcgggaguucguguucaagaacaucgauggcuacuucaagaucuacagcaagcacacccccaucaaccuggugcgggaccugccccagggauucagcgcccuggagccucugguggaccugcccaucggcaucaacaucaccagguuccagacccugcuggcccugcaccggagcuaccugacccccggcgacagcagcagcggcuggaccgccggcgccgccgcauacuacgugggcuaccugcagccacggaccuuccugcugaaguacaacgagaacggcaccaucaccgacgccguggacugcgcccuggacccccugagcgagaccaagugcacccuaaagagcuucaccguggagaagggcaucuaccagaccagcaacuuccgggugcagcccacugagagcaucgugcgguuccccaacauuaccaaccugugucccuucggcgagguguucaacgccacccgguucgccagcguguacgccuggaaccggaagcggaucagcaacugcguggccgacuacagcgugcuguacaacagcgccagcuucagcaccuucaagugcuacggcgugagcccuaccaagcugaacgaccugugcuucaccaacguguacgcugacagcuucgugauccggggcgacgaggugcggcagaucgcccccggccagaccggcaacaucgccgacuacaacuacaagcugcccgacgacuucaccggcugcgugaucgccuggaacagcaacaaccuggacagcaaggugggcggcaacuacaacuaccuguaccggcuguuccguaagagcaaccugaagccauucgagcgggacaucagcaccgagaucuaccaggccggcagcacccccugcaacggugugaagggcuuuaacugcuacuucccccugcagagcuacggcuuccagcccaccuacggcgugggcuaccagcccuaccgggugguggugcugagcuucgagcugcugcacgcccccgccaccgugugcggcccuaaaaagagcaccaaccuggugaagaacaagugcgugaacuucaauuucaacggccugaccggcaccggcgugcugaccgagagcaacaagaaguuccugcccuuccagcaguucggccgggauaucgccgacaccaccgacgcagugcgggacccccagacccuggagauccuggacaucaccccaugcagcuucggcggcgugagcgucaucacccccggcacaaacaccagcaaccagguggccgugcuguaccagggagugaacugcaccgaggugcccguggccauccacgccgaccagcugacccccaccuggcggguguacagcaccggcagcaacguguuccagacccgggccggcugccugaucggcgccgagcacgugaacaacuccuacgagugcgacauccccaucggcgcuggcaucugcgccagcuaccagacccagaccaacagcccccggcgggcccggagcguggccagccagagcaucaucgccuacaccaugagcuuaggcgccgagaacagcguggccuacagcaacaacagcaucgcgaucccuaccaacuucaccaucagcgugaccaccgagauacugcccgugagcaugaccaagaccagcguggacuguaccauguacaucugcggcgacagcaccgagugcagcaaccugcugcugcaguacggcagcuucugcacccagcugaaccgggcccugaccggcaucgccguggagcaggacaagaacacccaagagguguucgcccaggugaagcagaucuacaagacucccccaaucaaggacuucggcggcuucaacuucagccagauccugcccgaccccagcaagcccagcaagcggagcuucaucgaggaccugcuguucaacaaggugacccuggccgacgccggcuucaucaagcaguacggcgacugccugggggauaucgccgcucgggaccugaucugcgcccagaaguucaacggccugaccgugcugcccccucugcugaccgacgagaugaucgcccaguacaccagcgcccugcuugccggcaccaucaccagcggcuggaccuucggcgccggcgcagcccugcagauccccuucgccaugcagauggccuaccgguucaacggcaucggcgugacccagaacgugcuguacgagaaccagaagcugaucgccaaccaguucaacagcgccaucggcaagauccaggacagccugagcagcaccgccagcgcccugggcaagcugcaggacguggugaaccagaacgcucaggcccugaacacccuggugaagcagcugagcagcaacuucggcgccaucagcucagugcugaaugacauccugagcaggcuggacaagguggaggccgaggugcagaucgaccggcugaucaccggccggcugcagagccugcagaccuacgugacccagcagcugauccgggccgccgagauccgggccagcgccaaccuggcagccaccaagaugagcgagugcgugcugggccagagcaagcggguggacuuuugcggcaagggcuaccaccugaugagcuucccccagagcgccccacacggcgugguguuccuccacgucacauacgugcccgcccaggagaagaacuucaccaccgcccccgccauuugccacgacggcaaggcucacuucccccgggagggaguguucgugagcaacggcacccacugguucgugacccagcggaacuucuacgagccccagaucaucaccaccgacaacaccuucgugagcggcaacugcgacguggugaucggcaucgugaacaacaccguguacgacccccugcagccugagcuggacagcuucaaggaggagcuggacaaguacuucaagaaccacaccagccccgacguggaucugggcgacaucagcggcaucaacgccagcguggugaacauccagaaggagaucgaccggcugaacgagguggccaagaaccugaacgagagccugaucgaccugcaggagcugggcaaguacgagcaguacaucaaguggcccugguacaucuggcugggcuucaucgccggccugaucgccaucgugauggugaccaucaugcugugcugcaugaccagcugcuguagcugccugaagggcugcugcagcugcggcagcugcugcaaguucgacgaggacgacagcgagccagugcugaagggcgugaagcugcacuacaccugaugacucgagcugguacugcaugcacgcaaugcuagcugccccuuucccguccuggguaccccgagucucccccgaccucgggucccagguaugcucccaccuccaccugccccacucaccaccucugcuaguuccagacaccucccaagcacgcagcaaugcagcucaaaacgcuuagccuagccacacccccacgggaaacagcagugauuaaccuuuagcaauaaacgaaaguuuaacuaagcuauacuaaccccaggguuggucaauuucgugccagccacacccuggagcuagcaaaaaaaaaaaaaaaaaaaaaaaaaaaaaaaaaaaaaaaaaaaaaaaaaaaaaaaaaaaaaaaaaaaaaaaaaaaaaaaaaaaaaaaaaaaaaaaaaaaa

SEQ ID NO: 26337 - RNA, 4264 nt, Artificial Sequence
  SARS-CoV-2/Wuhan/WIV05/2019__EPI_ISL_402128 spike protein mRNA gc (1-1273)(L18F_D80A_D215G_L242del_A243del_L244del_R246I_K417N_E484 K_N501Y_D614G_A701V)
agaauaaacuaguauucuucugguccccacagacucagagagaacccgccaccauguucguguuccuggugcugcugccccuggugagcagccagugcgugaacuucaccacccggacccagcugcccccugccuacaccaacagcuucacccggggcguguacuaccccgacaagguguuccggagcagcgugcugcacagcacccaggaccuguuccugcccuucuucagcaacgugaccugguuccacgccauccacgugagcggcaccaacggcaccaagcgguucgccaacccagugcugcccuucaacgacggcguguacuucgccagcaccgagaagucaaacaucauccggggcuggaucuuuggcaccacccuggacagcaagacacagagccugcugaucgugaacaacgcuaccaacguggugaucaaggugugcgaguuccaguucugcaacgaccccuuccugggcguguacuaccacaagaacaacaagagcuggauggagagcgaguuccgggucuacagcagcgccaacaauugcaccuucgaguacgugagccagcccuuccugauggaccuggagggcaagcagggcaacuucaagaaccuccgggaguucguguucaagaacaucgacggcuacuucaagaucuacagcaagcacacccccaucaaccuggugcggggacugccccagggcuucagcgcccuggagccucugguggaucugcccaucggcaucaacaucaccagguuccagacccugcacaucagcuaccugacccccggcgacagcagcagcggcuggaccgccggcgccgccgcauacuacgugggcuaccugcagccacggaccuuccugcugaaguacaacgagaacggcaccaucaccgacgccguggacugcgcccuggacccccugagcgagaccaagugcacccuuaagagcuucaccguggagaagggcaucuaccagaccagcaacuuccgggugcagcccacugagagcauugugcgguuccccaacaucaccaaccugugucccuucggcgagguguucaacgccacccgguucgccagcguguacgccuggaaccggaagcggaucagcaacugcguggccgacuacagcgugcuguacaacagcgccagcuucagcaccuucaagugcuacggcgugagcccuaccaagcugaacgaccugugcuucaccaacguguacgcugacagcuucgugauccggggcgacgaggugcggcagaucgcccccggccagaccggcaacaucgccgacuacaacuacaagcugcccgacgacuucaccggcugcgugaucgccuggaacagcaacaaccuggacagcaaggugggcggcaacuacaacuaccuguaccggcuauuccguaagagcaaccugaagccauuugagcgggacaucagcaccgagaucuaccaggccgguagcacccccugcaacggcgugaagggcuucaacugcuacuucccccugcagagcuacggcuuccagcccaccuacggcgugggcuaccagcccuaccgggugguggugcugagcuucgagcugcugcacgcccccgccaccgugugcggcccuaaaaagagcaccaaccuggugaagaacaagugcgugaacuucaauuucaacggccugaccggcaccggcgugcugaccgagagcaacaagaaguuccugcccuuccagcaguucggccgggacaucgccgacaccaccgaugcagugcgggacccccagacccuggagauccuggacaucaccccaugcagcuucggcggcgugagcgucaucacccccggaacaaacaccagcaaccagguggccgugcuguaccagggcgugaacugcaccgaggugcccguggccauccacgccgaccagcugacccccaccuggcggguguacagcaccggcagcaacguguuccagacccgggccggcugccugaucggcgccgagcacgugaacaacuccuacgagugcgacauccccaucggcgcuggcaucugcgccagcuaccagacccagaccaacagcccccggcgggcccggagcguggccagccagagcaucaucgccuacaccaugagccugggcguggagaacagcguggccuacagcaacaacagcaucgccaucccuaccaacuucaccauaagcgugaccaccgagauccugcccgugagcaugaccaagaccagcguggacuguaccauguacaucugcggcgacagcaccgagugcagcaaccuguuacugcaguacggcagcuucugcacccagcugaaccgggcgcugaccggcaucgccguggagcaggacaagaacacccaagagguguucgcccaggugaagcagaucuacaagacucccccaaucaaggacuucggcggcuucaacuucagccagauccugcccgaccccagcaagcccagcaagcggagcuucaucgaggaccugcuguucaacaaggugacccuggccgacgccggcuucaucaagcaguacggggacugccugggcgacaucgccgcccgggaccugaucugcgcucagaaguucaacggccugaccgugcugcccccucugcugaccgaugagaugaucgcccaguacaccagcgcccugcuggccggcaccaucaccagcggcuggaccuucggcgccggcgccgcacugcagauccccuucgccaugcagauggccuaccgguucaacggcaucggcgugacccagaacgugcuguacgagaaccagaagcugaucgccaaccaguucaacagcgccaucggcaagauccaggacagccugagcagcaccgccagcgcccugggcaagcugcaggacguggugaaccagaacgcccaggcucugaacacccuggugaagcagcugagcagcaacuuuggcgccaucagcucagugcugaaugacauccugagccggcuggacaagguggaggccgaggugcagaucgacaggcugaucaccggccggcugcagagccugcagaccuacgugacccagcagcugauccgggccgccgagauucgggccagcgccaaccuggccgcaaccaagaugagcgagugcgugcugggccagagcaagcggguggacuucugcggcaagggcuaccaccugaugagcuucccccagagcgccccacacggcguggucuuccugcacgugacauacgugcccgcccaggagaagaacuucaccaccgcccccgccaucugccacgacggaaaggcccacuucccccgggagggcguguucgugagcaacggcacccacugguucgugacccagcggaacuucuacgagccccagaucaucaccaccgacaacaccuucgugagcggcaacugcgacguggugaucggcaucgugaacaacaccguguacgacccccugcagccugagcuggacagcuucaaggaggagcucgacaaguacuucaagaaccacaccagccccgacguggaccugggcgacaucagcggcaucaacgcuagcguggugaacauccagaaggagaucgaucggcugaacgagguggccaagaaccugaacgagagccugaucgaccugcaggagcugggcaaguacgagcaguacaucaaguggcccugguacaucuggcugggcuucaucgccggccugaucgccaucgugauggugaccaucaugcugugcugcaugaccagcugcuguagcugccugaagggcugcugcagcugcggcagcugcugcaaguucgacgaggacgacagcgagccagugcugaagggcgugaagcugcacuacaccugaugacucgagcugguacugcaugcacgcaaugcuagcugccccuuucccguccuggguaccccgagucucccccgaccucgggucccagguaugcucccaccuccaccugccccacucaccaccucugcuaguuccagacaccucccaagcacgcagcaaugcagcucaaaacgcuuagccuagccacacccccacgggaaacagcagugauuaaccuuuagcaauaaacgaaaguuuaacuaagcuauacuaaccccaggguuggucaauuucgugccagccacacccuggagcuagcaaaaaaaaaaaaaaaaaaaaaaaaaaaaaaaaaaaaaaaaaaaaaaaaaaaaaaaaaaaaaaaaaaaaaaaaaaaaaaaaaaaaaaaaaaaaaaaaaaaa

SEQ ID NO: 26338 - RNA, 4273 nt, Artificial Sequence
  SARS-CoV-2/Wuhan/WIV05/2019__EPI_ISL_402128 spike protein mRNA gc (1-1273)(E484K_D614G)
agaauaaacuaguauucuucugguccccacagacucagagagaacccgccaccauguucguguuccuggugcugcugccccuggugagcagccagugcgugaaccugaccacccggacccagcugcccccugccuacaccaacagcuucacccggggcguguacuaccccgacaagguguuccggagcagcgugcugcacagcacccaggaccuguuccugcccuucuucagcaacgugaccugguuccacgccauccacgugagcggcaccaacggcaccaagcgguucgacaacccagugcugcccuucaacgacggcguguacuucgccagcaccgagaagucaaacaucauccggggcuggaucuucggcaccacccuggacagcaagacacagagccugcugaucgugaacaacgccaccaacguggugaucaaggugugcgaguuucaguucugcaacgaccccuuccugggcguguacuaccacaagaacaacaagagcuggauggagagcgaguuccgggucuacagcagcgcuaacaauugcaccuucgaguacgugagccagcccuuccugauggaccucgagggcaagcagggcaacuucaagaaccugcgggaguucguguucaagaacaucgauggcuacuucaagaucuacagcaagcacacccccaucaaccuggugcgggaccugccccagggauucagcgcccuggagccucugguggaccugcccaucggcaucaacaucaccagguuccagacccugcuggcccugcaccggagcuaccugacccccggcgacagcagcagcggcuggaccgccggcgccgccgcauacuacgugggcuaccugcagccacggaccuuccugcugaaguacaacgagaacggcaccaucaccgacgccguggacugcgcccuggacccccugagcgagaccaagugcacccuaaagagcuucaccguggagaagggcaucuaccagaccagcaacuuccgggugcagcccacugagagcaucgugcgguuccccaacauuaccaaccugugucccuucggcgagguguucaacgccacccgguucgccagcguguacgccuggaaccggaagcggaucagcaacugcguggccgacuacagcgugcuguacaacagcgccagcuucagcaccuucaagugcuacggcgugagcccuaccaagcugaacgaccugugcuucaccaacguguacgcugacagcuucgugauccggggcgacgaggugcggcagaucgcccccggccagaccggcaagaucgccgacuacaacuacaagcugcccgacgacuucaccggcugcgugaucgccuggaacagcaacaaccuggacagcaaggugggcggcaacuacaacuaccuguaccggcuguuccguaagagcaaccugaagccauucgagcgggacaucagcaccgagaucuaccaggccggcagcacccccugcaacggugugaagggcuuuaacugcuacuucccccugcagagcuacggcuuccagcccaccaacggcgugggcuaccagcccuaccgggugguggugcugagcuucgagcugcugcacgcccccgccaccgugugcggcccuaaaaagagcaccaaccuggugaagaacaagugcgugaacuucaauuucaacggccugaccggcaccggcgugcugaccgagagcaacaagaaguuccugcccuuccagcaguucggccgggauaucgccgacaccaccgacgcagugcgggacccccagacccuggagauccuggacaucaccccaugcagcuucggcggcgugagcgucaucacccccggcacaaacaccagcaaccagguggccgugcuguaccagggagugaacugcaccgaggugcccguggccauccacgccgaccagcugacccccaccuggcggguguacagcaccggcagcaacguguuccagacccgggccggcugccugaucggcgccgagcacgugaacaacuccuacgagugcgacauccccaucggcgcuggcaucugcgccagcuaccagacccagaccaacagcccccggcgggcccggagcguggccagccagagcaucaucgccuacaccaugagcuuaggcgccgagaacagcguggccuacagcaacaacagcaucgcgaucccuaccaacuucaccaucagcgugaccaccgagauacugcccgugagcaugaccaagaccagcguggacuguaccauguacaucugcggcgacagcaccgagugcagcaaccugcugcugcaguacggcagcuucugcacccagcugaaccgggcccugaccggcaucgccguggagcaggacaagaacacccaagagguguucgcccaggugaagcagaucuacaagacucccccaaucaaggacuucggcggcuucaacuucagccagauccugcccgaccccagcaagcccagcaagcggagcuucaucgaggaccugcuguucaacaaggugacccuggccgacgccggcuucaucaagcaguacggcgacugccugggggauaucgccgcucgggaccugaucugcgcccagaaguucaacggccugaccgugcugcccccucugcugaccgacgagaugaucgcccaguacaccagcgcccugcuugccggcaccaucaccagcggcuggaccuucggcgccggcgcagcccugcagauccccuucgccaugcagauggccuaccgguucaacggcaucggcgugacccagaacgugcuguacgagaaccagaagcugaucgccaaccaguucaacagcgccaucggcaagauccaggacagccugagcagcaccgccagcgcccugggcaagcugcaggacguggugaaccagaacgcucaggcccugaacacccuggugaagcagcugagcagcaacuucggcgccaucagcucagugcugaaugacauccugagcaggcuggacaagguggaggccgaggugcagaucgaccggcugaucaccggccggcugcagagccugcagaccuacgugacccagcagcugauccgggccgccgagauccgggccagcgccaaccuggcagccaccaagaugagcgagugcgugcugggccagagcaagcggguggacuuuugcggcaagggcuaccaccugaugagcuucccccagagcgccccacacggcgugguguuccuccacgucacauacgugcccgcccaggagaagaacuucaccaccgcccccgccauuugccacgacggcaaggcucacuucccccgggagggaguguucgugagcaacggcacccacugguucgugacccagcggaacuucuacgagccccagaucaucaccaccgacaacaccuucgugagcggcaacugcgacguggugaucggcaucgugaacaacaccguguacgacccccugcagccugagcuggacagcuucaaggaggagcuggacaaguacuucaagaaccacaccagccccgacguggaucugggcgacaucagcggcaucaacgccagcguggugaacauccagaaggagaucgaccggcugaacgagguggccaagaaccugaacgagagccugaucgaccugcaggagcugggcaaguacgagcaguacaucaaguggcccugguacaucuggcugggcuucaucgccggccugaucgccaucgugauggugaccaucaugcugugcugcaugaccagcugcuguagcugccugaagggcugcugcagcugcggcagcugcugcaaguucgacgaggacgacagcgagccagugcugaagggcgugaagcugcacuacaccugaugacucgagcugguacugcaugcacgcaaugcuagcugccccuuucccguccuggguaccccgagucucccccgaccucgggucccagguaugcucccaccuccaccugccccacucaccaccucugcuaguuccagacaccucccaagcacgcagcaaugcagcucaaaacgcuuagccuagccacacccccacgggaaacagcagugauuaaccuuuagcaauaaacgaaaguuuaacuaagcuauacuaaccccaggguuggucaauuucgugccagccacacccuggagcuagcaaaaaaaaaaaaaaaaaaaaaaaaaaaaaaaaaaaaaaaaaaaaaaaaaaaaaaaaaaaaaaaaaaaaaaaaaaaaaaaaaaaaaaaaaaaaaaaaaaaa

SEQ ID NO: 26339 - RNA, 4273 nt, Artificial Sequence
  SARS-CoV-2/Wuhan/WIV05/2019__EPI_ISL_402128 spike protein mRNA gc (1-1273)(L18F_T20N_P26S_D138Y_R190S_K417T_E484K_N501Y_D614G_H655Y _T1027I)
agaauaaacuaguauucuucugguccccacagacucagagagaacccgccaccauguucguguuccuggugcugcugccccuggugagcagccagugcgugaacuucaccaaccggacccagcugcccagcgccuacaccaacagcuucacccggggcguguacuacccugacaagguguuccggagcagcgugcugcacagcacccaggaccuguuccugcccuucuucagcaacgugaccugguuccacgccauccacgugagcggcaccaacggcaccaagcgguucgacaaccccgugcugccauucaacgacggcguguacuucgccagcaccgagaagucaaacaucauccggggcuggaucuuuggcaccacccuggacagcaagacccagagccugcugaucgugaacaacgccacaaacguggugaucaaggugugcgaguuccaguucugcaacuaccccuuccugggcguguacuaccacaagaacaacaagagcuggauggagagcgaguuccgggucuacagcagcgcuaauaacugcaccuucgaguacgugagccagcccuuccugauggaccuggagggcaagcagggcaacuucaagaaccucagcgaguucguguucaagaacaucgacggcuacuucaagaucuacagcaagcacacccccaucaaccuggugcgggaucugccccagggauucagcgcccuggagccccugguggaccugccuaucggcaucaacaucacccgguuccagacccugcuggcccugcacaggagcuaccugacccccggcgacagcagcagcggcuggaccgccggcgccgccgcauacuacgugggcuaccugcagccccggaccuuccugcugaaguacaacgagaacggcaccaucaccgacgccguggacugcgcccuggacccacugagcgagaccaagugcacccuaaagagcuucaccguggagaagggcaucuaccagaccagcaacuuccgggugcagcccaccgagagcaucgugcgguuccccaacauuacuaaccugugucccuucggcgagguguucaacgccacccgguucgccagcguguacgccuggaaccggaagcggaucagcaacugcguggccgacuacagcgugcuguacaacagcgccagcuucagcaccuucaagugcuacggcgugagccccaccaagcugaacgaccugugcuucaccaacguguacgcugacagcuucgugauccggggcgacgaggugcggcagaucgccccuggccagaccggcaccaucgccgacuacaacuacaagcugcccgacgacuucaccggcugcgugaucgccuggaacagcaacaaccuggacagcaaggugggcggcaacuacaacuaccuguaccggcuguuccguaagagcaaccugaagcccuuugagcgggacaucagcaccgagaucuaccaggccggcagcaccccaugcaacggugugaagggcuucaacugcuacuucccccugcagagcuacggcuuccagcccaccuacggcgugggcuaccagcccuaccgggugguggugcugagcuucgagcugcugcacgcccccgccaccgugugcggccccaaaaagagcaccaaccuggugaagaacaagugcgugaacuucaauuucaacggccugaccggcaccggcgugcugaccgagagcaacaagaaguuccugccuuuccagcaguucggccgggacaucgccgauaccaccgacgcagugcgggacccccagacccuggagauccuggacaucacccccugcagcuucggcggcgugagcgucaucaccccaggcacaaacaccagcaaccagguggccgugcuguaccagggagugaacugcaccgaggugcccguggccauccacgccgaccagcugacccccaccuggcggguguacuccaccggcagcaacguguuccagacccgggccggcugccugaucggcgccgaguacgugaacaacagcuacgagugcgacauccccaucggcgcuggcaucugcgccagcuaccagacccagaccaacagcccccggcgggcccggagcguggccagccagagcaucaucgccuacaccaugagccugggcgccgagaacagcguggccuacagcaacaacagcaucgcgauccccaccaacuucaccaucagcgugaccaccgagauauuaccugugagcaugaccaagaccagcguggacuguaccauguacaucugcggcgacagcaccgagugcagcaaccugcugcugcaguacggcagcuucugcacccagcugaaccgggcccugaccggcaucgccguggagcaggacaagaacacccaagagguguucgcccaggugaagcagaucuacaagacuccacccaucaaggacuucggcggcuucaacuucagccagauccugcccgaccccagcaagcccagcaagcggagcuucaucgaggaccugcuguucaacaaggugacccuggccgacgccggcuucaucaagcaguacggcgacugccugggggacaucgccgcucgggaucugaucugcgcccagaaguucaacggccugaccgugcugccuccccugcugaccgacgagaugaucgcccaguacaccagcgcccugcuggccggcaccaucaccagcggcuggaccuucggcgccggcgcagcccuucagauccccuucgccaugcagauggccuaccgguucaacggcaucggcgugacccagaacgugcuguacgagaaccagaagcugaucgccaaccaguucaacagcgccaucggcaagauccaggacagccugagcagcaccgccagcgcccugggcaagcugcaggacguggugaaccagaacgcucaggcccugaacacccuggugaagcagcugagcucaaacuuuggcgccaucagcagcgugcugaaugacauccugagccggcuggacaagguggaggccgaggugcagaucgacaggcugaucaccggccggcugcagagccugcagaccuacgugacccagcagcugauccgggccgccgagauccgggccagcgccaaccuggcagccauuaagaugagcgagugcgugcugggccagagcaagcggguggacuucugcggcaagggcuaccaccugaugagcuucccccagagcgcuccccacggcgugguguuccugcacgucaccuacgugccagcccaggagaagaacuucacaaccgcccccgccaucugccacgacggcaaggcccacuucccccgggagggaguguucgugagcaacggcacccacugguucgugacccagcggaacuucuacgagccccagaucaucaccaccgacaacaccuucgugagcggcaacugcgacguggugaucggcaucgugaacaacaccguguacgacccccuccagcccgagcuggacagcuucaaggaggagcuggacaaguacuucaagaaccacaccagcccugacguggaccugggcgauaucagcggcaucaacgccagcguggugaacauccagaaggagaucgaccggcugaacgagguggccaagaaccugaacgagagccugaucgaccugcaggagcugggcaaguacgagcaguacaucaaguggcccugguacaucuggcugggcuucaucgccggccugaucgccaucgugauggugaccaucaugcugugcugcaugaccagcugcuguagcugccugaagggcugcugcagcugcggcagcugcugcaaguucgacgaggacgacagcgagcccgugcugaagggcgugaagcugcacuacaccugaugacucgagcugguacugcaugcacgcaaugcuagcugccccuuucccguccuggguaccccgagucucccccgaccucgggucccagguaugcucccaccuccaccugccccacucaccaccucugcuaguuccagacaccucccaagcacgcagcaaugcagcucaaaacgcuuagccuagccacacccccacgggaaacagcagugauuaaccuuuagcaauaaacgaaaguuuaacuaagcuauacuaaccccaggguuggucaauuucgugccagccacacccuggagcuagcaaaaaaaaaaaaaaaaaaaaaaaaaaaaaaaaaaaaaaaaaaaaaaaaaaaaaaaaaaaaaaaaaaaaaaaaaaaaaaaaaaaaaaaaaaaaaaaaaaaa

SEQ ID NO: 26340 - RNA, 4273 nt, Artificial Sequence
  SARS-CoV-2/Wuhan/WIV05/2019__EPI_ISL_402128 spike protein mRNA gc (1-1273)(S13I_W152C_L452R_D614G)
agaauaaacuaguauucuucugguccccacagacucagagagaacccgccaccauguucguguuccuggugcugcugccccuggugagcauccagugcgugaaccugaccacccggacccagcugcccccugccuacaccaacagcuucacccggggcguguacuaccccgacaagguguuccggagcagcgugcugcacagcacccaggaccuguuccugcccuucuucagcaacgugaccugguuccacgccauccacgugagcggcaccaacggcaccaagcgguucgacaacccagugcugcccuucaacgacggcguguacuucgccagcaccgagaagucaaacaucauccggggcuggaucuucggcaccacccuggacagcaagacacagagccugcugaucgugaacaacgccaccaacguggugaucaaggugugcgaguuucaguucugcaacgaccccuuccugggcguguacuaccacaagaacaacaagagcugcauggagagcgaguuccgggucuacagcagcgcuaacaauugcaccuucgaguacgugagccagcccuuccugauggaccucgagggcaagcagggcaacuucaagaaccugcgggaguucguguucaagaacaucgauggcuacuucaagaucuacagcaagcacacccccaucaaccuggugcgggaccugccccagggauucagcgcccuggagccucugguggaccugcccaucggcaucaacaucaccagguuccagacccugcuggcccugcaccggagcuaccugacccccggcgacagcagcagcggcuggaccgccggcgccgccgcauacuacgugggcuaccugcagccacggaccuuccugcugaaguacaacgagaacggcaccaucaccgacgccguggacugcgcccuggacccccugagcgagaccaaguguacccuaaagagcuucaccguggagaagggcaucuaccagaccagcaacuuccgggugcagcccacugagagcauugugcgguuccccaacaucaccaaccugugccccuucggcgagguguucaacgccacccgguucgccagcguguacgccuggaaccggaagcggaucagcaacugcguggccgacuacagcgugcuguacaacagcgccagcuucagcaccuucaagugcuacggcgugagcccuaccaagcugaacgaccugugcuucaccaacguguacgcugacagcuucgugauccggggcgacgaggugcggcagaucgcccccggccagaccggcaagaucgccgacuacaacuacaagcugcccgacgacuucaccggcugcgugaucgccuggaacagcaacaaccuggacagcaaggugggcggcaacuacaacuaccgguaccggcuguuccguaagagcaaccugaagccauucgagcgggacaucagcaccgagaucuaccaggccggcagcacccccugcaacgguguggagggcuuuaacugcuacuucccccugcagagcuacggcuuccagcccaccaacggcgugggcuaccagcccuaccgggugguggugcugagcuucgagcugcugcacgcccccgccaccgugugcggcccuaaaaagagcaccaaccuggugaagaacaagugcgugaacuucaauuucaacggccugaccggcaccggcgugcugaccgagagcaacaagaaguuccugcccuuccagcaguucggccgggauaucgccgacaccaccgacgcagugcgggacccccagacccuggagauccuggacaucaccccaugcagcuucggcggcgugagcgucaucacccccggcacaaacaccagcaaccagguggccgugcuguaccagggagugaacugcaccgaggugcccguggccauccacgccgaccagcugacccccaccuggcggguguacagcaccggcagcaacguguuccagacccgggccggcugccugaucggcgccgagcacgugaacaacagcuacgagugcgacauccccaucggcgcuggcaucugugccuccuaccagacccagaccaacagcccccggcgggcccggagcguggccagccagagcaucaucgccuacaccaugagccugggcgccgagaacagcguggccuacagcaacaacagcaucgcgaucccuaccaacuucaccauaagcgugaccaccgagaucuuacccgugagcaugaccaagaccagcguggacugcaccauguacaucugcggcgacagcaccgagugcagcaaccugcugcugcaguacggcagcuucugcacccagcugaaccgggcccugaccggcaucgccguggagcaggacaagaacacccaagagguguucgcccaggugaagcagaucuacaagacucccccaaucaaggacuucggcggcuucaacuucagccagauccugcccgaccccagcaagcccagcaagcggagcuucaucgaggaccugcuguucaacaaggugacccuggccgacgccggcuucaucaagcaguacggcgacugccugggggauaucgccgcucgggaccugaucugcgcccagaaguucaacggccugaccgugcugcccccucugcugaccgacgagaugaucgcccaguacaccagcgcccugcuggccggcaccaucaccagcggcuggaccuucggcgccggcgcagcccuucagauccccuucgccaugcagauggccuacagguucaacggcaucggcgugacccagaacgugcuguacgagaaccagaagcugaucgccaaccaguucaacagcgccaucggcaagauccaggacagccugagcagcaccgccagcgcccugggcaagcugcaggacguggugaaccagaacgcucaggcccugaacacccuggugaagcagcugagcagcaacuucggcgccaucagcagcgugcugaaugacauccugucacggcuggacaagguggaggccgaggugcagaucgaccggcugaucaccggccggcugcagagccugcagaccuacgugacccagcagcugauccgggccgccgagauucgggccagcgccaaccuggcagccaccaagaugagcgagugcgugcugggccagagcaagcggguggacuuuugcggcaagggcuaccaccugaugagcuucccccagagcgccccacacggcgugguguuccugcacgucacauacgugcccgcccaggagaagaacuucaccaccgcccccgccaucugccacgacggcaaggcucacuucccccgggagggaguguucgugagcaacggcacccacugguucgugacccagcggaacuucuacgagccccagaucaucaccaccgacaacaccuucgugagcggcaacugcgacguggugaucggcaucgugaacaacaccguguacgacccccuccagccugagcuggacagcuucaaggaggagcuggacaaguacuucaagaaccacaccagccccgacguggaucugggcgacaucagcggcaucaacgccagcguggugaacauccagaaggagaucgaccggcugaacgagguggccaagaaccugaacgagagccugaucgaccugcaggagcugggcaaguacgagcaguacaucaaguggcccugguacaucuggcugggcuucaucgccggccugaucgccaucgugauggugaccaucaugcugugcugcaugaccagcuguugcagcugccugaagggcugcugcagcugcggcagcugcugcaaguucgacgaggacgacagcgagccagugcugaagggcgugaagcugcacuacaccugaugacucgagcugguacugcaugcacgcaaugcuagcugccccuuucccguccuggguaccccgagucucccccgaccucgggucccagguaugcucccaccuccaccugccccacucaccaccucugcuaguuccagacaccucccaagcacgcagcaaugcagcucaaaacgcuuagccuagccacacccccacgggaaacagcagugauuaaccuuuagcaauaaacgaaaguuuaacuaagcuauacuaaccccaggguuggucaauuucgugccagccacacccuggagcuagcaaaaaaaaaaaaaaaaaaaaaaaaaaaaaaaaaaaaaaaaaaaaaaaaaaaaaaaaaaaaaaaaaaaaaaaaaaaaaaaaaaaaaaaaaaaaaaaaaaaa

SEQ ID NO: 26341 - RNA, 4273 nt, Artificial Sequence
  SARS-CoV-2/Wuhan/WIV05/2019__EPI_ISL_402128 spike protein mRNA gc mod (1-1273)
agaauaaacuaguauucuucugguccccacagacucagagagaacccgccaccauguucguguuucuggugcugcugccccugguguccagccagugugugaaccugaccaccagaacacagcugccuccagccuacaccaacagcuucaccagaggcguguacuaccccgacaagguguucagauccagcgugcugcacucuacccaggaccuguuccugccuuucuucagcaacgugaccugguuccacgccauccacguguccggcaccaauggcaccaagagauucgacaaccccgugcugcccuucaacgacgggguguacuuugccagcaccgagaaguccaacaucaucagaggcuggaucuucggcaccacacuggacagcaagacccagagccugcugaucgugaacaacgccaccaacguggucaucaaagugugcgaguuccaguucugcaacgaccccuuccugggcgucuacuaccacaagaacaacaagagcuggauggaaagcgaguuccggguguacagcagcgccaacaacugcaccuucgaguacgugucccagccuuuccugauggaccuggaaggcaagcagggcaacuucaagaaccugcgcgaguucguguucaagaacaucgacggcuacuucaaaaucuacagcaagcacaccccuaucaaccucgugcgggaucugccucagggcuucucugcucuggaaccccugguggaucugcccaucggcaucaacaucacccgguuucagacacugcuggcccugcacagaagcuaccugacaccuggcgauagcagcagcggauggacagcuggugccgccgcuuacuaugugggcuaccugcagccuagaaccuuccugcugaaguacaacgagaacggcaccaucaccgacgccguggauugugcucuggauccucugagcgagacaaagugcacccugaaguccuucaccguggaaaagggcaucuaccagaccagcaacuuccgggugcagcccaccgaauccaucgugcgguuccccaauaucaccaaucugugccccuucggcgagguguucaaugccaccagauucgccucuguguacgccuggaaccggaagcggaucagcaauugcguggccgacuacuccgugcuguacaacuccgccagcuucagcaccuucaagugcuacggcguguccccuaccaagcugaacgaccugugcuucacaaacguguacgccgacagcuucgugauccggggagaugaagugcggcagauugccccuggacagacaggcaagaucgccgacuacaacuacaagcugcccgacgacuucaccggcugugugauugccuggaacagcaacaaccuggacuccaaagucggcggcaacuacaauuaccuguaccggcuguuccggaaguccaaucugaagcccuucgagcgggacaucagcaccgaaaucuaucaggccggcagcaccccuugcaacggcguggaaggcuucaacugcuacuucccacugcaguccuacggcuuucagcccacaaauggcgugggcuaucagcccuacagagugguggugcugagcuucgaacugcugcaugcuccugccacagugugcggcccuaagaaaagcaccaaucucgugaagaacaaaugcgugaacuucaacuucaacggccugaccggcaccggcgugcugacagagagcaacaagaaguuccugccauuccagcaguuuggccgggauaucgccgauaccacagacgccguuagagauccccagacacuggaaauccuggacaucaccccaugcagcuucggcggagugucugugaucaccccuggcaccaacaccagcaaucagguggcagugcuguaccaggacgugaacuguaccgaagugcccguggccauucacgccgaucagcugacaccuacauggcggguguacuccaccggcagcaauguguuucagaccagagccggcugucugaucggagccgagcacgugaacaauagcuacgagugcgacauccccaucggcgcuggcaucugugccagcuaccagacacagacaaacagccccagacgggcuagaagcguggccagccagagcaucauugccuacacaaugucucugggcgccgagaacagcguggccuacuccaacaacucuaucgcuauccccaccaacuucaccaucagcgugaccaccgagauccugccuguguccaugaccaagaccagcguggacugcaccauguacaucugcggcgauuccaccgagugcuccaaccugcugcugcaguacggcagcuucugcacccagcugaauagagcccugacagggaucgccguggaacaggacaagaacacccaagagguguucgcccaagugaagcaaaucuacaagaccccuccuaucaaggacuucggcggcuucaauuucagccagauucugcccgauccuagcaagcccagcaagcggagcuucaucgaggaccugcuguucaacaaagugacacuggccgacgccggcuucaucaagcaguauggcgauugucugggcgacauugccgccagggaucugauuugcgcccagaaguuuaacggacugacagugcugccuccucugcugaccgaugagaugaucgcccaguacacaucugcccugcuggccggcacaaucacaagcggcuggacauuuggagcuggcgccgcucugcagauccccuuugcuaugcagauggccuaccgguucaacggcaucggagugacccagaaugugcuguacgagaaccagaagcugaucgccaaccaguucaacagcgccaucggcaagauccaggacagccugagcagcacagcaagcgcccugggaaagcugcaggacguggucaaccagaaugcccaggcacugaacacccuggucaagcagcuguccuccaacuucggcgccaucagcucugugcugaacgauauccugagcagacuggacaaggucgaggccgaggugcagaucgacagacugaucacaggcagacugcagagccuccagacauacgugacccagcagcugaucagagccgccgagauuagagccucugccaaucuggccgccaccaagaugucugagugugugcugggccagagcaagagaguggacuuuugcggcaagggcuaccaccugaugagcuucccucagucugccccucacggcgugguguuucugcacgugacauaugugcccgcucaagagaagaauuucaccaccgcuccagccaucugccacgacggcaaagcccacuuuccuagagaaggcguguucguguccaacggcacccauugguucgugacacagcggaacuucuacgagccccagaucaucaccaccgacaacaccuucgugucuggcaacugcgacguugugaucggcauugugaacaauaccguguacgacccucugcagcccgagcuggacagcuucaaagaggaacuggacaaguacuuuaagaaccacacaagccccgacguggaccugggcgauaucagcggaaucaaugccagcgucgugaacauccagaaagagaucgaccggcugaacgagguggccaagaaucugaacgagagccugaucgaccugcaagaacuggggaaguacgagcaguacaucaaguggcccugguacaucuggcugggcuuuaucgccggacugauugccaucgugauggucacaaucaugcuguguugcaugaccagcugcuguagcugccugaagggcuguuguagcuguggcagcugcugcaaguucgacgaggacgauucugagcccgugcugaagggcgugaaacugcacuacaccugaugacucgagcugguacugcaugcacgcaaugcuagcugccccuuucccguccuggguaccccgagucucccccgaccucgggucccagguaugcucccaccuccaccugccccacucaccaccucugcuaguuccagacaccucccaagcacgcagcaaugcagcucaaaacgcuuagccuagccacacccccacgggaaacagcagugauuaaccuuuagcaauaaacgaaaguuuaacuaagcuauacuaaccccaggguuggucaauuucgugccagccacacccuggagcuagcaaaaaaaaaaaaaaaaaaaaaaaaaaaaaaaaaaaaaaaaaaaaaaaaaaaaaaaaaaaaaaaaaaaaaaaaaaaaaaaaaaaaaaaaaaaaaaaaaaaa

SEQ ID NO: 26342 - RNA, 4273 nt, Artificial Sequence
  SARS-CoV-2/Wuhan/WIV05/2019__EPI_ISL_402128 spike protein mRNA gc mod (1-1273)(D614G)
agaauaaacuaguauucuucugguccccacagacucagagagaacccgccaccauguucguguuucuggugcugcugccccugguguccagccagugugugaaccugaccaccagaacacagcugccuccagccuacaccaacagcuucaccagaggcguguacuaccccgacaagguguucagauccagcgugcugcacucuacccaggaccuguuccugccuuucuucagcaacgugaccugguuccacgccauccacguguccggcaccaauggcaccaagagauucgacaaccccgugcugcccuucaacgacgggguguacuuugccagcaccgagaaguccaacaucaucagaggcuggaucuucggcaccacacuggacagcaagacccagagccugcugaucgugaacaacgccaccaacguggucaucaaagugugcgaguuccaguucugcaacgaccccuuccugggcgucuacuaccacaagaacaacaagagcuggauggaaagcgaguuccggguguacagcagcgccaacaacugcaccuucgaguacgugucccagccuuuccugauggaccuggaaggcaagcagggcaacuucaagaaccugcgcgaguucguguucaagaacaucgacggcuacuucaaaaucuacagcaagcacaccccuaucaaccucgugcgggaucugccucagggcuucucugcucuggaaccccugguggaucugcccaucggcaucaacaucacccgguuucagacacugcuggcccugcacagaagcuaccugacaccuggcgauagcagcagcggauggacagcuggugccgccgcuuacuaugugggcuaccugcagccuagaaccuuccugcugaaguacaacgagaacggcaccaucaccgacgccguggauugugcucuggauccucugagcgagacaaagugcacccugaaguccuucaccguggaaaagggcaucuaccagaccagcaacuuccgggugcagcccaccgaauccaucgugcgguuccccaauaucaccaaucugugccccuucggcgagguguucaaugccaccagauucgccucuguguacgccuggaaccggaagcggaucagcaauugcguggccgacuacuccgugcuguacaacuccgccagcuucagcaccuucaagugcuacggcguguccccuaccaagcugaacgaccugugcuucacaaacguguacgccgacagcuucgugauccggggagaugaagugcggcagauugccccuggacagacaggcaagaucgccgacuacaacuacaagcugcccgacgacuucaccggcugugugauugccuggaacagcaacaaccuggacuccaaagucggcggcaacuacaauuaccuguaccggcuguuccggaaguccaaucugaagcccuucgagcgggacaucagcaccgaaaucuaucaggccggcagcaccccuugcaacggcguggaaggcuucaacugcuacuucccacugcaguccuacggcuuucagcccacaaauggcgugggcuaucagcccuacagagugguggugcugagcuucgaacugcugcaugcuccugccacagugugcggcccuaagaaaagcaccaaucucgugaagaacaaaugcgugaacuucaacuucaacggccugaccggcaccggcgugcugacagagagcaacaagaaguuccugccauuccagcaguuuggccgggauaucgccgauaccacagacgccguuagagauccccagacacuggaaauccuggacaucaccccaugcagcuucggcggagugucugugaucaccccuggcaccaacaccagcaaucagguggcagugcuguaccagggcgugaacuguaccgaagugcccguggccauucacgccgaucagcugacaccuacauggcggguguacuccaccggcagcaauguguuucagaccagagccggcugucugaucggagccgagcacgugaacaauagcuacgagugcgacauccccaucggcgcuggcaucugugccagcuaccagacacagacaaacagccccagacgggcuagaagcguggccagccagagcaucauugccuacacaaugucucugggcgccgagaacagcguggccuacuccaacaacucuaucgcuauccccaccaacuucaccaucagcgugaccaccgagauccugccuguguccaugaccaagaccagcguggacugcaccauguacaucugcggcgauuccaccgagugcuccaaccugcugcugcaguacggcagcuucugcacccagcugaauagagcccugacagggaucgccguggaacaggacaagaacacccaagagguguucgcccaagugaagcaaaucuacaagaccccuccuaucaaggacuucggcggcuucaauuucagccagauucugcccgauccuagcaagcccagcaagcggagcuucaucgaggaccugcuguucaacaaagugacacuggccgacgccggcuucaucaagcaguauggcgauugucugggcgacauugccgccagggaucugauuugcgcccagaaguuuaacggacugacagugcugccuccucugcugaccgaugagaugaucgcccaguacacaucugcccugcuggccggcacaaucacaagcggcuggacauuuggagcuggcgccgcucugcagauccccuuugcuaugcagauggccuaccgguucaacggcaucggagugacccagaaugugcuguacgagaaccagaagcugaucgccaaccaguucaacagcgccaucggcaagauccaggacagccugagcagcacagcaagcgcccugggaaagcugcaggacguggucaaccagaaugcccaggcacugaacacccuggucaagcagcuguccuccaacuucggcgccaucagcucugugcugaacgauauccugagcagacuggacaaggucgaggccgaggugcagaucgacagacugaucacaggcagacugcagagccuccagacauacgugacccagcagcugaucagagccgccgagauuagagccucugccaaucuggccgccaccaagaugucugagugugugcugggccagagcaagagaguggacuuuugcggcaagggcuaccaccugaugagcuucccucagucugccccucacggcgugguguuucugcacgugacauaugugcccgcucaagagaagaauuucaccaccgcuccagccaucugccacgacggcaaagcccacuuuccuagagaaggcguguucguguccaacggcacccauugguucgugacacagcggaacuucuacgagccccagaucaucaccaccgacaacaccuucgugucuggcaacugcgacguugugaucggcauugugaacaauaccguguacgacccucugcagcccgagcuggacagcuucaaagaggaacuggacaaguacuuuaagaaccacacaagccccgacguggaccugggcgauaucagcggaaucaaugccagcgucgugaacauccagaaagagaucgaccggcugaacgagguggccaagaaucugaacgagagccugaucgaccugcaagaacuggggaaguacgagcaguacaucaaguggcccugguacaucuggcugggcuuuaucgccggacugauugccaucgugauggucacaaucaugcuguguugcaugaccagcugcuguagcugccugaagggcuguuguagcuguggcagcugcugcaaguucgacgaggacgauucugagcccgugcugaagggcgugaaacugcacuacaccugaugacucgagcugguacugcaugcacgcaaugcuagcugccccuuucccguccuggguaccccgagucucccccgaccucgggucccagguaugcucccaccuccaccugccccacucaccaccucugcuaguuccagacaccucccaagcacgcagcaaugcagcucaaaacgcuuagccuagccacacccccacgggaaacagcagugauuaaccuuuagcaauaaacgaaaguuuaacuaagcuauacuaaccccaggguuggucaauuucgugccagccacacccuggagcuagcaaaaaaaaaaaaaaaaaaaaaaaaaaaaaaaaaaaaaaaaaaaaaaaaaaaaaaaaaaaaaaaaaaaaaaaaaaaaaaaaaaaaaaaaaaaaaaaaaaaa

SEQ ID NO: 26343 - RNA, 4273 nt, Artificial Sequence
  SARS-CoV-2/Wuhan/WIV05/2019__EPI_ISL_402128 spike protein mRNA gc mod (1-1273)(A222V_D614G)
agaauaaacuaguauucuucugguccccacagacucagagagaacccgccaccauguucguguuucuggugcugcugccccugguguccagccagugugugaaccugaccaccagaacacagcugccuccagccuacaccaacagcuucaccagaggcguguacuaccccgacaagguguucagauccagcgugcugcacucuacccaggaccuguuccugccuuucuucagcaacgugaccugguuccacgccauccacguguccggcaccaauggcaccaagagauucgacaaccccgugcugcccuucaacgacgggguguacuuugccagcaccgagaaguccaacaucaucagaggcuggaucuucggcaccacacuggacagcaagacccagagccugcugaucgugaacaacgccaccaacguggucaucaaagugugcgaguuccaguucugcaacgaccccuuccugggcgucuacuaccacaagaacaacaagagcuggauggaaagcgaguuccggguguacagcagcgccaacaacugcaccuucgaguacgugucccagccuuuccugauggaccuggaaggcaagcagggcaacuucaagaaccugcgcgaguucguguucaagaacaucgacggcuacuucaaaaucuacagcaagcacaccccuaucaaccucgugcgggaucugccucagggcuucucugugcuggaaccccugguggaucugcccaucggcaucaacaucacccgguuucagacacugcuggcccugcacagaagcuaccugacaccuggcgauagcagcagcggauggacagcuggugccgccgcuuacuaugugggcuaccugcagccuagaaccuuccugcugaaguacaacgagaacggcaccaucaccgacgccguggauugugcucuggauccucugagcgagacaaagugcacccugaaguccuucaccguggaaaagggcaucuaccagaccagcaacuuccgggugcagcccaccgaauccaucgugcgguuccccaauaucaccaaucugugccccuucggcgagguguucaaugccaccagauucgccucuguguacgccuggaaccggaagcggaucagcaauugcguggccgacuacuccgugcuguacaacuccgccagcuucagcaccuucaagugcuacggcguguccccuaccaagcugaacgaccugugcuucacaaacguguacgccgacagcuucgugauccggggagaugaagugcggcagauugccccuggacagacaggcaagaucgccgacuacaacuacaagcugcccgacgacuucaccggcugugugauugccuggaacagcaacaaccuggacuccaaagucggcggcaacuacaauuaccuguaccggcuguuccggaaguccaaucugaagcccuucgagcgggacaucagcaccgaaaucuaucaggccggcagcaccccuugcaacggcguggaaggcuucaacugcuacuucccacugcaguccuacggcuuucagcccacaaauggcgugggcuaucagcccuacagagugguggugcugagcuucgaacugcugcaugcuccugccacagugugcggcccuaagaaaagcaccaaucucgugaagaacaaaugcgugaacuucaacuucaacggccugaccggcaccggcgugcugacagagagcaacaagaaguuccugccauuccagcaguuuggccgggauaucgccgauaccacagacgccguuagagauccccagacacuggaaauccuggacaucaccccaugcagcuucggcggagugucugugaucaccccuggcaccaacaccagcaaucagguggcagugcuguaccagggcgugaacuguaccgaagugcccguggccauucacgccgaucagcugacaccuacauggcggguguacuccaccggcagcaauguguuucagaccagagccggcugucugaucggagccgagcacgugaacaauagcuacgagugcgacauccccaucggcgcuggcaucugugccagcuaccagacacagacaaacagccccagacgggcuagaagcguggccagccagagcaucauugccuacacaaugucucugggcgccgagaacagcguggccuacuccaacaacucuaucgcuauccccaccaacuucaccaucagcgugaccaccgagauccugccuguguccaugaccaagaccagcguggacugcaccauguacaucugcggcgauuccaccgagugcuccaaccugcugcugcaguacggcagcuucugcacccagcugaauagagcccugacagggaucgccguggaacaggacaagaacacccaagagguguucgcccaagugaagcaaaucuacaagaccccuccuaucaaggacuucggcggcuucaauuucagccagauucugcccgauccuagcaagcccagcaagcggagcuucaucgaggaccugcuguucaacaaagugacacuggccgacgccggcuucaucaagcaguauggcgauugucugggcgacauugccgccagggaucugauuugcgcccagaaguuuaacggacugacagugcugccuccucugcugaccgaugagaugaucgcccaguacacaucugcccugcuggccggcacaaucacaagcggcuggacauuuggagcuggcgccgcucugcagauccccuuugcuaugcagauggccuaccgguucaacggcaucggagugacccagaaugugcuguacgagaaccagaagcugaucgccaaccaguucaacagcgccaucggcaagauccaggacagccugagcagcacagcaagcgcccugggaaagcugcaggacguggucaaccagaaugcccaggcacugaacacccuggucaagcagcuguccuccaacuucggcgccaucagcucugugcugaacgauauccugagcagacuggacaaggucgaggccgaggugcagaucgacagacugaucacaggcagacugcagagccuccagacauacgugacccagcagcugaucagagccgccgagauuagagccucugccaaucuggccgccaccaagaugucugagugugugcugggccagagcaagagaguggacuuuugcggcaagggcuaccaccugaugagcuucccucagucugccccucacggcgugguguuucugcacgugacauaugugcccgcucaagagaagaauuucaccaccgcuccagccaucugccacgacggcaaagcccacuuuccuagagaaggcguguucguguccaacggcacccauugguucgugacacagcggaacuucuacgagccccagaucaucaccaccgacaacaccuucgugucuggcaacugcgacguugugaucggcauugugaacaauaccguguacgacccucugcagcccgagcuggacagcuucaaagaggaacuggacaaguacuuuaagaaccacacaagccccgacguggaccugggcgauaucagcggaaucaaugccagcgucgugaacauccagaaagagaucgaccggcugaacgagguggccaagaaucugaacgagagccugaucgaccugcaagaacuggggaaguacgagcaguacaucaaguggcccugguacaucuggcugggcuuuaucgccggacugauugccaucgugauggucacaaucaugcuguguugcaugaccagcugcuguagcugccugaagggcuguuguagcuguggcagcugcugcaaguucgacgaggacgauucugagcccgugcugaagggcgugaaacugcacuacaccugaugacucgagcugguacugcaugcacgcaaugcuagcugccccuuucccguccuggguaccccgagucucccccgaccucgggucccagguaugcucccaccuccaccugccccacucaccaccucugcuaguuccagacaccucccaagcacgcagcaaugcagcucaaaacgcuuagccuagccacacccccacgggaaacagcagugauuaaccuuuagcaauaaacgaaaguuuaacuaagcuauacuaaccccaggguuggucaauuucgugccagccacacccuggagcuagcaaaaaaaaaaaaaaaaaaaaaaaaaaaaaaaaaaaaaaaaaaaaaaaaaaaaaaaaaaaaaaaaaaaaaaaaaaaaaaaaaaaaaaaaaaaaaaaaaaaa

SEQ ID NO: 26344 - RNA, 4273 nt, Artificial Sequence
  SARS-CoV-2/Wuhan/WIV05/2019__EPI_ISL_402128 spike protein mRNA gc mod (1-1273)(N439K_D614G)
agaauaaacuaguauucuucugguccccacagacucagagagaacccgccaccauguucguguuucuggugcugcugccccugguguccagccagugugugaaccugaccaccagaacacagcugccuccagccuacaccaacagcuucaccagaggcguguacuaccccgacaagguguucagauccagcgugcugcacucuacccaggaccuguuccugccuuucuucagcaacgugaccugguuccacgccauccacguguccggcaccaauggcaccaagagauucgacaaccccgugcugcccuucaacgacgggguguacuuugccagcaccgagaaguccaacaucaucagaggcuggaucuucggcaccacacuggacagcaagacccagagccugcugaucgugaacaacgccaccaacguggucaucaaagugugcgaguuccaguucugcaacgaccccuuccugggcgucuacuaccacaagaacaacaagagcuggauggaaagcgaguuccggguguacagcagcgccaacaacugcaccuucgaguacgugucccagccuuuccugauggaccuggaaggcaagcagggcaacuucaagaaccugcgcgaguucguguucaagaacaucgacggcuacuucaaaaucuacagcaagcacaccccuaucaaccucgugcgggaucugccucagggcuucucugcucuggaaccccugguggaucugcccaucggcaucaacaucacccgguuucagacacugcuggcccugcacagaagcuaccugacaccuggcgauagcagcagcggauggacagcuggugccgccgcuuacuaugugggcuaccugcagccuagaaccuuccugcugaaguacaacgagaacggcaccaucaccgacgccguggauugugcucuggauccucugagcgagacaaagugcacccugaaguccuucaccguggaaaagggcaucuaccagaccagcaacuuccgggugcagcccaccgaauccaucgugcgguuccccaauaucaccaaucugugccccuucggcgagguguucaaugccaccagauucgccucuguguacgccuggaaccggaagcggaucagcaauugcguggccgacuacuccgugcuguacaacuccgccagcuucagcaccuucaagugcuacggcguguccccuaccaagcugaacgaccugugcuucacaaacguguacgccgacagcuucgugauccggggagaugaagugcggcagauugccccuggacagacaggcaagaucgccgacuacaacuacaagcugcccgacgacuucaccggcugugugauugccuggaacagcaagaaccuggacuccaaagucggcggcaacuacaauuaccuguaccggcuguuccggaaguccaaucugaagcccuucgagcgggacaucagcaccgaaaucuaucaggccggcagcaccccuugcaacggcguggaaggcuucaacugcuacuucccacugcaguccuacggcuuucagcccacaaauggcgugggcuaucagcccuacagagugguggugcugagcuucgaacugcugcaugcuccugccacagugugcggcccuaagaaaagcaccaaucucgugaagaacaaaugcgugaacuucaacuucaacggccugaccggcaccggcgugcugacagagagcaacaagaaguuccugccauuccagcaguuuggccgggauaucgccgauaccacagacgccguuagagauccccagacacuggaaauccuggacaucaccccaugcagcuucggcggagugucugugaucaccccuggcaccaacaccagcaaucagguggcagugcuguaccagggcgugaacuguaccgaagugcccguggccauucacgccgaucagcugacaccuacauggcggguguacuccaccggcagcaauguguuucagaccagagccggcugucugaucggagccgagcacgugaacaauagcuacgagugcgacauccccaucggcgcuggcaucugugccagcuaccagacacagacaaacagccccagacgggcuagaagcguggccagccagagcaucauugccuacacaaugucucugggcgccgagaacagcguggccuacuccaacaacucuaucgcuauccccaccaacuucaccaucagcgugaccaccgagauccugccuguguccaugaccaagaccagcguggacugcaccauguacaucugcggcgauuccaccgagugcuccaaccugcugcugcaguacggcagcuucugcacccagcugaauagagcccugacagggaucgccguggaacaggacaagaacacccaagagguguucgcccaagugaagcaaaucuacaagaccccuccuaucaaggacuucggcggcuucaauuucagccagauucugcccgauccuagcaagcccagcaagcggagcuucaucgaggaccugcuguucaacaaagugacacuggccgacgccggcuucaucaagcaguauggcgauugucugggcgacauugccgccagggaucugauuugcgcccagaaguuuaacggacugacagugcugccuccucugcugaccgaugagaugaucgcccaguacacaucugcccugcuggccggcacaaucacaagcggcuggacauuuggagcuggcgccgcucugcagauccccuuugcuaugcagauggccuaccgguucaacggcaucggagugacccagaaugugcuguacgagaaccagaagcugaucgccaaccaguucaacagcgccaucggcaagauccaggacagccugagcagcacagcaagcgcccugggaaagcugcaggacguggucaaccagaaugcccaggcacugaacacccuggucaagcagcuguccuccaacuucggcgccaucagcucugugcugaacgauauccugagcagacuggacaaggucgaggccgaggugcagaucgacagacugaucacaggcagacugcagagccuccagacauacgugacccagcagcugaucagagccgccgagauuagagccucugccaaucuggccgccaccaagaugucugagugugugcugggccagagcaagagaguggacuuuugcggcaagggcuaccaccugaugagcuucccucagucugccccucacggcgugguguuucugcacgugacauaugugcccgcucaagagaagaauuucaccaccgcuccagccaucugccacgacggcaaagcccacuuuccuagagaaggcguguucguguccaacggcacccauugguucgugacacagcggaacuucuacgagccccagaucaucaccaccgacaacaccuucgugucuggcaacugcgacguugugaucggcauugugaacaauaccguguacgacccucugcagcccgagcuggacagcuucaaagaggaacuggacaaguacuuuaagaaccacacaagccccgacguggaccugggcgauaucagcggaaucaaugccagcgucgugaacauccagaaagagaucgaccggcugaacgagguggccaagaaucugaacgagagccugaucgaccugcaagaacuggggaaguacgagcaguacaucaaguggcccugguacaucuggcugggcuuuaucgccggacugauugccaucgugauggucacaaucaugcuguguugcaugaccagcugcuguagcugccugaagggcuguuguagcuguggcagcugcugcaaguucgacgaggacgauucugagcccgugcugaagggcgugaaacugcacuacaccugaugacucgagcugguacugcaugcacgcaaugcuagcugccccuuucccguccuggguaccccgagucucccccgaccucgggucccagguaugcucccaccuccaccugccccacucaccaccucugcuaguuccagacaccucccaagcacgcagcaaugcagcucaaaacgcuuagccuagccacacccccacgggaaacagcagugauuaaccuuuagcaauaaacgaaaguuuaacuaagcuauacuaaccccaggguuggucaauuucgugccagccacacccuggagcuagcaaaaaaaaaaaaaaaaaaaaaaaaaaaaaaaaaaaaaaaaaaaaaaaaaaaaaaaaaaaaaaaaaaaaaaaaaaaaaaaaaaaaaaaaaaaaaaaaaaaa

SEQ ID NO: 26345 - RNA, 4273 nt, Artificial Sequence
  SARS-CoV-2/Wuhan/WIV05/2019__EPI_ISL_402128 spike protein mRNA gc mod (1-1273)(S477N_D614G)
agaauaaacuaguauucuucugguccccacagacucagagagaacccgccaccauguucguguuucuggugcugcugccccugguguccagccagugugugaaccugaccaccagaacacagcugccuccagccuacaccaacagcuucaccagaggcguguacuaccccgacaagguguucagauccagcgugcugcacucuacccaggaccuguuccugccuuucuucagcaacgugaccugguuccacgccauccacguguccggcaccaauggcaccaagagauucgacaaccccgugcugcccuucaacgacgggguguacuuugccagcaccgagaaguccaacaucaucagaggcuggaucuucggcaccacacuggacagcaagacccagagccugcugaucgugaacaacgccaccaacguggucaucaaagugugcgaguuccaguucugcaacgaccccuuccugggcgucuacuaccacaagaacaacaagagcuggauggaaagcgaguuccggguguacagcagcgccaacaacugcaccuucgaguacgugucccagccuuuccugauggaccuggaaggcaagcagggcaacuucaagaaccugcgcgaguucguguucaagaacaucgacggcuacuucaaaaucuacagcaagcacaccccuaucaaccucgugcgggaucugccucagggcuucucugcucuggaaccccugguggaucugcccaucggcaucaacaucacccgguuucagacacugcuggcccugcacagaagcuaccugacaccuggcgauagcagcagcggauggacagcuggugccgccgcuuacuaugugggcuaccugcagccuagaaccuuccugcugaaguacaacgagaacggcaccaucaccgacgccguggauugugcucuggauccucugagcgagacaaagugcacccugaaguccuucaccguggaaaagggcaucuaccagaccagcaacuuccgggugcagcccaccgaauccaucgugcgguuccccaauaucaccaaucugugccccuucggcgagguguucaaugccaccagauucgccucuguguacgccuggaaccggaagcggaucagcaauugcguggccgacuacuccgugcuguacaacuccgccagcuucagcaccuucaagugcuacggcguguccccuaccaagcugaacgaccugugcuucacaaacguguacgccgacagcuucgugauccggggagaugaagugcggcagauugccccuggacagacaggcaagaucgccgacuacaacuacaagcugcccgacgacuucaccggcugugugauugccuggaacagcaacaaccuggacuccaaagucggcggcaacuacaauuaccuguaccggcuguuccggaaguccaaucugaagcccuucgagcgggacaucagcaccgaaaucuaucaggccggcaacaccccuugcaacggcguggaaggcuucaacugcuacuucccacugcaguccuacggcuuucagcccacaaauggcgugggcuaucagcccuacagagugguggugcugagcuucgaacugcugcaugcuccugccacagugugcggcccuaagaaaagcaccaaucucgugaagaacaaaugcgugaacuucaacuucaacggccugaccggcaccggcgugcugacagagagcaacaagaaguuccugccauuccagcaguuuggccgggauaucgccgauaccacagacgccguuagagauccccagacacuggaaauccuggacaucaccccaugcagcuucggcggagugucugugaucaccccuggcaccaacaccagcaaucagguggcagugcuguaccagggcgugaacuguaccgaagugcccguggccauucacgccgaucagcugacaccuacauggcggguguacuccaccggcagcaauguguuucagaccagagccggcugucugaucggagccgagcacgugaacaauagcuacgagugcgacauccccaucggcgcuggcaucugugccagcuaccagacacagacaaacagccccagacgggcuagaagcguggccagccagagcaucauugccuacacaaugucucugggcgccgagaacagcguggccuacuccaacaacucuaucgcuauccccaccaacuucaccaucagcgugaccaccgagauccugccuguguccaugaccaagaccagcguggacugcaccauguacaucugcggcgauuccaccgagugcuccaaccugcugcugcaguacggcagcuucugcacccagcugaauagagcccugacagggaucgccguggaacaggacaagaacacccaagagguguucgcccaagugaagcaaaucuacaagaccccuccuaucaaggacuucggcggcuucaauuucagccagauucugcccgauccuagcaagcccagcaagcggagcuucaucgaggaccugcuguucaacaaagugacacuggccgacgccggcuucaucaagcaguauggcgauugucugggcgacauugccgccagggaucugauuugcgcccagaaguuuaacggacugacagugcugccuccucugcugaccgaugagaugaucgcccaguacacaucugcccugcuggccggcacaaucacaagcggcuggacauuuggagcuggcgccgcucugcagauccccuuugcuaugcagauggccuaccgguucaacggcaucggagugacccagaaugugcuguacgagaaccagaagcugaucgccaaccaguucaacagcgccaucggcaagauccaggacagccugagcagcacagcaagcgcccugggaaagcugcaggacguggucaaccagaaugcccaggcacugaacacccuggucaagcagcuguccuccaacuucggcgccaucagcucugugcugaacgauauccugagcagacuggacaaggucgaggccgaggugcagaucgacagacugaucacaggcagacugcagagccuccagacauacgugacccagcagcugaucagagccgccgagauuagagccucugccaaucuggccgccaccaagaugucugagugugugcugggccagagcaagagaguggacuuuugcggcaagggcuaccaccugaugagcuucccucagucugccccucacggcgugguguuucugcacgugacauaugugcccgcucaagagaagaauuucaccaccgcuccagccaucugccacgacggcaaagcccacuuuccuagagaaggcguguucguguccaacggcacccauugguucgugacacagcggaacuucuacgagccccagaucaucaccaccgacaacaccuucgugucuggcaacugcgacguugugaucggcauugugaacaauaccguguacgacccucugcagcccgagcuggacagcuucaaagaggaacuggacaaguacuuuaagaaccacacaagccccgacguggaccugggcgauaucagcggaaucaaugccagcgucgugaacauccagaaagagaucgaccggcugaacgagguggccaagaaucugaacgagagccugaucgaccugcaagaacuggggaaguacgagcaguacaucaaguggcccugguacaucuggcugggcuuuaucgccggacugauugccaucgugauggucacaaucaugcuguguugcaugaccagcugcuguagcugccugaagggcuguuguagcuguggcagcugcugcaaguucgacgaggacgauucugagcccgugcugaagggcgugaaacugcacuacaccugaugacucgagcugguacugcaugcacgcaaugcuagcugccccuuucccguccuggguaccccgagucucccccgaccucgggucccagguaugcucccaccuccaccugccccacucaccaccucugcuaguuccagacaccucccaagcacgcagcaaugcagcucaaaacgcuuagccuagccacacccccacgggaaacagcagugauuaaccuuuagcaauaaacgaaaguuuaacuaagcuauacuaaccccaggguuggucaauuucgugccagccacacccuggagcuagcaaaaaaaaaaaaaaaaaaaaaaaaaaaaaaaaaaaaaaaaaaaaaaaaaaaaaaaaaaaaaaaaaaaaaaaaaaaaaaaaaaaaaaaaaaaaaaaaaaaa

SEQ ID NO: 26346 - RNA, 4273 nt, Artificial Sequence
  SARS-CoV-2/Wuhan/WIV05/2019__EPI_ISL_402128 spike protein mRNA gc mod (1-1273)(N501Y_D614G)
agaauaaacuaguauucuucugguccccacagacucagagagaacccgccaccauguucguguuucuggugcugcugccccugguguccagccagugugugaaccugaccaccagaacacagcugccuccagccuacaccaacagcuucaccagaggcguguacuaccccgacaagguguucagauccagcgugcugcacucuacccaggaccuguuccugccuuucuucagcaacgugaccugguuccacgccauccacguguccggcaccaauggcaccaagagauucgacaaccccgugcugcccuucaacgacgggguguacuuugccagcaccgagaaguccaacaucaucagaggcuggaucuucggcaccacacuggacagcaagacccagagccugcugaucgugaacaacgccaccaacguggucaucaaagugugcgaguuccaguucugcaacgaccccuuccugggcgucuacuaccacaagaacaacaagagcuggauggaaagcgaguuccggguguacagcagcgccaacaacugcaccuucgaguacgugucccagccuuuccugauggaccuggaaggcaagcagggcaacuucaagaaccugcgcgaguucguguucaagaacaucgacggcuacuucaaaaucuacagcaagcacaccccuaucaaccucgugcgggaucugccucagggcuucucugcucuggaaccccugguggaucugcccaucggcaucaacaucacccgguuucagacacugcuggcccugcacagaagcuaccugacaccuggcgauagcagcagcggauggacagcuggugccgccgcuuacuaugugggcuaccugcagccuagaaccuuccugcugaaguacaacgagaacggcaccaucaccgacgccguggauugugcucuggauccucugagcgagacaaagugcacccugaaguccuucaccguggaaaagggcaucuaccagaccagcaacuuccgggugcagcccaccgaauccaucgugcgguuccccaauaucaccaaucugugccccuucggcgagguguucaaugccaccagauucgccucuguguacgccuggaaccggaagcggaucagcaauugcguggccgacuacuccgugcuguacaacuccgccagcuucagcaccuucaagugcuacggcguguccccuaccaagcugaacgaccugugcuucacaaacguguacgccgacagcuucgugauccggggagaugaagugcggcagauugccccuggacagacaggcaagaucgccgacuacaacuacaagcugcccgacgacuucaccggcugugugauugccuggaacagcaacaaccuggacuccaaagucggcggcaacuacaauuaccuguaccggcuguuccggaaguccaaucugaagcccuucgagcgggacaucagcaccgaaaucuaucaggccggcagcaccccuugcaacggcguggaaggcuucaacugcuacuucccacugcaguccuacggcuuucagcccacauacggcgugggcuaucagcccuacagagugguggugcugagcuucgaacugcugcaugcuccugccacagugugcggcccuaagaaaagcaccaaucucgugaagaacaaaugcgugaacuucaacuucaacggccugaccggcaccggcgugcugacagagagcaacaagaaguuccugccauuccagcaguuuggccgggauaucgccgauaccacagacgccguuagagauccccagacacuggaaauccuggacaucaccccaugcagcuucggcggagugucugugaucaccccuggcaccaacaccagcaaucagguggcagugcuguaccagggcgugaacuguaccgaagugcccguggccauucacgccgaucagcugacaccuacauggcggguguacuccaccggcagcaauguguuucagaccagagccggcugucugaucggagccgagcacgugaacaauagcuacgagugcgacauccccaucggcgcuggcaucugugccagcuaccagacacagacaaacagccccagacgggcuagaagcguggccagccagagcaucauugccuacacaaugucucugggcgccgagaacagcguggccuacuccaacaacucuaucgcuauccccaccaacuucaccaucagcgugaccaccgagauccugccuguguccaugaccaagaccagcguggacugcaccauguacaucugcggcgauuccaccgagugcuccaaccugcugcugcaguacggcagcuucugcacccagcugaauagagcccugacagggaucgccguggaacaggacaagaacacccaagagguguucgcccaagugaagcaaaucuacaagaccccuccuaucaaggacuucggcggcuucaauuucagccagauucugcccgauccuagcaagcccagcaagcggagcuucaucgaggaccugcuguucaacaaagugacacuggccgacgccggcuucaucaagcaguauggcgauugucugggcgacauugccgccagggaucugauuugcgcccagaaguuuaacggacugacagugcugccuccucugcugaccgaugagaugaucgcccaguacacaucugcccugcuggccggcacaaucacaagcggcuggacauuuggagcuggcgccgcucugcagauccccuuugcuaugcagauggccuaccgguucaacggcaucggagugacccagaaugugcuguacgagaaccagaagcugaucgccaaccaguucaacagcgccaucggcaagauccaggacagccugagcagcacagcaagcgcccugggaaagcugcaggacguggucaaccagaaugcccaggcacugaacacccuggucaagcagcuguccuccaacuucggcgccaucagcucugugcugaacgauauccugagcagacuggacaaggucgaggccgaggugcagaucgacagacugaucacaggcagacugcagagccuccagacauacgugacccagcagcugaucagagccgccgagauuagagccucugccaaucuggccgccaccaagaugucugagugugugcugggccagagcaagagaguggacuuuugcggcaagggcuaccaccugaugagcuucccucagucugccccucacggcgugguguuucugcacgugacauaugugcccgcucaagagaagaauuucaccaccgcuccagccaucugccacgacggcaaagcccacuuuccuagagaaggcguguucguguccaacggcacccauugguucgugacacagcggaacuucuacgagccccagaucaucaccaccgacaacaccuucgugucuggcaacugcgacguugugaucggcauugugaacaauaccguguacgacccucugcagcccgagcuggacagcuucaaagaggaacuggacaaguacuuuaagaaccacacaagccccgacguggaccugggcgauaucagcggaaucaaugccagcgucgugaacauccagaaagagaucgaccggcugaacgagguggccaagaaucugaacgagagccugaucgaccugcaagaacuggggaaguacgagcaguacaucaaguggcccugguacaucuggcugggcuuuaucgccggacugauugccaucgugauggucacaaucaugcuguguugcaugaccagcugcuguagcugccugaagggcuguuguagcuguggcagcugcugcaaguucgacgaggacgauucugagcccgugcugaagggcgugaaacugcacuacaccugaugacucgagcugguacugcaugcacgcaaugcuagcugccccuuucccguccuggguaccccgagucucccccgaccucgggucccagguaugcucccaccuccaccugccccacucaccaccucugcuaguuccagacaccucccaagcacgcagcaaugcagcucaaaacgcuuagccuagccacacccccacgggaaacagcagugauuaaccuuuagcaauaaacgaaaguuuaacuaagcuauacuaaccccaggguuggucaauuucgugccagccacacccuggagcuagcaaaaaaaaaaaaaaaaaaaaaaaaaaaaaaaaaaaaaaaaaaaaaaaaaaaaaaaaaaaaaaaaaaaaaaaaaaaaaaaaaaaaaaaaaaaaaaaaaaaa

SEQ ID NO: 26347 - RNA, 4267 nt, Artificial Sequence
  SARS-CoV-2/Wuhan/WIV05/2019__EPI_ISL_402128 spike protein mRNA gc mod (1-1273)(H69del_V70del_D614G)
agaauaaacuaguauucuucugguccccacagacucagagagaacccgccaccauguucguguuucuggugcugcugccccugguguccagccagugugugaaccugaccaccagaacacagcugccuccagccuacaccaacagcuucaccagaggcguguacuaccccgacaagguguucagauccagcgugcugcacucuacccaggaccuguuccugccuuucuucagcaacgugaccugguuccacgccaucuccggcaccaauggcaccaagagauucgacaaccccgugcugcccuucaacgacgggguguacuuugccagcaccgagaaguccaacaucaucagaggcuggaucuucggcaccacacuggacagcaagacccagagccugcugaucgugaacaacgccaccaacguggucaucaaagugugcgaguuccaguucugcaacgaccccuuccugggcgucuacuaccacaagaacaacaagagcuggauggaaagcgaguuccggguguacagcagcgccaacaacugcaccuucgaguacgugucccagccuuuccugauggaccuggaaggcaagcagggcaacuucaagaaccugcgcgaguucguguucaagaacaucgacggcuacuucaaaaucuacagcaagcacaccccuaucaaccucgugcgggaucugccucagggcuucucugcucuggaaccccugguggaucugcccaucggcaucaacaucacccgguuucagacacugcuggcccugcacagaagcuaccugacaccuggcgauagcagcagcggauggacagcuggugccgccgcuuacuaugugggcuaccugcagccuagaaccuuccugcugaaguacaacgagaacggcaccaucaccgacgccguggauugugcucuggauccucugagcgagacaaagugcacccugaaguccuucaccguggaaaagggcaucuaccagaccagcaacuuccgggugcagcccaccgaauccaucgugcgguuccccaauaucaccaaucugugccccuucggcgagguguucaaugccaccagauucgccucuguguacgccuggaaccggaagcggaucagcaauugcguggccgacuacuccgugcuguacaacuccgccagcuucagcaccuucaagugcuacggcguguccccuaccaagcugaacgaccugugcuucacaaacguguacgccgacagcuucgugauccggggagaugaagugcggcagauugccccuggacagacaggcaagaucgccgacuacaacuacaagcugcccgacgacuucaccggcugugugauugccuggaacagcaacaaccuggacuccaaagucggcggcaacuacaauuaccuguaccggcuguuccggaaguccaaucugaagcccuucgagcgggacaucagcaccgaaaucuaucaggccggcagcaccccuugcaacggcguggaaggcuucaacugcuacuucccacugcaguccuacggcuuucagcccacaaauggcgugggcuaucagcccuacagagugguggugcugagcuucgaacugcugcaugcuccugccacagugugcggcccuaagaaaagcaccaaucucgugaagaacaaaugcgugaacuucaacuucaacggccugaccggcaccggcgugcugacagagagcaacaagaaguuccugccauuccagcaguuuggccgggauaucgccgauaccacagacgccguuagagauccccagacacuggaaauccuggacaucaccccaugcagcuucggcggagugucugugaucaccccuggcaccaacaccagcaaucagguggcagugcuguaccagggcgugaacuguaccgaagugcccguggccauucacgccgaucagcugacaccuacauggcggguguacuccaccggcagcaauguguuucagaccagagccggcugucugaucggagccgagcacgugaacaauagcuacgagugcgacauccccaucggcgcuggcaucugugccagcuaccagacacagacaaacagccccagacgggcuagaagcguggccagccagagcaucauugccuacacaaugucucugggcgccgagaacagcguggccuacuccaacaacucuaucgcuauccccaccaacuucaccaucagcgugaccaccgagauccugccuguguccaugaccaagaccagcguggacugcaccauguacaucugcggcgauuccaccgagugcuccaaccugcugcugcaguacggcagcuucugcacccagcugaauagagcccugacagggaucgccguggaacaggacaagaacacccaagagguguucgcccaagugaagcaaaucuacaagaccccuccuaucaaggacuucggcggcuucaauuucagccagauucugcccgauccuagcaagcccagcaagcggagcuucaucgaggaccugcuguucaacaaagugacacuggccgacgccggcuucaucaagcaguauggcgauugucugggcgacauugccgccagggaucugauuugcgcccagaaguuuaacggacugacagugcugccuccucugcugaccgaugagaugaucgcccaguacacaucugcccugcuggccggcacaaucacaagcggcuggacauuuggagcuggcgccgcucugcagauccccuuugcuaugcagauggccuaccgguucaacggcaucggagugacccagaaugugcuguacgagaaccagaagcugaucgccaaccaguucaacagcgccaucggcaagauccaggacagccugagcagcacagcaagcgcccugggaaagcugcaggacguggucaaccagaaugcccaggcacugaacacccuggucaagcagcuguccuccaacuucggcgccaucagcucugugcugaacgauauccugagcagacuggacaaggucgaggccgaggugcagaucgacagacugaucacaggcagacugcagagccuccagacauacgugacccagcagcugaucagagccgccgagauuagagccucugccaaucuggccgccaccaagaugucugagugugugcugggccagagcaagagaguggacuuuugcggcaagggcuaccaccugaugagcuucccucagucugccccucacggcgugguguuucugcacgugacauaugugcccgcucaagagaagaauuucaccaccgcuccagccaucugccacgacggcaaagcccacuuuccuagagaaggcguguucguguccaacggcacccauugguucgugacacagcggaacuucuacgagccccagaucaucaccaccgacaacaccuucgugucuggcaacugcgacguugugaucggcauugugaacaauaccguguacgacccucugcagcccgagcuggacagcuucaaagaggaacuggacaaguacuuuaagaaccacacaagccccgacguggaccugggcgauaucagcggaaucaaugccagcgucgugaacauccagaaagagaucgaccggcugaacgagguggccaagaaucugaacgagagccugaucgaccugcaagaacuggggaaguacgagcaguacaucaaguggcccugguacaucuggcugggcuuuaucgccggacugauugccaucgugauggucacaaucaugcuguguugcaugaccagcugcuguagcugccugaagggcuguuguagcuguggcagcugcugcaaguucgacgaggacgauucugagcccgugcugaagggcgugaaacugcacuacaccugaugacucgagcugguacugcaugcacgcaaugcuagcugccccuuucccguccuggguaccccgagucucccccgaccucgggucccagguaugcucccaccuccaccugccccacucaccaccucugcuaguuccagacaccucccaagcacgcagcaaugcagcucaaaacgcuuagccuagccacacccccacgggaaacagcagugauuaaccuuuagcaauaaacgaaaguuuaacuaagcuauacuaaccccaggguuggucaauuucgugccagccacacccuggagcuagcaaaaaaaaaaaaaaaaaaaaaaaaaaaaaaaaaaaaaaaaaaaaaaaaaaaaaaaaaaaaaaaaaaaaaaaaaaaaaaaaaaaaaaaaaaaaaaaaaaaa

SEQ ID NO: 26348 - RNA, 4273 nt, Artificial Sequence
  SARS-CoV-2/Wuhan/WIV05/2019__EPI_ISL_402128 spike protein mRNA gc mod (1-1273)(Y453F_D614G)
agaauaaacuaguauucuucugguccccacagacucagagagaacccgccaccauguucguguuucuggugcugcugccccugguguccagccagugugugaaccugaccaccagaacacagcugccuccagccuacaccaacagcuucaccagaggcguguacuaccccgacaagguguucagauccagcgugcugcacucuacccaggaccuguuccugccuuucuucagcaacgugaccugguuccacgccauccacguguccggcaccaauggcaccaagagauucgacaaccccgugcugcccuucaacgacgggguguacuuugccagcaccgagaaguccaacaucaucagaggcuggaucuucggcaccacacuggacagcaagacccagagccugcugaucgugaacaacgccaccaacguggucaucaaagugugcgaguuccaguucugcaacgaccccuuccugggcgucuacuaccacaagaacaacaagagcuggauggaaagcgaguuccggguguacagcagcgccaacaacugcaccuucgaguacgugucccagccuuuccugauggaccuggaaggcaagcagggcaacuucaagaaccugcgcgaguucguguucaagaacaucgacggcuacuucaaaaucuacagcaagcacaccccuaucaaccucgugcgggaucugccucagggcuucucugcucuggaaccccugguggaucugcccaucggcaucaacaucacccgguuucagacacugcuggcccugcacagaagcuaccugacaccuggcgauagcagcagcggauggacagcuggugccgccgcuuacuaugugggcuaccugcagccuagaaccuuccugcugaaguacaacgagaacggcaccaucaccgacgccguggauugugcucuggauccucugagcgagacaaagugcacccugaaguccuucaccguggaaaagggcaucuaccagaccagcaacuuccgggugcagcccaccgaauccaucgugcgguuccccaauaucaccaaucugugccccuucggcgagguguucaaugccaccagauucgccucuguguacgccuggaaccggaagcggaucagcaauugcguggccgacuacuccgugcuguacaacuccgccagcuucagcaccuucaagugcuacggcguguccccuaccaagcugaacgaccugugcuucacaaacguguacgccgacagcuucgugauccggggagaugaagugcggcagauugccccuggacagacaggcaagaucgccgacuacaacuacaagcugcccgacgacuucaccggcugugugauugccuggaacagcaacaaccuggacuccaaagucggcggcaacuacaauuaccuguuccggcuguuccggaaguccaaucugaagcccuucgagcgggacaucagcaccgaaaucuaucaggccggcagcaccccuugcaacggcguggaaggcuucaacugcuacuucccacugcaguccuacggcuuucagcccacaaauggcgugggcuaucagcccuacagagugguggugcugagcuucgaacugcugcaugcuccugccacagugugcggcccuaagaaaagcaccaaucucgugaagaacaaaugcgugaacuucaacuucaacggccugaccggcaccggcgugcugacagagagcaacaagaaguuccugccauuccagcaguuuggccgggauaucgccgauaccacagacgccguuagagauccccagacacuggaaauccuggacaucaccccaugcagcuucggcggagugucugugaucaccccuggcaccaacaccagcaaucagguggcagugcuguaccagggcgugaacuguaccgaagugcccguggccauucacgccgaucagcugacaccuacauggcggguguacuccaccggcagcaauguguuucagaccagagccggcugucugaucggagccgagcacgugaacaauagcuacgagugcgacauccccaucggcgcuggcaucugugccagcuaccagacacagacaaacagccccagacgggcuagaagcguggccagccagagcaucauugccuacacaaugucucugggcgccgagaacagcguggccuacuccaacaacucuaucgcuauccccaccaacuucaccaucagcgugaccaccgagauccugccuguguccaugaccaagaccagcguggacugcaccauguacaucugcggcgauuccaccgagugcuccaaccugcugcugcaguacggcagcuucugcacccagcugaauagagcccugacagggaucgccguggaacaggacaagaacacccaagagguguucgcccaagugaagcaaaucuacaagaccccuccuaucaaggacuucggcggcuucaauuucagccagauucugcccgauccuagcaagcccagcaagcggagcuucaucgaggaccugcuguucaacaaagugacacuggccgacgccggcuucaucaagcaguauggcgauugucugggcgacauugccgccagggaucugauuugcgcccagaaguuuaacggacugacagugcugccuccucugcugaccgaugagaugaucgcccaguacacaucugcccugcuggccggcacaaucacaagcggcuggacauuuggagcuggcgccgcucugcagauccccuuugcuaugcagauggccuaccgguucaacggcaucggagugacccagaaugugcuguacgagaaccagaagcugaucgccaaccaguucaacagcgccaucggcaagauccaggacagccugagcagcacagcaagcgcccugggaaagcugcaggacguggucaaccagaaugcccaggcacugaacacccuggucaagcagcuguccuccaacuucggcgccaucagcucugugcugaacgauauccugagcagacuggacaaggucgaggccgaggugcagaucgacagacugaucacaggcagacugcagagccuccagacauacgugacccagcagcugaucagagccgccgagauuagagccucugccaaucuggccgccaccaagaugucugagugugugcugggccagagcaagagaguggacuuuugcggcaagggcuaccaccugaugagcuucccucagucugccccucacggcgugguguuucugcacgugacauaugugcccgcucaagagaagaauuucaccaccgcuccagccaucugccacgacggcaaagcccacuuuccuagagaaggcguguucguguccaacggcacccauugguucgugacacagcggaacuucuacgagccccagaucaucaccaccgacaacaccuucgugucuggcaacugcgacguugugaucggcauugugaacaauaccguguacgacccucugcagcccgagcuggacagcuucaaagaggaacuggacaaguacuuuaagaaccacacaagccccgacguggaccugggcgauaucagcggaaucaaugccagcgucgugaacauccagaaagagaucgaccggcugaacgagguggccaagaaucugaacgagagccugaucgaccugcaagaacuggggaaguacgagcaguacaucaaguggcccugguacaucuggcugggcuuuaucgccggacugauugccaucgugauggucacaaucaugcuguguugcaugaccagcugcuguagcugccugaagggcuguuguagcuguggcagcugcugcaaguucgacgaggacgauucugagcccgugcugaagggcgugaaacugcacuacaccugaugacucgagcugguacugcaugcacgcaaugcuagcugccccuuucccguccuggguaccccgagucucccccgaccucgggucccagguaugcucccaccuccaccugccccacucaccaccucugcuaguuccagacaccucccaagcacgcagcaaugcagcucaaaacgcuuagccuagccacacccccacgggaaacagcagugauuaaccuuuagcaauaaacgaaaguuuaacuaagcuauacuaaccccaggguuggucaauuucgugccagccacacccuggagcuagcaaaaaaaaaaaaaaaaaaaaaaaaaaaaaaaaaaaaaaaaaaaaaaaaaaaaaaaaaaaaaaaaaaaaaaaaaaaaaaaaaaaaaaaaaaaaaaaaaaaa

SEQ ID NO: 26349 - RNA, 4273 nt, Artificial Sequence
  SARS-CoV-2/Wuhan/WIV05/2019__EPI_ISL_402128 spike protein mRNA gc mod (1-1273)(D614G_I692V)
agaauaaacuaguauucuucugguccccacagacucagagagaacccgccaccauguucguguuucuggugcugcugccccugguguccagccagugugugaaccugaccaccagaacacagcugccuccagccuacaccaacagcuucaccagaggcguguacuaccccgacaagguguucagauccagcgugcugcacucuacccaggaccuguuccugccuuucuucagcaacgugaccugguuccacgccauccacguguccggcaccaauggcaccaagagauucgacaaccccgugcugcccuucaacgacgggguguacuuugccagcaccgagaaguccaacaucaucagaggcuggaucuucggcaccacacuggacagcaagacccagagccugcugaucgugaacaacgccaccaacguggucaucaaagugugcgaguuccaguucugcaacgaccccuuccugggcgucuacuaccacaagaacaacaagagcuggauggaaagcgaguuccggguguacagcagcgccaacaacugcaccuucgaguacgugucccagccuuuccugauggaccuggaaggcaagcagggcaacuucaagaaccugcgcgaguucguguucaagaacaucgacggcuacuucaaaaucuacagcaagcacaccccuaucaaccucgugcgggaucugccucagggcuucucugcucuggaaccccugguggaucugcccaucggcaucaacaucacccgguuucagacacugcuggcccugcacagaagcuaccugacaccuggcgauagcagcagcggauggacagcuggugccgccgcuuacuaugugggcuaccugcagccuagaaccuuccugcugaaguacaacgagaacggcaccaucaccgacgccguggauugugcucuggauccucugagcgagacaaagugcacccugaaguccuucaccguggaaaagggcaucuaccagaccagcaacuuccgggugcagcccaccgaauccaucgugcgguuccccaauaucaccaaucugugccccuucggcgagguguucaaugccaccagauucgccucuguguacgccuggaaccggaagcggaucagcaauugcguggccgacuacuccgugcuguacaacuccgccagcuucagcaccuucaagugcuacggcguguccccuaccaagcugaacgaccugugcuucacaaacguguacgccgacagcuucgugauccggggagaugaagugcggcagauugccccuggacagacaggcaagaucgccgacuacaacuacaagcugcccgacgacuucaccggcugugugauugccuggaacagcaacaaccuggacuccaaagucggcggcaacuacaauuaccuguaccggcuguuccggaaguccaaucugaagcccuucgagcgggacaucagcaccgaaaucuaucaggccggcagcaccccuugcaacggcguggaaggcuucaacugcuacuucccacugcaguccuacggcuuucagcccacaaauggcgugggcuaucagcccuacagagugguggugcugagcuucgaacugcugcaugcuccugccacagugugcggcccuaagaaaagcaccaaucucgugaagaacaaaugcgugaacuucaacuucaacggccugaccggcaccggcgugcugacagagagcaacaagaaguuccugccauuccagcaguuuggccgggauaucgccgauaccacagacgccguuagagauccccagacacuggaaauccuggacaucaccccaugcagcuucggcggagugucugugaucaccccuggcaccaacaccagcaaucagguggcagugcuguaccagggcgugaacuguaccgaagugcccguggccauucacgccgaucagcugacaccuacauggcggguguacuccaccggcagcaauguguuucagaccagagccggcugucugaucggagccgagcacgugaacaauagcuacgagugcgacauccccaucggcgcuggcaucugugccagcuaccagacacagacaaacagccccagacgggcuagaagcguggccagccagagcgugauugccuacacaaugucucugggcgccgagaacagcguggccuacuccaacaacucuaucgcuauccccaccaacuucaccaucagcgugaccaccgagauccugccuguguccaugaccaagaccagcguggacugcaccauguacaucugcggcgauuccaccgagugcuccaaccugcugcugcaguacggcagcuucugcacccagcugaauagagcccugacagggaucgccguggaacaggacaagaacacccaagagguguucgcccaagugaagcaaaucuacaagaccccuccuaucaaggacuucggcggcuucaauuucagccagauucugcccgauccuagcaagcccagcaagcggagcuucaucgaggaccugcuguucaacaaagugacacuggccgacgccggcuucaucaagcaguauggcgauugucugggcgacauugccgccagggaucugauuugcgcccagaaguuuaacggacugacagugcugccuccucugcugaccgaugagaugaucgcccaguacacaucugcccugcuggccggcacaaucacaagcggcuggacauuuggagcuggcgccgcucugcagauccccuuugcuaugcagauggccuaccgguucaacggcaucggagugacccagaaugugcuguacgagaaccagaagcugaucgccaaccaguucaacagcgccaucggcaagauccaggacagccugagcagcacagcaagcgcccugggaaagcugcaggacguggucaaccagaaugcccaggcacugaacacccuggucaagcagcuguccuccaacuucggcgccaucagcucugugcugaacgauauccugagcagacuggacaaggucgaggccgaggugcagaucgacagacugaucacaggcagacugcagagccuccagacauacgugacccagcagcugaucagagccgccgagauuagagccucugccaaucuggccgccaccaagaugucugagugugugcugggccagagcaagagaguggacuuuugcggcaagggcuaccaccugaugagcuucccucagucugccccucacggcgugguguuucugcacgugacauaugugcccgcucaagagaagaauuucaccaccgcuccagccaucugccacgacggcaaagcccacuuuccuagagaaggcguguucguguccaacggcacccauugguucgugacacagcggaacuucuacgagccccagaucaucaccaccgacaacaccuucgugucuggcaacugcgacguugugaucggcauugugaacaauaccguguacgacccucugcagcccgagcuggacagcuucaaagaggaacuggacaaguacuuuaagaaccacacaagccccgacguggaccugggcgauaucagcggaaucaaugccagcgucgugaacauccagaaagagaucgaccggcugaacgagguggccaagaaucugaacgagagccugaucgaccugcaagaacuggggaaguacgagcaguacaucaaguggcccugguacaucuggcugggcuuuaucgccggacugauugccaucgugauggucacaaucaugcuguguugcaugaccagcugcuguagcugccugaagggcuguuguagcuguggcagcugcugcaaguucgacgaggacgauucugagcccgugcugaagggcgugaaacugcacuacaccugaugacucgagcugguacugcaugcacgcaaugcuagcugccccuuucccguccuggguaccccgagucucccccgaccucgggucccagguaugcucccaccuccaccugccccacucaccaccucugcuaguuccagacaccucccaagcacgcagcaaugcagcucaaaacgcuuagccuagccacacccccacgggaaacagcagugauuaaccuuuagcaauaaacgaaaguuuaacuaagcuauacuaaccccaggguuggucaauuucgugccagccacacccuggagcuagcaaaaaaaaaaaaaaaaaaaaaaaaaaaaaaaaaaaaaaaaaaaaaaaaaaaaaaaaaaaaaaaaaaaaaaaaaaaaaaaaaaaaaaaaaaaaaaaaaaaa

SEQ ID NO: 26350 - RNA, 4273 nt, Artificial Sequence
  SARS-CoV-2/Wuhan/WIV05/2019__EPI_ISL_402128 spike protein mRNA gc mod (1-1273)(D614G_M1229I)
agaauaaacuaguauucuucugguccccacagacucagagagaacccgccaccauguucguguuucuggugcugcugccccugguguccagccagugugugaaccugaccaccagaacacagcugccuccagccuacaccaacagcuucaccagaggcguguacuaccccgacaagguguucagauccagcgugcugcacucuacccaggaccuguuccugccuuucuucagcaacgugaccugguuccacgccauccacguguccggcaccaauggcaccaagagauucgacaaccccgugcugcccuucaacgacgggguguacuuugccagcaccgagaaguccaacaucaucagaggcuggaucuucggcaccacacuggacagcaagacccagagccugcugaucgugaacaacgccaccaacguggucaucaaagugugcgaguuccaguucugcaacgaccccuuccugggcgucuacuaccacaagaacaacaagagcuggauggaaagcgaguuccggguguacagcagcgccaacaacugcaccuucgaguacgugucccagccuuuccugauggaccuggaaggcaagcagggcaacuucaagaaccugcgcgaguucguguucaagaacaucgacggcuacuucaaaaucuacagcaagcacaccccuaucaaccucgugcgggaucugccucagggcuucucugcucuggaaccccugguggaucugcccaucggcaucaacaucacccgguuucagacacugcuggcccugcacagaagcuaccugacaccuggcgauagcagcagcggauggacagcuggugccgccgcuuacuaugugggcuaccugcagccuagaaccuuccugcugaaguacaacgagaacggcaccaucaccgacgccguggauugugcucuggauccucugagcgagacaaagugcacccugaaguccuucaccguggaaaagggcaucuaccagaccagcaacuuccgggugcagcccaccgaauccaucgugcgguuccccaauaucaccaaucugugccccuucggcgagguguucaaugccaccagauucgccucuguguacgccuggaaccggaagcggaucagcaauugcguggccgacuacuccgugcuguacaacuccgccagcuucagcaccuucaagugcuacggcguguccccuaccaagcugaacgaccugugcuucacaaacguguacgccgacagcuucgugauccggggagaugaagugcggcagauugccccuggacagacaggcaagaucgccgacuacaacuacaagcugcccgacgacuucaccggcugugugauugccuggaacagcaacaaccuggacuccaaagucggcggcaacuacaauuaccuguaccggcuguuccggaaguccaaucugaagcccuucgagcgggacaucagcaccgaaaucuaucaggccggcagcaccccuugcaacggcguggaaggcuucaacugcuacuucccacugcaguccuacggcuuucagcccacaaauggcgugggcuaucagcccuacagagugguggugcugagcuucgaacugcugcaugcuccugccacagugugcggcccuaagaaaagcaccaaucucgugaagaacaaaugcgugaacuucaacuucaacggccugaccggcaccggcgugcugacagagagcaacaagaaguuccugccauuccagcaguuuggccgggauaucgccgauaccacagacgccguuagagauccccagacacuggaaauccuggacaucaccccaugcagcuucggcggagugucugugaucaccccuggcaccaacaccagcaaucagguggcagugcuguaccagggcgugaacuguaccgaagugcccguggccauucacgccgaucagcugacaccuacauggcggguguacuccaccggcagcaauguguuucagaccagagccggcugucugaucggagccgagcacgugaacaauagcuacgagugcgacauccccaucggcgcuggcaucugugccagcuaccagacacagacaaacagccccagacgggcuagaagcguggccagccagagcaucauugccuacacaaugucucugggcgccgagaacagcguggccuacuccaacaacucuaucgcuauccccaccaacuucaccaucagcgugaccaccgagauccugccuguguccaugaccaagaccagcguggacugcaccauguacaucugcggcgauuccaccgagugcuccaaccugcugcugcaguacggcagcuucugcacccagcugaauagagcccugacagggaucgccguggaacaggacaagaacacccaagagguguucgcccaagugaagcaaaucuacaagaccccuccuaucaaggacuucggcggcuucaauuucagccagauucugcccgauccuagcaagcccagcaagcggagcuucaucgaggaccugcuguucaacaaagugacacuggccgacgccggcuucaucaagcaguauggcgauugucugggcgacauugccgccagggaucugauuugcgcccagaaguuuaacggacugacagugcugccuccucugcugaccgaugagaugaucgcccaguacacaucugcccugcuggccggcacaaucacaagcggcuggacauuuggagcuggcgccgcucugcagauccccuuugcuaugcagauggccuaccgguucaacggcaucggagugacccagaaugugcuguacgagaaccagaagcugaucgccaaccaguucaacagcgccaucggcaagauccaggacagccugagcagcacagcaagcgcccugggaaagcugcaggacguggucaaccagaaugcccaggcacugaacacccuggucaagcagcuguccuccaacuucggcgccaucagcucugugcugaacgauauccugagcagacuggacaaggucgaggccgaggugcagaucgacagacugaucacaggcagacugcagagccuccagacauacgugacccagcagcugaucagagccgccgagauuagagccucugccaaucuggccgccaccaagaugucugagugugugcugggccagagcaagagaguggacuuuugcggcaagggcuaccaccugaugagcuucccucagucugccccucacggcgugguguuucugcacgugacauaugugcccgcucaagagaagaauuucaccaccgcuccagccaucugccacgacggcaaagcccacuuuccuagagaaggcguguucguguccaacggcacccauugguucgugacacagcggaacuucuacgagccccagaucaucaccaccgacaacaccuucgugucuggcaacugcgacguugugaucggcauugugaacaauaccguguacgacccucugcagcccgagcuggacagcuucaaagaggaacuggacaaguacuuuaagaaccacacaagccccgacguggaccugggcgauaucagcggaaucaaugccagcgucgugaacauccagaaagagaucgaccggcugaacgagguggccaagaaucugaacgagagccugaucgaccugcaagaacuggggaaguacgagcaguacaucaaguggcccugguacaucuggcugggcuuuaucgccggacugauugccaucgugaucgucacaaucaugcuguguugcaugaccagcugcuguagcugccugaagggcuguuguagcuguggcagcugcugcaaguucgacgaggacgauucugagcccgugcugaagggcgugaaacugcacuacaccugaugacucgagcugguacugcaugcacgcaaugcuagcugccccuuucccguccuggguaccccgagucucccccgaccucgggucccagguaugcucccaccuccaccugccccacucaccaccucugcuaguuccagacaccucccaagcacgcagcaaugcagcucaaaacgcuuagccuagccacacccccacgggaaacagcagugauuaaccuuuagcaauaaacgaaaguuuaacuaagcuauacuaaccccaggguuggucaauuucgugccagccacacccuggagcuagcaaaaaaaaaaaaaaaaaaaaaaaaaaaaaaaaaaaaaaaaaaaaaaaaaaaaaaaaaaaaaaaaaaaaaaaaaaaaaaaaaaaaaaaaaaaaaaaaaaaa

SEQ ID NO: 26351 - RNA, 4267 nt, Artificial Sequence
  SARS-CoV-2/Wuhan/WIV05/2019__EPI_ISL_402128 spike protein mRNA gc mod (1-1273)(H69del_V70del_A222V_Y453F_S477N_D614G_I692V)
agaauaaacuaguauucuucugguccccacagacucagagagaacccgccaccauguucguguuucuggugcugcugccccugguguccagccagugugugaaccugaccaccagaacacagcugccuccagccuacaccaacagcuucaccagaggcguguacuaccccgacaagguguucagauccagcgugcugcacucuacccaggaccuguuccugccuuucuucagcaacgugaccugguuccacgccaucuccggcaccaauggcaccaagagauucgacaaccccgugcugcccuucaacgacgggguguacuuugccagcaccgagaaguccaacaucaucagaggcuggaucuucggcaccacacuggacagcaagacccagagccugcugaucgugaacaacgccaccaacguggucaucaaagugugcgaguuccaguucugcaacgaccccuuccugggcgucuacuaccacaagaacaacaagagcuggauggaaagcgaguuccggguguacagcagcgccaacaacugcaccuucgaguacgugucccagccuuuccugauggaccuggaaggcaagcagggcaacuucaagaaccugcgcgaguucguguucaagaacaucgacggcuacuucaaaaucuacagcaagcacaccccuaucaaccucgugcgggaucugccucagggcuucucugugcuggaaccccugguggaucugcccaucggcaucaacaucacccgguuucagacacugcuggcccugcacagaagcuaccugacaccuggcgauagcagcagcggauggacagcuggugccgccgcuuacuaugugggcuaccugcagccuagaaccuuccugcugaaguacaacgagaacggcaccaucaccgacgccguggauugugcucuggauccucugagcgagacaaagugcacccugaaguccuucaccguggaaaagggcaucuaccagaccagcaacuuccgggugcagcccaccgaauccaucgugcgguuccccaauaucaccaaucugugccccuucggcgagguguucaaugccaccagauucgccucuguguacgccuggaaccggaagcggaucagcaauugcguggccgacuacuccgugcuguacaacuccgccagcuucagcaccuucaagugcuacggcguguccccuaccaagcugaacgaccugugcuucacaaacguguacgccgacagcuucgugauccggggagaugaagugcggcagauugccccuggacagacaggcaagaucgccgacuacaacuacaagcugcccgacgacuucaccggcugugugauugccuggaacagcaacaaccuggacuccaaagucggcggcaacuacaauuaccuguuccggcuguuccggaaguccaaucugaagcccuucgagcgggacaucagcaccgaaaucuaucaggccggcaacaccccuugcaacggcguggaaggcuucaacugcuacuucccacugcaguccuacggcuuucagcccacaaauggcgugggcuaucagcccuacagagugguggugcugagcuucgaacugcugcaugcuccugccacagugugcggcccuaagaaaagcaccaaucucgugaagaacaaaugcgugaacuucaacuucaacggccugaccggcaccggcgugcugacagagagcaacaagaaguuccugccauuccagcaguuuggccgggauaucgccgauaccacagacgccguuagagauccccagacacuggaaauccuggacaucaccccaugcagcuucggcggagugucugugaucaccccuggcaccaacaccagcaaucagguggcagugcuguaccagggcgugaacuguaccgaagugcccguggccauucacgccgaucagcugacaccuacauggcggguguacuccaccggcagcaauguguuucagaccagagccggcugucugaucggagccgagcacgugaacaauagcuacgagugcgacauccccaucggcgcuggcaucugugccagcuaccagacacagacaaacagccccagacgggcuagaagcguggccagccagagcgugauugccuacacaaugucucugggcgccgagaacagcguggccuacuccaacaacucuaucgcuauccccaccaacuucaccaucagcgugaccaccgagauccugccuguguccaugaccaagaccagcguggacugcaccauguacaucugcggcgauuccaccgagugcuccaaccugcugcugcaguacggcagcuucugcacccagcugaauagagcccugacagggaucgccguggaacaggacaagaacacccaagagguguucgcccaagugaagcaaaucuacaagaccccuccuaucaaggacuucggcggcuucaauuucagccagauucugcccgauccuagcaagcccagcaagcggagcuucaucgaggaccugcuguucaacaaagugacacuggccgacgccggcuucaucaagcaguauggcgauugucugggcgacauugccgccagggaucugauuugcgcccagaaguuuaacggacugacagugcugccuccucugcugaccgaugagaugaucgcccaguacacaucugcccugcuggccggcacaaucacaagcggcuggacauuuggagcuggcgccgcucugcagauccccuuugcuaugcagauggccuaccgguucaacggcaucggagugacccagaaugugcuguacgagaaccagaagcugaucgccaaccaguucaacagcgccaucggcaagauccaggacagccugagcagcacagcaagcgcccugggaaagcugcaggacguggucaaccagaaugcccaggcacugaacacccuggucaagcagcuguccuccaacuucggcgccaucagcucugugcugaacgauauccugagcagacuggacaaggucgaggccgaggugcagaucgacagacugaucacaggcagacugcagagccuccagacauacgugacccagcagcugaucagagccgccgagauuagagccucugccaaucuggccgccaccaagaugucugagugugugcugggccagagcaagagaguggacuuuugcggcaagggcuaccaccugaugagcuucccucagucugccccucacggcgugguguuucugcacgugacauaugugcccgcucaagagaagaauuucaccaccgcuccagccaucugccacgacggcaaagcccacuuuccuagagaaggcguguucguguccaacggcacccauugguucgugacacagcggaacuucuacgagccccagaucaucaccaccgacaacaccuucgugucuggcaacugcgacguugugaucggcauugugaacaauaccguguacgacccucugcagcccgagcuggacagcuucaaagaggaacuggacaaguacuuuaagaaccacacaagccccgacguggaccugggcgauaucagcggaaucaaugccagcgucgugaacauccagaaagagaucgaccggcugaacgagguggccaagaaucugaacgagagccugaucgaccugcaagaacuggggaaguacgagcaguacaucaaguggcccugguacaucuggcugggcuuuaucgccggacugauugccaucgugauggucacaaucaugcuguguugcaugaccagcugcuguagcugccugaagggcuguuguagcuguggcagcugcugcaaguucgacgaggacgauucugagcccgugcugaagggcgugaaacugcacuacaccugaugacucgagcugguacugcaugcacgcaaugcuagcugccccuuucccguccuggguaccccgagucucccccgaccucgggucccagguaugcucccaccuccaccugccccacucaccaccucugcuaguuccagacaccucccaagcacgcagcaaugcagcucaaaacgcuuagccuagccacacccccacgggaaacagcagugauuaaccuuuagcaauaaacgaaaguuuaacuaagcuauacuaaccccaggguuggucaauuucgugccagccacacccuggagcuagcaaaaaaaaaaaaaaaaaaaaaaaaaaaaaaaaaaaaaaaaaaaaaaaaaaaaaaaaaaaaaaaaaaaaaaaaaaaaaaaaaaaaaaaaaaaaaaaaaaaa

SEQ ID NO: 26352 - RNA, 4267 nt, Artificial Sequence
  SARS-CoV-2/Wuhan/WIV05/2019__EPI_ISL_402128 spike protein mRNA gc mod (1-1273)(H69del_V70del_Y453F_D614G_I692V_M1229I)
agaauaaacuaguauucuucugguccccacagacucagagagaacccgccaccauguucguguuucuggugcugcugccccugguguccagccagugugugaaccugaccaccagaacacagcugccuccagccuacaccaacagcuucaccagaggcguguacuaccccgacaagguguucagauccagcgugcugcacucuacccaggaccuguuccugccuuucuucagcaacgugaccugguuccacgccaucuccggcaccaauggcaccaagagauucgacaaccccgugcugcccuucaacgacgggguguacuuugccagcaccgagaaguccaacaucaucagaggcuggaucuucggcaccacacuggacagcaagacccagagccugcugaucgugaacaacgccaccaacguggucaucaaagugugcgaguuccaguucugcaacgaccccuuccugggcgucuacuaccacaagaacaacaagagcuggauggaaagcgaguuccggguguacagcagcgccaacaacugcaccuucgaguacgugucccagccuuuccugauggaccuggaaggcaagcagggcaacuucaagaaccugcgcgaguucguguucaagaacaucgacggcuacuucaaaaucuacagcaagcacaccccuaucaaccucgugcgggaucugccucagggcuucucugcucuggaaccccugguggaucugcccaucggcaucaacaucacccgguuucagacacugcuggcccugcacagaagcuaccugacaccuggcgauagcagcagcggauggacagcuggugccgccgcuuacuaugugggcuaccugcagccuagaaccuuccugcugaaguacaacgagaacggcaccaucaccgacgccguggauugugcucuggauccucugagcgagacaaagugcacccugaaguccuucaccguggaaaagggcaucuaccagaccagcaacuuccgggugcagcccaccgaauccaucgugcgguuccccaauaucaccaaucugugccccuucggcgagguguucaaugccaccagauucgccucuguguacgccuggaaccggaagcggaucagcaauugcguggccgacuacuccgugcuguacaacuccgccagcuucagcaccuucaagugcuacggcguguccccuaccaagcugaacgaccugugcuucacaaacguguacgccgacagcuucgugauccggggagaugaagugcggcagauugccccuggacagacaggcaagaucgccgacuacaacuacaagcugcccgacgacuucaccggcugugugauugccuggaacagcaacaaccuggacuccaaagucggcggcaacuacaauuaccuguuccggcuguuccggaaguccaaucugaagcccuucgagcgggacaucagcaccgaaaucuaucaggccggcagcaccccuugcaacggcguggaaggcuucaacugcuacuucccacugcaguccuacggcuuucagcccacaaauggcgugggcuaucagcccuacagagugguggugcugagcuucgaacugcugcaugcuccugccacagugugcggcccuaagaaaagcaccaaucucgugaagaacaaaugcgugaacuucaacuucaacggccugaccggcaccggcgugcugacagagagcaacaagaaguuccugccauuccagcaguuuggccgggauaucgccgauaccacagacgccguuagagauccccagacacuggaaauccuggacaucaccccaugcagcuucggcggagugucugugaucaccccuggcaccaacaccagcaaucagguggcagugcuguaccagggcgugaacuguaccgaagugcccguggccauucacgccgaucagcugacaccuacauggcggguguacuccaccggcagcaauguguuucagaccagagccggcugucugaucggagccgagcacgugaacaauagcuacgagugcgacauccccaucggcgcuggcaucugugccagcuaccagacacagacaaacagccccagacgggcuagaagcguggccagccagagcgugauugccuacacaaugucucugggcgccgagaacagcguggccuacuccaacaacucuaucgcuauccccaccaacuucaccaucagcgugaccaccgagauccugccuguguccaugaccaagaccagcguggacugcaccauguacaucugcggcgauuccaccgagugcuccaaccugcugcugcaguacggcagcuucugcacccagcugaauagagcccugacagggaucgccguggaacaggacaagaacacccaagagguguucgcccaagugaagcaaaucuacaagaccccuccuaucaaggacuucggcggcuucaauuucagccagauucugcccgauccuagcaagcccagcaagcggagcuucaucgaggaccugcuguucaacaaagugacacuggccgacgccggcuucaucaagcaguauggcgauugucugggcgacauugccgccagggaucugauuugcgcccagaaguuuaacggacugacagugcugccuccucugcugaccgaugagaugaucgcccaguacacaucugcccugcuggccggcacaaucacaagcggcuggacauuuggagcuggcgccgcucugcagauccccuuugcuaugcagauggccuaccgguucaacggcaucggagugacccagaaugugcuguacgagaaccagaagcugaucgccaaccaguucaacagcgccaucggcaagauccaggacagccugagcagcacagcaagcgcccugggaaagcugcaggacguggucaaccagaaugcccaggcacugaacacccuggucaagcagcuguccuccaacuucggcgccaucagcucugugcugaacgauauccugagcagacuggacaaggucgaggccgaggugcagaucgacagacugaucacaggcagacugcagagccuccagacauacgugacccagcagcugaucagagccgccgagauuagagccucugccaaucuggccgccaccaagaugucugagugugugcugggccagagcaagagaguggacuuuugcggcaagggcuaccaccugaugagcuucccucagucugccccucacggcgugguguuucugcacgugacauaugugcccgcucaagagaagaauuucaccaccgcuccagccaucugccacgacggcaaagcccacuuuccuagagaaggcguguucguguccaacggcacccauugguucgugacacagcggaacuucuacgagccccagaucaucaccaccgacaacaccuucgugucuggcaacugcgacguugugaucggcauugugaacaauaccguguacgacccucugcagcccgagcuggacagcuucaaagaggaacuggacaaguacuuuaagaaccacacaagccccgacguggaccugggcgauaucagcggaaucaaugccagcgucgugaacauccagaaagagaucgaccggcugaacgagguggccaagaaucugaacgagagccugaucgaccugcaagaacuggggaaguacgagcaguacaucaaguggcccugguacaucuggcugggcuuuaucgccggacugauugccaucgugaucgucacaaucaugcuguguugcaugaccagcugcuguagcugccugaagggcuguuguagcuguggcagcugcugcaaguucgacgaggacgauucugagcccgugcugaagggcgugaaacugcacuacaccugaugacucgagcugguacugcaugcacgcaaugcuagcugccccuuucccguccuggguaccccgagucucccccgaccucgggucccagguaugcucccaccuccaccugccccacucaccaccucugcuaguuccagacaccucccaagcacgcagcaaugcagcucaaaacgcuuagccuagccacacccccacgggaaacagcagugauuaaccuuuagcaauaaacgaaaguuuaacuaagcuauacuaaccccaggguuggucaauuucgugccagccacacccuggagcuagcaaaaaaaaaaaaaaaaaaaaaaaaaaaaaaaaaaaaaaaaaaaaaaaaaaaaaaaaaaaaaaaaaaaaaaaaaaaaaaaaaaaaaaaaaaaaaaaaaaaa

SEQ ID NO: 26353 - RNA, 4264 nt, Artificial Sequence
  SARS-CoV-2/Wuhan/WIV05/2019__EPI_ISL_402128 spike protein mRNA gc mod (1-1273)(H69del_V70del_Y144del_N501Y_A570D_D614G_P681H_T716I_S982 A_D1118H)
agaauaaacuaguauucuucugguccccacagacucagagagaacccgccaccauguucguguuucuggugcugcugccccugguguccagccagugugugaaccugaccaccagaacacagcugccuccagccuacaccaacagcuucaccagaggcguguacuaccccgacaagguguucagauccagcgugcugcacucuacccaggaccuguuccugccuuucuucagcaacgugaccugguuccacgccaucuccggcaccaauggcaccaagagauucgacaaccccgugcugcccuucaacgacgggguguacuuugccagcaccgagaaguccaacaucaucagaggcuggaucuucggcaccacacuggacagcaagacccagagccugcugaucgugaacaacgccaccaacguggucaucaaagugugcgaguuccaguucugcaacgaccccuuccugggcgucuaccacaagaacaacaagagcuggauggaaagcgaguuccggguguacagcagcgccaacaacugcaccuucgaguacgugucccagccuuuccugauggaccuggaaggcaagcagggcaacuucaagaaccugcgcgaguucguguucaagaacaucgacggcuacuucaaaaucuacagcaagcacaccccuaucaaccucgugcgggaucugccucagggcuucucugcucuggaaccccugguggaucugcccaucggcaucaacaucacccgguuucagacacugcuggcccugcacagaagcuaccugacaccuggcgauagcagcagcggauggacagcuggugccgccgcuuacuaugugggcuaccugcagccuagaaccuuccugcugaaguacaacgagaacggcaccaucaccgacgccguggauugugcucuggauccucugagcgagacaaagugcacccugaaguccuucaccguggaaaagggcaucuaccagaccagcaacuuccgggugcagcccaccgaauccaucgugcgguuccccaauaucaccaaucugugccccuucggcgagguguucaaugccaccagauucgccucuguguacgccuggaaccggaagcggaucagcaauugcguggccgacuacuccgugcuguacaacuccgccagcuucagcaccuucaagugcuacggcguguccccuaccaagcugaacgaccugugcuucacaaacguguacgccgacagcuucgugauccggggagaugaagugcggcagauugccccuggacagacaggcaagaucgccgacuacaacuacaagcugcccgacgacuucaccggcugugugauugccuggaacagcaacaaccuggacuccaaagucggcggcaacuacaauuaccuguaccggcuguuccggaaguccaaucugaagcccuucgagcgggacaucagcaccgaaaucuaucaggccggcagcaccccuugcaacggcguggaaggcuucaacugcuacuucccacugcaguccuacggcuuucagcccacauacggcgugggcuaucagcccuacagagugguggugcugagcuucgaacugcugcaugcuccugccacagugugcggcccuaagaaaagcaccaaucucgugaagaacaaaugcgugaacuucaacuucaacggccugaccggcaccggcgugcugacagagagcaacaagaaguuccugccauuccagcaguuuggccgggauaucgacgauaccacagacgccguuagagauccccagacacuggaaauccuggacaucaccccaugcagcuucggcggagugucugugaucaccccuggcaccaacaccagcaaucagguggcagugcuguaccagggcgugaacuguaccgaagugcccguggccauucacgccgaucagcugacaccuacauggcggguguacuccaccggcagcaauguguuucagaccagagccggcugucugaucggagccgagcacgugaacaauagcuacgagugcgacauccccaucggcgcuggcaucugugccagcuaccagacacagacaaacagccacagacgggcuagaagcguggccagccagagcaucauugccuacacaaugucucugggcgccgagaacagcguggccuacuccaacaacucuaucgcuauccccaucaacuucaccaucagcgugaccaccgagauccugccuguguccaugaccaagaccagcguggacugcaccauguacaucugcggcgauuccaccgagugcuccaaccugcugcugcaguacggcagcuucugcacccagcugaauagagcccugacagggaucgccguggaacaggacaagaacacccaagagguguucgcccaagugaagcaaaucuacaagaccccuccuaucaaggacuucggcggcuucaauuucagccagauucugcccgauccuagcaagcccagcaagcggagcuucaucgaggaccugcuguucaacaaagugacacuggccgacgccggcuucaucaagcaguauggcgauugucugggcgacauugccgccagggaucugauuugcgcccagaaguuuaacggacugacagugcugccuccucugcugaccgaugagaugaucgcccaguacacaucugcccugcuggccggcacaaucacaagcggcuggacauuuggagcuggcgccgcucugcagauccccuuugcuaugcagauggccuaccgguucaacggcaucggagugacccagaaugugcuguacgagaaccagaagcugaucgccaaccaguucaacagcgccaucggcaagauccaggacagccugagcagcacagcaagcgcccugggaaagcugcaggacguggucaaccagaaugcccaggcacugaacacccuggucaagcagcuguccuccaacuucggcgccaucagcucugugcugaacgauauccuggccagacuggacaaggucgaggccgaggugcagaucgacagacugaucacaggcagacugcagagccuccagacauacgugacccagcagcugaucagagccgccgagauuagagccucugccaaucuggccgccaccaagaugucugagugugugcugggccagagcaagagaguggacuuuugcggcaagggcuaccaccugaugagcuucccucagucugccccucacggcgugguguuucugcacgugacauaugugcccgcucaagagaagaauuucaccaccgcuccagccaucugccacgacggcaaagcccacuuuccuagagaaggcguguucguguccaacggcacccauugguucgugacacagcggaacuucuacgagccccagaucaucaccacccacaacaccuucgugucuggcaacugcgacguugugaucggcauugugaacaauaccguguacgacccucugcagcccgagcuggacagcuucaaagaggaacuggacaaguacuuuaagaaccacacaagccccgacguggaccugggcgauaucagcggaaucaaugccagcgucgugaacauccagaaagagaucgaccggcugaacgagguggccaagaaucugaacgagagccugaucgaccugcaagaacuggggaaguacgagcaguacaucaaguggcccugguacaucuggcugggcuuuaucgccggacugauugccaucgugauggucacaaucaugcuguguugcaugaccagcugcuguagcugccugaagggcuguuguagcuguggcagcugcugcaaguucgacgaggacgauucugagcccgugcugaagggcgugaaacugcacuacaccugaugacucgagcugguacugcaugcacgcaaugcuagcugccccuuucccguccuggguaccccgagucucccccgaccucgggucccagguaugcucccaccuccaccugccccacucaccaccucugcuaguuccagacaccucccaagcacgcagcaaugcagcucaaaacgcuuagccuagccacacccccacgggaaacagcagugauuaaccuuuagcaauaaacgaaaguuuaacuaagcuauacuaaccccaggguuggucaauuucgugccagccacacccuggagcuagcaaaaaaaaaaaaaaaaaaaaaaaaaaaaaaaaaaaaaaaaaaaaaaaaaaaaaaaaaaaaaaaaaaaaaaaaaaaaaaaaaaaaaaaaaaaaaaaaaaaa

SEQ ID NO: 26354 - RNA, 4273 nt, Artificial Sequence
  SARS-CoV-2/Wuhan/WIV05/2019__EPI_ISL_402128 spike protein mRNA gc mod (1-1273)(K417N_E484K_N501Y_D614G)
agaauaaacuaguauucuucugguccccacagacucagagagaacccgccaccauguucguguuucuggugcugcugccccugguguccagccagugugugaaccugaccaccagaacacagcugccuccagccuacaccaacagcuucaccagaggcguguacuaccccgacaagguguucagauccagcgugcugcacucuacccaggaccuguuccugccuuucuucagcaacgugaccugguuccacgccauccacguguccggcaccaauggcaccaagagauucgacaaccccgugcugcccuucaacgacgggguguacuuugccagcaccgagaaguccaacaucaucagaggcuggaucuucggcaccacacuggacagcaagacccagagccugcugaucgugaacaacgccaccaacguggucaucaaagugugcgaguuccaguucugcaacgaccccuuccugggcgucuacuaccacaagaacaacaagagcuggauggaaagcgaguuccggguguacagcagcgccaacaacugcaccuucgaguacgugucccagccuuuccugauggaccuggaaggcaagcagggcaacuucaagaaccugcgcgaguucguguucaagaacaucgacggcuacuucaaaaucuacagcaagcacaccccuaucaaccucgugcgggaucugccucagggcuucucugcucuggaaccccugguggaucugcccaucggcaucaacaucacccgguuucagacacugcuggcccugcacagaagcuaccugacaccuggcgauagcagcagcggauggacagcuggugccgccgcuuacuaugugggcuaccugcagccuagaaccuuccugcugaaguacaacgagaacggcaccaucaccgacgccguggauugugcucuggauccucugagcgagacaaagugcacccugaaguccuucaccguggaaaagggcaucuaccagaccagcaacuuccgggugcagcccaccgaauccaucgugcgguuccccaauaucaccaaucugugccccuucggcgagguguucaaugccaccagauucgccucuguguacgccuggaaccggaagcggaucagcaauugcguggccgacuacuccgugcuguacaacuccgccagcuucagcaccuucaagugcuacggcguguccccuaccaagcugaacgaccugugcuucacaaacguguacgccgacagcuucgugauccggggagaugaagugcggcagauugccccuggacagacaggcaacaucgccgacuacaacuacaagcugcccgacgacuucaccggcugugugauugccuggaacagcaacaaccuggacuccaaagucggcggcaacuacaauuaccuguaccggcuguuccggaaguccaaucugaagcccuucgagcgggacaucagcaccgaaaucuaucaggccggcagcaccccuugcaacggcgugaagggcuucaacugcuacuucccacugcaguccuacggcuuucagcccacauacggcgugggcuaucagcccuacagagugguggugcugagcuucgaacugcugcaugcuccugccacagugugcggcccuaagaaaagcaccaaucucgugaagaacaaaugcgugaacuucaacuucaacggccugaccggcaccggcgugcugacagagagcaacaagaaguuccugccauuccagcaguuuggccgggauaucgccgauaccacagacgccguuagagauccccagacacuggaaauccuggacaucaccccaugcagcuucggcggagugucugugaucaccccuggcaccaacaccagcaaucagguggcagugcuguaccagggcgugaacuguaccgaagugcccguggccauucacgccgaucagcugacaccuacauggcggguguacuccaccggcagcaauguguuucagaccagagccggcugucugaucggagccgagcacgugaacaauagcuacgagugcgacauccccaucggcgcuggcaucugugccagcuaccagacacagacaaacagccccagacgggcuagaagcguggccagccagagcaucauugccuacacaaugucucugggcgccgagaacagcguggccuacuccaacaacucuaucgcuauccccaccaacuucaccaucagcgugaccaccgagauccugccuguguccaugaccaagaccagcguggacugcaccauguacaucugcggcgauuccaccgagugcuccaaccugcugcugcaguacggcagcuucugcacccagcugaauagagcccugacagggaucgccguggaacaggacaagaacacccaagagguguucgcccaagugaagcaaaucuacaagaccccuccuaucaaggacuucggcggcuucaauuucagccagauucugcccgauccuagcaagcccagcaagcggagcuucaucgaggaccugcuguucaacaaagugacacuggccgacgccggcuucaucaagcaguauggcgauugucugggcgacauugccgccagggaucugauuugcgcccagaaguuuaacggacugacagugcugccuccucugcugaccgaugagaugaucgcccaguacacaucugcccugcuggccggcacaaucacaagcggcuggacauuuggagcuggcgccgcucugcagauccccuuugcuaugcagauggccuaccgguucaacggcaucggagugacccagaaugugcuguacgagaaccagaagcugaucgccaaccaguucaacagcgccaucggcaagauccaggacagccugagcagcacagcaagcgcccugggaaagcugcaggacguggucaaccagaaugcccaggcacugaacacccuggucaagcagcuguccuccaacuucggcgccaucagcucugugcugaacgauauccugagcagacuggacaaggucgaggccgaggugcagaucgacagacugaucacaggcagacugcagagccuccagacauacgugacccagcagcugaucagagccgccgagauuagagccucugccaaucuggccgccaccaagaugucugagugugugcugggccagagcaagagaguggacuuuugcggcaagggcuaccaccugaugagcuucccucagucugccccucacggcgugguguuucugcacgugacauaugugcccgcucaagagaagaauuucaccaccgcuccagccaucugccacgacggcaaagcccacuuuccuagagaaggcguguucguguccaacggcacccauugguucgugacacagcggaacuucuacgagccccagaucaucaccaccgacaacaccuucgugucuggcaacugcgacguugugaucggcauugugaacaauaccguguacgacccucugcagcccgagcuggacagcuucaaagaggaacuggacaaguacuuuaagaaccacacaagccccgacguggaccugggcgauaucagcggaaucaaugccagcgucgugaacauccagaaagagaucgaccggcugaacgagguggccaagaaucugaacgagagccugaucgaccugcaagaacuggggaaguacgagcaguacaucaaguggcccugguacaucuggcugggcuuuaucgccggacugauugccaucgugauggucacaaucaugcuguguugcaugaccagcugcuguagcugccugaagggcuguuguagcuguggcagcugcugcaaguucgacgaggacgauucugagcccgugcugaagggcgugaaacugcacuacaccugaugacucgagcugguacugcaugcacgcaaugcuagcugccccuuucccguccuggguaccccgagucucccccgaccucgggucccagguaugcucccaccuccaccugccccacucaccaccucugcuaguuccagacaccucccaagcacgcagcaaugcagcucaaaacgcuuagccuagccacacccccacgggaaacagcagugauuaaccuuuagcaauaaacgaaaguuuaacuaagcuauacuaaccccaggguuggucaauuucgugccagccacacccuggagcuagcaaaaaaaaaaaaaaaaaaaaaaaaaaaaaaaaaaaaaaaaaaaaaaaaaaaaaaaaaaaaaaaaaaaaaaaaaaaaaaaaaaaaaaaaaaaaaaaaaaaa

SEQ ID NO: 26355 - RNA, 4264 nt, Artificial Sequence
  SARS-CoV-2/Wuhan/WIV05/2019__EPI_ISL_402128 spike protein mRNA gc mod (1-1273)(L18F_D80A_D215G_L242del_A243del_L244del_R246I_K417N_E484 K_N501Y_D614G_A701V)
agaauaaacuaguauucuucugguccccacagacucagagagaacccgccaccauguucguguuucuggugcugcugccccugguguccagccagugugugaacuucaccaccagaacacagcugccuccagccuacaccaacagcuucaccagaggcguguacuaccccgacaagguguucagauccagcgugcugcacucuacccaggaccuguuccugccuuucuucagcaacgugaccugguuccacgccauccacguguccggcaccaauggcaccaagagauucgccaaccccgugcugcccuucaacgacgggguguacuuugccagcaccgagaaguccaacaucaucagaggcuggaucuucggcaccacacuggacagcaagacccagagccugcugaucgugaacaacgccaccaacguggucaucaaagugugcgaguuccaguucugcaacgaccccuuccugggcgucuacuaccacaagaacaacaagagcuggauggaaagcgaguuccggguguacagcagcgccaacaacugcaccuucgaguacgugucccagccuuuccugauggaccuggaaggcaagcagggcaacuucaagaaccugcgcgaguucguguucaagaacaucgacggcuacuucaaaaucuacagcaagcacaccccuaucaaccucgugcggggccugccucagggcuucucugcucuggaaccccugguggaucugcccaucggcaucaacaucacccgguuucagacacugcacaucagcuaccugacaccuggcgauagcagcagcggauggacagcuggugccgccgcuuacuaugugggcuaccugcagccuagaaccuuccugcugaaguacaacgagaacggcaccaucaccgacgccguggauugugcucuggauccucugagcgagacaaagugcacccugaaguccuucaccguggaaaagggcaucuaccagaccagcaacuuccgggugcagcccaccgaauccaucgugcgguuccccaauaucaccaaucugugccccuucggcgagguguucaaugccaccagauucgccucuguguacgccuggaaccggaagcggaucagcaauugcguggccgacuacuccgugcuguacaacuccgccagcuucagcaccuucaagugcuacggcguguccccuaccaagcugaacgaccugugcuucacaaacguguacgccgacagcuucgugauccggggagaugaagugcggcagauugccccuggacagacaggcaacaucgccgacuacaacuacaagcugcccgacgacuucaccggcugugugauugccuggaacagcaacaaccuggacuccaaagucggcggcaacuacaauuaccuguaccggcuguuccggaaguccaaucugaagcccuucgagcgggacaucagcaccgaaaucuaucaggccggcagcaccccuugcaacggcgugaagggcuucaacugcuacuucccacugcaguccuacggcuuucagcccacauacggcgugggcuaucagcccuacagagugguggugcugagcuucgaacugcugcaugcuccugccacagugugcggcccuaagaaaagcaccaaucucgugaagaacaaaugcgugaacuucaacuucaacggccugaccggcaccggcgugcugacagagagcaacaagaaguuccugccauuccagcaguuuggccgggauaucgccgauaccacagacgccguuagagauccccagacacuggaaauccuggacaucaccccaugcagcuucggcggagugucugugaucaccccuggcaccaacaccagcaaucagguggcagugcuguaccagggcgugaacuguaccgaagugcccguggccauucacgccgaucagcugacaccuacauggcggguguacuccaccggcagcaauguguuucagaccagagccggcugucugaucggagccgagcacgugaacaauagcuacgagugcgacauccccaucggcgcuggcaucugugccagcuaccagacacagacaaacagccccagacgggcuagaagcguggccagccagagcaucauugccuacacaaugucucugggcguggagaacagcguggccuacuccaacaacucuaucgcuauccccaccaacuucaccaucagcgugaccaccgagauccugccuguguccaugaccaagaccagcguggacugcaccauguacaucugcggcgauuccaccgagugcuccaaccugcugcugcaguacggcagcuucugcacccagcugaauagagcccugacagggaucgccguggaacaggacaagaacacccaagagguguucgcccaagugaagcaaaucuacaagaccccuccuaucaaggacuucggcggcuucaauuucagccagauucugcccgauccuagcaagcccagcaagcggagcuucaucgaggaccugcuguucaacaaagugacacuggccgacgccggcuucaucaagcaguauggcgauugucugggcgacauugccgccagggaucugauuugcgcccagaaguuuaacggacugacagugcugccuccucugcugaccgaugagaugaucgcccaguacacaucugcccugcuggccggcacaaucacaagcggcuggacauuuggagcuggcgccgcucugcagauccccuuugcuaugcagauggccuaccgguucaacggcaucggagugacccagaaugugcuguacgagaaccagaagcugaucgccaaccaguucaacagcgccaucggcaagauccaggacagccugagcagcacagcaagcgcccugggaaagcugcaggacguggucaaccagaaugcccaggcacugaacacccuggucaagcagcuguccuccaacuucggcgccaucagcucugugcugaacgauauccugagcagacuggacaaggucgaggccgaggugcagaucgacagacugaucacaggcagacugcagagccuccagacauacgugacccagcagcugaucagagccgccgagauuagagccucugccaaucuggccgccaccaagaugucugagugugugcugggccagagcaagagaguggacuuuugcggcaagggcuaccaccugaugagcuucccucagucugccccucacggcgugguguuucugcacgugacauaugugcccgcucaagagaagaauuucaccaccgcuccagccaucugccacgacggcaaagcccacuuuccuagagaaggcguguucguguccaacggcacccauugguucgugacacagcggaacuucuacgagccccagaucaucaccaccgacaacaccuucgugucuggcaacugcgacguugugaucggcauugugaacaauaccguguacgacccucugcagcccgagcuggacagcuucaaagaggaacuggacaaguacuuuaagaaccacacaagccccgacguggaccugggcgauaucagcggaaucaaugccagcgucgugaacauccagaaagagaucgaccggcugaacgagguggccaagaaucugaacgagagccugaucgaccugcaagaacuggggaaguacgagcaguacaucaaguggcccugguacaucuggcugggcuuuaucgccggacugauugccaucgugauggucacaaucaugcuguguugcaugaccagcugcuguagcugccugaagggcuguuguagcuguggcagcugcugcaaguucgacgaggacgauucugagcccgugcugaagggcgugaaacugcacuacaccugaugacucgagcugguacugcaugcacgcaaugcuagcugccccuuucccguccuggguaccccgagucucccccgaccucgggucccagguaugcucccaccuccaccugccccacucaccaccucugcuaguuccagacaccucccaagcacgcagcaaugcagcucaaaacgcuuagccuagccacacccccacgggaaacagcagugauuaaccuuuagcaauaaacgaaaguuuaacuaagcuauacuaaccccaggguuggucaauuucgugccagccacacccuggagcuagcaaaaaaaaaaaaaaaaaaaaaaaaaaaaaaaaaaaaaaaaaaaaaaaaaaaaaaaaaaaaaaaaaaaaaaaaaaaaaaaaaaaaaaaaaaaaaaaaaaaa

SEQ ID NO: 26356 - RNA, 4273 nt, Artificial Sequence
  SARS-CoV-2/Wuhan/WIV05/2019__EPI_ISL_402128 spike protein mRNA gc mod (1-1273)(E484K_D614G)
agaauaaacuaguauucuucugguccccacagacucagagagaacccgccaccauguucguguuucuggugcugcugccccugguguccagccagugugugaaccugaccaccagaacacagcugccuccagccuacaccaacagcuucaccagaggcguguacuaccccgacaagguguucagauccagcgugcugcacucuacccaggaccuguuccugccuuucuucagcaacgugaccugguuccacgccauccacguguccggcaccaauggcaccaagagauucgacaaccccgugcugcccuucaacgacgggguguacuuugccagcaccgagaaguccaacaucaucagaggcuggaucuucggcaccacacuggacagcaagacccagagccugcugaucgugaacaacgccaccaacguggucaucaaagugugcgaguuccaguucugcaacgaccccuuccugggcgucuacuaccacaagaacaacaagagcuggauggaaagcgaguuccggguguacagcagcgccaacaacugcaccuucgaguacgugucccagccuuuccugauggaccuggaaggcaagcagggcaacuucaagaaccugcgcgaguucguguucaagaacaucgacggcuacuucaaaaucuacagcaagcacaccccuaucaaccucgugcgggaucugccucagggcuucucugcucuggaaccccugguggaucugcccaucggcaucaacaucacccgguuucagacacugcuggcccugcacagaagcuaccugacaccuggcgauagcagcagcggauggacagcuggugccgccgcuuacuaugugggcuaccugcagccuagaaccuuccugcugaaguacaacgagaacggcaccaucaccgacgccguggauugugcucuggauccucugagcgagacaaagugcacccugaaguccuucaccguggaaaagggcaucuaccagaccagcaacuuccgggugcagcccaccgaauccaucgugcgguuccccaauaucaccaaucugugccccuucggcgagguguucaaugccaccagauucgccucuguguacgccuggaaccggaagcggaucagcaauugcguggccgacuacuccgugcuguacaacuccgccagcuucagcaccuucaagugcuacggcguguccccuaccaagcugaacgaccugugcuucacaaacguguacgccgacagcuucgugauccggggagaugaagugcggcagauugccccuggacagacaggcaagaucgccgacuacaacuacaagcugcccgacgacuucaccggcugugugauugccuggaacagcaacaaccuggacuccaaagucggcggcaacuacaauuaccuguaccggcuguuccggaaguccaaucugaagcccuucgagcgggacaucagcaccgaaaucuaucaggccggcagcaccccuugcaacggcgugaagggcuucaacugcuacuucccacugcaguccuacggcuuucagcccacaaauggcgugggcuaucagcccuacagagugguggugcugagcuucgaacugcugcaugcuccugccacagugugcggcccuaagaaaagcaccaaucucgugaagaacaaaugcgugaacuucaacuucaacggccugaccggcaccggcgugcugacagagagcaacaagaaguuccugccauuccagcaguuuggccgggauaucgccgauaccacagacgccguuagagauccccagacacuggaaauccuggacaucaccccaugcagcuucggcggagugucugugaucaccccuggcaccaacaccagcaaucagguggcagugcuguaccagggcgugaacuguaccgaagugcccguggccauucacgccgaucagcugacaccuacauggcggguguacuccaccggcagcaauguguuucagaccagagccggcugucugaucggagccgagcacgugaacaauagcuacgagugcgacauccccaucggcgcuggcaucugugccagcuaccagacacagacaaacagccccagacgggcuagaagcguggccagccagagcaucauugccuacacaaugucucugggcgccgagaacagcguggccuacuccaacaacucuaucgcuauccccaccaacuucaccaucagcgugaccaccgagauccugccuguguccaugaccaagaccagcguggacugcaccauguacaucugcggcgauuccaccgagugcuccaaccugcugcugcaguacggcagcuucugcacccagcugaauagagcccugacagggaucgccguggaacaggacaagaacacccaagagguguucgcccaagugaagcaaaucuacaagaccccuccuaucaaggacuucggcggcuucaauuucagccagauucugcccgauccuagcaagcccagcaagcggagcuucaucgaggaccugcuguucaacaaagugacacuggccgacgccggcuucaucaagcaguauggcgauugucugggcgacauugccgccagggaucugauuugcgcccagaaguuuaacggacugacagugcugccuccucugcugaccgaugagaugaucgcccaguacacaucugcccugcuggccggcacaaucacaagcggcuggacauuuggagcuggcgccgcucugcagauccccuuugcuaugcagauggccuaccgguucaacggcaucggagugacccagaaugugcuguacgagaaccagaagcugaucgccaaccaguucaacagcgccaucggcaagauccaggacagccugagcagcacagcaagcgcccugggaaagcugcaggacguggucaaccagaaugcccaggcacugaacacccuggucaagcagcuguccuccaacuucggcgccaucagcucugugcugaacgauauccugagcagacuggacaaggucgaggccgaggugcagaucgacagacugaucacaggcagacugcagagccuccagacauacgugacccagcagcugaucagagccgccgagauuagagccucugccaaucuggccgccaccaagaugucugagugugugcugggccagagcaagagaguggacuuuugcggcaagggcuaccaccugaugagcuucccucagucugccccucacggcgugguguuucugcacgugacauaugugcccgcucaagagaagaauuucaccaccgcuccagccaucugccacgacggcaaagcccacuuuccuagagaaggcguguucguguccaacggcacccauugguucgugacacagcggaacuucuacgagccccagaucaucaccaccgacaacaccuucgugucuggcaacugcgacguugugaucggcauugugaacaauaccguguacgacccucugcagcccgagcuggacagcuucaaagaggaacuggacaaguacuuuaagaaccacacaagccccgacguggaccugggcgauaucagcggaaucaaugccagcgucgugaacauccagaaagagaucgaccggcugaacgagguggccaagaaucugaacgagagccugaucgaccugcaagaacuggggaaguacgagcaguacaucaaguggcccugguacaucuggcugggcuuuaucgccggacugauugccaucgugauggucacaaucaugcuguguugcaugaccagcugcuguagcugccugaagggcuguuguagcuguggcagcugcugcaaguucgacgaggacgauucugagcccgugcugaagggcgugaaacugcacuacaccugaugacucgagcugguacugcaugcacgcaaugcuagcugccccuuucccguccuggguaccccgagucucccccgaccucgggucccagguaugcucccaccuccaccugccccacucaccaccucugcuaguuccagacaccucccaagcacgcagcaaugcagcucaaaacgcuuagccuagccacacccccacgggaaacagcagugauuaaccuuuagcaauaaacgaaaguuuaacuaagcuauacuaaccccaggguuggucaauuucgugccagccacacccuggagcuagcaaaaaaaaaaaaaaaaaaaaaaaaaaaaaaaaaaaaaaaaaaaaaaaaaaaaaaaaaaaaaaaaaaaaaaaaaaaaaaaaaaaaaaaaaaaaaaaaaaaa

SEQ ID NO: 26357 - RNA, 4273 nt, Artificial Sequence
  SARS-CoV-2/Wuhan/WIV05/2019__EPI_ISL_402128 spike protein mRNA gc mod (1-1273)(L18F_T20N_P26S_D138Y_R190S_K417T_E484K_N501Y_D614G_H655Y _T1027I)
agaauaaacuaguauucuucugguccccacagacucagagagaacccgccaccauguucguguuucuggugcugcugccccugguguccagccagugugugaacuucaccaacagaacacagcugccuagcgccuacaccaacagcuucaccagaggcguguacuaccccgacaagguguucagauccagcgugcugcacucuacccaggaccuguuccugccuuucuucagcaacgugaccugguuccacgccauccacguguccggcaccaauggcaccaagagauucgacaaccccgugcugcccuucaacgacgggguguacuuugccagcaccgagaaguccaacaucaucagaggcuggaucuucggcaccacacuggacagcaagacccagagccugcugaucgugaacaacgccaccaacguggucaucaaagugugcgaguuccaguucugcaacuaccccuuccugggcgucuacuaccacaagaacaacaagagcuggauggaaagcgaguuccggguguacagcagcgccaacaacugcaccuucgaguacgugucccagccuuuccugauggaccuggaaggcaagcagggcaacuucaagaaccugagcgaguucguguucaagaacaucgacggcuacuucaaaaucuacagcaagcacaccccuaucaaccucgugcgggaucugccucagggcuucucugcucuggaaccccugguggaucugcccaucggcaucaacaucacccgguuucagacacugcuggcccugcacagaagcuaccugacaccuggcgauagcagcagcggauggacagcuggugccgccgcuuacuaugugggcuaccugcagccuagaaccuuccugcugaaguacaacgagaacggcaccaucaccgacgccguggauugugcucuggauccucugagcgagacaaagugcacccugaaguccuucaccguggaaaagggcaucuaccagaccagcaacuuccgggugcagcccaccgaauccaucgugcgguuccccaauaucaccaaucugugccccuucggcgagguguucaaugccaccagauucgccucuguguacgccuggaaccggaagcggaucagcaauugcguggccgacuacuccgugcuguacaacuccgccagcuucagcaccuucaagugcuacggcguguccccuaccaagcugaacgaccugugcuucacaaacguguacgccgacagcuucgugauccggggagaugaagugcggcagauugccccuggacagacaggcaccaucgccgacuacaacuacaagcugcccgacgacuucaccggcugugugauugccuggaacagcaacaaccuggacuccaaagucggcggcaacuacaauuaccuguaccggcuguuccggaaguccaaucugaagcccuucgagcgggacaucagcaccgaaaucuaucaggccggcagcaccccuugcaacggcgugaagggcuucaacugcuacuucccacugcaguccuacggcuuucagcccacauacggcgugggcuaucagcccuacagagugguggugcugagcuucgaacugcugcaugcuccugccacagugugcggcccuaagaaaagcaccaaucucgugaagaacaaaugcgugaacuucaacuucaacggccugaccggcaccggcgugcugacagagagcaacaagaaguuccugccauuccagcaguuuggccgggauaucgccgauaccacagacgccguuagagauccccagacacuggaaauccuggacaucaccccaugcagcuucggcggagugucugugaucaccccuggcaccaacaccagcaaucagguggcagugcuguaccagggcgugaacuguaccgaagugcccguggccauucacgccgaucagcugacaccuacauggcggguguacuccaccggcagcaauguguuucagaccagagccggcugucugaucggagccgaguacgugaacaauagcuacgagugcgacauccccaucggcgcuggcaucugugccagcuaccagacacagacaaacagccccagacgggcuagaagcguggccagccagagcaucauugccuacacaaugucucugggcgccgagaacagcguggccuacuccaacaacucuaucgcuauccccaccaacuucaccaucagcgugaccaccgagauccugccuguguccaugaccaagaccagcguggacugcaccauguacaucugcggcgauuccaccgagugcuccaaccugcugcugcaguacggcagcuucugcacccagcugaauagagcccugacagggaucgccguggaacaggacaagaacacccaagagguguucgcccaagugaagcaaaucuacaagaccccuccuaucaaggacuucggcggcuucaauuucagccagauucugcccgauccuagcaagcccagcaagcggagcuucaucgaggaccugcuguucaacaaagugacacuggccgacgccggcuucaucaagcaguauggcgauugucugggcgacauugccgccagggaucugauuugcgcccagaaguuuaacggacugacagugcugccuccucugcugaccgaugagaugaucgcccaguacacaucugcccugcuggccggcacaaucacaagcggcuggacauuuggagcuggcgccgcucugcagauccccuuugcuaugcagauggccuaccgguucaacggcaucggagugacccagaaugugcuguacgagaaccagaagcugaucgccaaccaguucaacagcgccaucggcaagauccaggacagccugagcagcacagcaagcgcccugggaaagcugcaggacguggucaaccagaaugcccaggcacugaacacccuggucaagcagcuguccuccaacuucggcgccaucagcucugugcugaacgauauccugagcagacuggacaaggucgaggccgaggugcagaucgacagacugaucacaggcagacugcagagccuccagacauacgugacccagcagcugaucagagccgccgagauuagagccucugccaaucuggccgccaucaagaugucugagugugugcugggccagagcaagagaguggacuuuugcggcaagggcuaccaccugaugagcuucccucagucugccccucacggcgugguguuucugcacgugacauaugugcccgcucaagagaagaauuucaccaccgcuccagccaucugccacgacggcaaagcccacuuuccuagagaaggcguguucguguccaacggcacccauugguucgugacacagcggaacuucuacgagccccagaucaucaccaccgacaacaccuucgugucuggcaacugcgacguugugaucggcauugugaacaauaccguguacgacccucugcagcccgagcuggacagcuucaaagaggaacuggacaaguacuuuaagaaccacacaagccccgacguggaccugggcgauaucagcggaaucaaugccagcgucgugaacauccagaaagagaucgaccggcugaacgagguggccaagaaucugaacgagagccugaucgaccugcaagaacuggggaaguacgagcaguacaucaaguggcccugguacaucuggcugggcuuuaucgccggacugauugccaucgugauggucacaaucaugcuguguugcaugaccagcugcuguagcugccugaagggcuguuguagcuguggcagcugcugcaaguucgacgaggacgauucugagcccgugcugaagggcgugaaacugcacuacaccugaugacucgagcugguacugcaugcacgcaaugcuagcugccccuuucccguccuggguaccccgagucucccccgaccucgggucccagguaugcucccaccuccaccugccccacucaccaccucugcuaguuccagacaccucccaagcacgcagcaaugcagcucaaaacgcuuagccuagccacacccccacgggaaacagcagugauuaaccuuuagcaauaaacgaaaguuuaacuaagcuauacuaaccccaggguuggucaauuucgugccagccacacccuggagcuagcaaaaaaaaaaaaaaaaaaaaaaaaaaaaaaaaaaaaaaaaaaaaaaaaaaaaaaaaaaaaaaaaaaaaaaaaaaaaaaaaaaaaaaaaaaaaaaaaaaaa

SEQ ID NO: 26358 - RNA, 4273 nt, Artificial Sequence
  SARS-CoV-2/Wuhan/WIV05/2019__EPI_ISL_402128 spike protein mRNA gc mod (1-1273)(S13I_W152C_L452R_D614G)
agaauaaacuaguauucuucugguccccacagacucagagagaacccgccaccauguucguguuucuggugcugcugccccugguguccauccagugugugaaccugaccaccagaacacagcugccuccagccuacaccaacagcuucaccagaggcguguacuaccccgacaagguguucagauccagcgugcugcacucuacccaggaccuguuccugccuuucuucagcaacgugaccugguuccacgccauccacguguccggcaccaauggcaccaagagauucgacaaccccgugcugcccuucaacgacgggguguacuuugccagcaccgagaaguccaacaucaucagaggcuggaucuucggcaccacacuggacagcaagacccagagccugcugaucgugaacaacgccaccaacguggucaucaaagugugcgaguuccaguucugcaacgaccccuuccugggcgucuacuaccacaagaacaacaagagcugcauggaaagcgaguuccggguguacagcagcgccaacaacugcaccuucgaguacgugucccagccuuuccugauggaccuggaaggcaagcagggcaacuucaagaaccugcgcgaguucguguucaagaacaucgacggcuacuucaaaaucuacagcaagcacaccccuaucaaccucgugcgggaucugccucagggcuucucugcucuggaaccccugguggaucugcccaucggcaucaacaucacccgguuucagacacugcuggcccugcacagaagcuaccugacaccuggcgauagcagcagcggauggacagcuggugccgccgcuuacuaugugggcuaccugcagccuagaaccuuccugcugaaguacaacgagaacggcaccaucaccgacgccguggauugugcucuggauccucugagcgagacaaagugcacccugaaguccuucaccguggaaaagggcaucuaccagaccagcaacuuccgggugcagcccaccgaauccaucgugcgguuccccaauaucaccaaucugugccccuucggcgagguguucaaugccaccagauucgccucuguguacgccuggaaccggaagcggaucagcaauugcguggccgacuacuccgugcuguacaacuccgccagcuucagcaccuucaagugcuacggcguguccccuaccaagcugaacgaccugugcuucacaaacguguacgccgacagcuucgugauccggggagaugaagugcggcagauugccccuggacagacaggcaagaucgccgacuacaacuacaagcugcccgacgacuucaccggcugugugauugccuggaacagcaacaaccuggacuccaaagucggcggcaacuacaauuaccgcuaccggcuguuccggaaguccaaucugaagcccuucgagcgggacaucagcaccgaaaucuaucaggccggcagcaccccuugcaacggcguggaaggcuucaacugcuacuucccacugcaguccuacggcuuucagcccacaaauggcgugggcuaucagcccuacagagugguggugcugagcuucgaacugcugcaugcuccugccacagugugcggcccuaagaaaagcaccaaucucgugaagaacaaaugcgugaacuucaacuucaacggccugaccggcaccggcgugcugacagagagcaacaagaaguuccugccauuccagcaguuuggccgggauaucgccgauaccacagacgccguuagagauccccagacacuggaaauccuggacaucaccccaugcagcuucggcggagugucugugaucaccccuggcaccaacaccagcaaucagguggcagugcuguaccagggcgugaacuguaccgaagugcccguggccauucacgccgaucagcugacaccuacauggcggguguacuccaccggcagcaauguguuucagaccagagccggcugucugaucggagccgagcacgugaacaauagcuacgagugcgacauccccaucggcgcuggcaucugugccagcuaccagacacagacaaacagccccagacgggcuagaagcguggccagccagagcaucauugccuacacaaugucucugggcgccgagaacagcguggccuacuccaacaacucuaucgcuauccccaccaacuucaccaucagcgugaccaccgagauccugccuguguccaugaccaagaccagcguggacugcaccauguacaucugcggcgauuccaccgagugcuccaaccugcugcugcaguacggcagcuucugcacccagcugaauagagcccugacagggaucgccguggaacaggacaagaacacccaagagguguucgcccaagugaagcaaaucuacaagaccccuccuaucaaggacuucggcggcuucaauuucagccagauucugcccgauccuagcaagcccagcaagcggagcuucaucgaggaccugcuguucaacaaagugacacuggccgacgccggcuucaucaagcaguauggcgauugucugggcgacauugccgccagggaucugauuugcgcccagaaguuuaacggacugacagugcugccuccucugcugaccgaugagaugaucgcccaguacacaucugcccugcuggccggcacaaucacaagcggcuggacauuuggagcuggcgccgcucugcagauccccuuugcuaugcagauggccuaccgguucaacggcaucggagugacccagaaugugcuguacgagaaccagaagcugaucgccaaccaguucaacagcgccaucggcaagauccaggacagccugagcagcacagcaagcgcccugggaaagcugcaggacguggucaaccagaaugcccaggcacugaacacccuggucaagcagcuguccuccaacuucggcgccaucagcucugugcugaacgauauccugagcagacuggacaaggucgaggccgaggugcagaucgacagacugaucacaggcagacugcagagccuccagacauacgugacccagcagcugaucagagccgccgagauuagagccucugccaaucuggccgccaccaagaugucugagugugugcugggccagagcaagagaguggacuuuugcggcaagggcuaccaccugaugagcuucccucagucugccccucacggcgugguguuucugcacgugacauaugugcccgcucaagagaagaauuucaccaccgcuccagccaucugccacgacggcaaagcccacuuuccuagagaaggcguguucguguccaacggcacccauugguucgugacacagcggaacuucuacgagccccagaucaucaccaccgacaacaccuucgugucuggcaacugcgacguugugaucggcauugugaacaauaccguguacgacccucugcagcccgagcuggacagcuucaaagaggaacuggacaaguacuuuaagaaccacacaagccccgacguggaccugggcgauaucagcggaaucaaugccagcgucgugaacauccagaaagagaucgaccggcugaacgagguggccaagaaucugaacgagagccugaucgaccugcaagaacuggggaaguacgagcaguacaucaaguggcccugguacaucuggcugggcuuuaucgccggacugauugccaucgugauggucacaaucaugcuguguugcaugaccagcugcuguagcugccugaagggcuguuguagcuguggcagcugcugcaaguucgacgaggacgauucugagcccgugcugaagggcgugaaacugcacuacaccugaugacucgagcugguacugcaugcacgcaaugcuagcugccccuuucccguccuggguaccccgagucucccccgaccucgggucccagguaugcucccaccuccaccugccccacucaccaccucugcuaguuccagacaccucccaagcacgcagcaaugcagcucaaaacgcuuagccuagccacacccccacgggaaacagcagugauuaaccuuuagcaauaaacgaaaguuuaacuaagcuauacuaaccccaggguuggucaauuucgugccagccacacccuggagcuagcaaaaaaaaaaaaaaaaaaaaaaaaaaaaaaaaaaaaaaaaaaaaaaaaaaaaaaaaaaaaaaaaaaaaaaaaaaaaaaaaaaaaaaaaaaaaaaaaaaaa

SEQ ID NO: 26359 - RNA, 4273 nt, Artificial Sequence
  SARS-CoV-2/Wuhan/WIV05/2019__EPI_ISL_402128 spike protein mRNA gc mod (1-1273)
agaauaaacuaguauucuucugguccccacagacucagagagaacccgccaccauguucguguuccuggugcugcugccucugguguccagccagugugugaaccugaccaccagaacacagcugccuccagccuacaccaacagcuuuaccagaggcguguacuaccccgacaagguguucagauccagcgugcugcacucuacccaggaccuguuccugccuuucuucagcaacgugaccugguuccacgccauccacguguccggcaccaauggcaccaagagauucgacaaccccgugcugcccuucaacgacgggguguacuuugccagcaccgagaaguccaacaucaucagaggcuggaucuucggcaccacacuggacagcaagacccagagccugcugaucgugaacaacgccaccaacguggucaucaaagugugcgaguuccaguucugcaacgaccccuuccugggcgucuacuaccacaagaacaacaagagcuggauggaaagcgaguuccggguguacagcagcgccaacaacugcaccuucgaguacgugucccagccuuuccugauggaccuggaaggcaagcagggcaacuucaagaaccugcgcgaguucguguuuaagaacaucgacggcuacuucaagaucuacagcaagcacaccccuaucaaccucgugcgggaucugccucagggcuucucugcucuggaaccccugguggaucugcccaucggcaucaacaucacccgguuucagacacugcuggcccugcacagaagcuaccugacaccuggcgauagcagcagcggauggacagcuggugccgccgcuuacuaugugggcuaccugcagccuagaaccuuccugcugaaguacaacgagaacggcaccaucaccgacgccguggauugugcucuggauccucugagcgagacaaagugcacccugaaguccuucaccguggaaaagggcaucuaccagaccagcaacuuccgggugcagcccaccgaauccaucgugcgguuccccaauaucaccaaucugugccccuucggcgagguguucaaugccaccagauucgccucuguguacgccuggaaccggaagcggaucagcaauugcguggccgacuacuccgugcuguacaacuccgccagcuucagcaccuucaagugcuacggcguguccccuaccaagcugaacgaccugugcuucacaaacguguacgccgacagcuucgugauccggggagaugaagugcggcagauugccccuggacagacaggcaagaucgccgacuacaacuacaagcugcccgacgacuucaccggcugugugauugccuggaacagcaacaaccuggacuccaaagucggcggcaacuacaauuaccuguaccggcuguuccggaaguccaaucugaagcccuucgagcgggacaucuccaccgagaucuaucaggccggcagcaccccuuguaacggcguggaaggcuucaacugcuacuucccacugcaguccuacggcuuucagcccacaaauggcgugggcuaucagcccuacagagugguggugcugagcuucgaacugcugcaugccccugccacagugugcggcccuaagaaaagcaccaaucucgugaagaacaaaugcgugaacuucaacuucaacggccugaccggcaccggcgugcugacagagagcaacaagaaguuccugccauuccagcaguuuggccgggauaucgccgauaccacagacgccguuagagauccccagacacuggaaauccuggacaucaccccuugcagcuucggcggagugucugugaucaccccuggcaccaacaccagcaaucagguggcagugcuguaccaggacgugaacuguaccgaagugcccguggccauucacgccgaucagcugacaccuacauggcggguguacuccaccggcagcaauguguuucagaccagagccggcugucugaucggagccgagcacgugaacaauagcuacgagugcgacauccccaucggcgcuggaaucugcgccagcuaccagacacagacaaacagcccucggagagccagaagcguggccagccagagcaucauugccuacacaaugucucugggcgccgagaacagcguggccuacuccaacaacucuaucgcuauccccaccaacuucaccaucagcgugaccacagagauccugccuguguccaugaccaagaccagcguggacugcaccauguacaucugcggcgauuccaccgagugcuccaaccugcugcugcaguacggcagcuucugcacccagcugaauagagcccugacagggaucgccguggaacaggacaagaacacccaagagguguucgcccaagugaagcagaucuacaagaccccuccuaucaaggacuucggcggcuucaauuucagccagauucugcccgauccuagcaagcccagcaagcggagcuucaucgaggaccugcuguucaacaaagugacacuggccgacgccggcuucaucaagcaguauggcgauugucugggcgacauugccgccagggaucugauuugcgcccagaaguuuaacggacugacagugcugccuccucugcugaccgaugagaugaucgcccaguacacaucugcccugcuggccggcacaaucacaagcggcuggacauuuggagcaggcgccgcucugcagauccccuuugcuaugcagauggccuaccgguucaacggcaucggagugacccagaaugugcuguacgagaaccagaagcugaucgccaaccaguucaacagcgccaucggcaagauccaggacagccugagcagcacagcaagcgcccugggaaagcugcaggacguggucaaccagaaugcccaggcacugaacacccuggucaagcagcuguccuccaacuucggcgccaucagcucugugcugaacgauauccugagcagacuggacaaggucgaggccgaggugcagaucgacagacugaucacaggcagacugcagagccuccagacauacgugacccagcagcugaucagagccgccgagauuagagccucugccaaucuggccgccaccaagaugucugagugugugcugggccagagcaagagaguggacuuuugcggcaagggcuaccaccugaugagcuucccucagucugccccucacggcgugguguuucugcacgugacauaugugcccgcucaagagaagaauuucaccaccgcuccagccaucugccacgacggcaaagcccacuuuccuagagaaggcguguucguguccaacggcacccauugguucgugacacagcggaacuucuacgagccccagaucaucaccaccgacaacaccuucgugucuggcaacugcgacgucgugaucggcauugugaacaauaccguguacgacccucugcagcccgagcuggacagcuucaaagaggaacuggacaaguacuuuaagaaccacacaagccccgacguggaccugggcgauaucagcggaaucaaugccagcgucgugaacauccagaaagagaucgaccggcugaacgagguggccaagaaucugaacgagagccugaucgaccugcaagaacuggggaaguacgagcaguacaucaaguggcccugguacaucuggcugggcuuuaucgccggacugauugccaucgugauggucacaaucaugcuguguugcaugaccagcugcuguagcugccugaagggcuguuguagcuguggcagcugcugcaaguucgacgaggacgauucugagcccgugcugaagggcgugaaacugcacuacacaugaugacucgagcugguacugcaugcacgcaaugcuagcugccccuuucccguccuggguaccccgagucucccccgaccucgggucccagguaugcucccaccuccaccugccccacucaccaccucugcuaguuccagacaccucccaagcacgcagcaaugcagcucaaaacgcuuagccuagccacacccccacgggaaacagcagugauuaaccuuuagcaauaaacgaaaguuuaacuaagcuauacuaaccccaggguuggucaauuucgugccagccacacccuggagcuagcaaaaaaaaaaaaaaaaaaaaaaaaaaaaaaaaaaaaaaaaaaaaaaaaaaaaaaaaaaaaaaaaaaaaaaaaaaaaaaaaaaaaaaaaaaaaaaaaaaaa

SEQ ID NO: 26360 - RNA, 4273 nt, Artificial Sequence
  SARS-CoV-2/Wuhan/WIV05/2019__EPI_ISL_402128 spike protein mRNA gc mod (1-1273)(D614G)
agaauaaacuaguauucuucugguccccacagacucagagagaacccgccaccauguucguguuccuggugcugcugccucugguguccagccagugugugaaccugaccaccagaacacagcugccuccagccuacaccaacagcuuuaccagaggcguguacuaccccgacaagguguucagauccagcgugcugcacucuacccaggaccuguuccugccuuucuucagcaacgugaccugguuccacgccauccacguguccggcaccaauggcaccaagagauucgacaaccccgugcugcccuucaacgacgggguguacuuugccagcaccgagaaguccaacaucaucagaggcuggaucuucggcaccacacuggacagcaagacccagagccugcugaucgugaacaacgccaccaacguggucaucaaagugugcgaguuccaguucugcaacgaccccuuccugggcgucuacuaccacaagaacaacaagagcuggauggaaagcgaguuccggguguacagcagcgccaacaacugcaccuucgaguacgugucccagccuuuccugauggaccuggaaggcaagcagggcaacuucaagaaccugcgcgaguucguguuuaagaacaucgacggcuacuucaagaucuacagcaagcacaccccuaucaaccucgugcgggaucugccucagggcuucucugcucuggaaccccugguggaucugcccaucggcaucaacaucacccgguuucagacacugcuggcccugcacagaagcuaccugacaccuggcgauagcagcagcggauggacagcuggugccgccgcuuacuaugugggcuaccugcagccuagaaccuuccugcugaaguacaacgagaacggcaccaucaccgacgccguggauugugcucuggauccucugagcgagacaaagugcacccugaaguccuucaccguggaaaagggcaucuaccagaccagcaacuuccgggugcagcccaccgaauccaucgugcgguuccccaauaucaccaaucugugccccuucggcgagguguucaaugccaccagauucgccucuguguacgccuggaaccggaagcggaucagcaauugcguggccgacuacuccgugcuguacaacuccgccagcuucagcaccuucaagugcuacggcguguccccuaccaagcugaacgaccugugcuucacaaacguguacgccgacagcuucgugauccggggagaugaagugcggcagauugccccuggacagacaggcaagaucgccgacuacaacuacaagcugcccgacgacuucaccggcugugugauugccuggaacagcaacaaccuggacuccaaagucggcggcaacuacaauuaccuguaccggcuguuccggaaguccaaucugaagcccuucgagcgggacaucuccaccgagaucuaucaggccggcagcaccccuuguaacggcguggaaggcuucaacugcuacuucccacugcaguccuacggcuuucagcccacaaauggcgugggcuaucagcccuacagagugguggugcugagcuucgaacugcugcaugccccugccacagugugcggcccuaagaaaagcaccaaucucgugaagaacaaaugcgugaacuucaacuucaacggccugaccggcaccggcgugcugacagagagcaacaagaaguuccugccauuccagcaguuuggccgggauaucgccgauaccacagacgccguuagagauccccagacacuggaaauccuggacaucaccccuugcagcuucggcggagugucugugaucaccccuggcaccaacaccagcaaucagguggcagugcuguaccagggcgugaacuguaccgaagugcccguggccauucacgccgaucagcugacaccuacauggcggguguacuccaccggcagcaauguguuucagaccagagccggcugucugaucggagccgagcacgugaacaauagcuacgagugcgacauccccaucggcgcuggaaucugcgccagcuaccagacacagacaaacagcccucggagagccagaagcguggccagccagagcaucauugccuacacaaugucucugggcgccgagaacagcguggccuacuccaacaacucuaucgcuauccccaccaacuucaccaucagcgugaccacagagauccugccuguguccaugaccaagaccagcguggacugcaccauguacaucugcggcgauuccaccgagugcuccaaccugcugcugcaguacggcagcuucugcacccagcugaauagagcccugacagggaucgccguggaacaggacaagaacacccaagagguguucgcccaagugaagcagaucuacaagaccccuccuaucaaggacuucggcggcuucaauuucagccagauucugcccgauccuagcaagcccagcaagcggagcuucaucgaggaccugcuguucaacaaagugacacuggccgacgccggcuucaucaagcaguauggcgauugucugggcgacauugccgccagggaucugauuugcgcccagaaguuuaacggacugacagugcugccuccucugcugaccgaugagaugaucgcccaguacacaucugcccugcuggccggcacaaucacaagcggcuggacauuuggagcaggcgccgcucugcagauccccuuugcuaugcagauggccuaccgguucaacggcaucggagugacccagaaugugcuguacgagaaccagaagcugaucgccaaccaguucaacagcgccaucggcaagauccaggacagccugagcagcacagcaagcgcccugggaaagcugcaggacguggucaaccagaaugcccaggcacugaacacccuggucaagcagcuguccuccaacuucggcgccaucagcucugugcugaacgauauccugagcagacuggacaaggucgaggccgaggugcagaucgacagacugaucacaggcagacugcagagccuccagacauacgugacccagcagcugaucagagccgccgagauuagagccucugccaaucuggccgccaccaagaugucugagugugugcugggccagagcaagagaguggacuuuugcggcaagggcuaccaccugaugagcuucccucagucugccccucacggcgugguguuucugcacgugacauaugugcccgcucaagagaagaauuucaccaccgcuccagccaucugccacgacggcaaagcccacuuuccuagagaaggcguguucguguccaacggcacccauugguucgugacacagcggaacuucuacgagccccagaucaucaccaccgacaacaccuucgugucuggcaacugcgacgucgugaucggcauugugaacaauaccguguacgacccucugcagcccgagcuggacagcuucaaagaggaacuggacaaguacuuuaagaaccacacaagccccgacguggaccugggcgauaucagcggaaucaaugccagcgucgugaacauccagaaagagaucgaccggcugaacgagguggccaagaaucugaacgagagccugaucgaccugcaagaacuggggaaguacgagcaguacaucaaguggcccugguacaucuggcugggcuuuaucgccggacugauugccaucgugauggucacaaucaugcuguguugcaugaccagcugcuguagcugccugaagggcuguuguagcuguggcagcugcugcaaguucgacgaggacgauucugagcccgugcugaagggcgugaaacugcacuacacaugaugacucgagcugguacugcaugcacgcaaugcuagcugccccuuucccguccuggguaccccgagucucccccgaccucgggucccagguaugcucccaccuccaccugccccacucaccaccucugcuaguuccagacaccucccaagcacgcagcaaugcagcucaaaacgcuuagccuagccacacccccacgggaaacagcagugauuaaccuuuagcaauaaacgaaaguuuaacuaagcuauacuaaccccaggguuggucaauuucgugccagccacacccuggagcuagcaaaaaaaaaaaaaaaaaaaaaaaaaaaaaaaaaaaaaaaaaaaaaaaaaaaaaaaaaaaaaaaaaaaaaaaaaaaaaaaaaaaaaaaaaaaaaaaaaaaa

SEQ ID NO: 26361 - RNA, 4273 nt, Artificial Sequence
  SARS-CoV-2/Wuhan/WIV05/2019__EPI_ISL_402128 spike protein mRNA gc mod (1-1273)(A222V_D614G)
agaauaaacuaguauucuucugguccccacagacucagagagaacccgccaccauguucguguuccuggugcugcugccucugguguccagccagugugugaaccugaccaccagaacacagcugccuccagccuacaccaacagcuuuaccagaggcguguacuaccccgacaagguguucagauccagcgugcugcacucuacccaggaccuguuccugccuuucuucagcaacgugaccugguuccacgccauccacguguccggcaccaauggcaccaagagauucgacaaccccgugcugcccuucaacgacgggguguacuuugccagcaccgagaaguccaacaucaucagaggcuggaucuucggcaccacacuggacagcaagacccagagccugcugaucgugaacaacgccaccaacguggucaucaaagugugcgaguuccaguucugcaacgaccccuuccugggcgucuacuaccacaagaacaacaagagcuggauggaaagcgaguuccggguguacagcagcgccaacaacugcaccuucgaguacgugucccagccuuuccugauggaccuggaaggcaagcagggcaacuucaagaaccugcgcgaguucguguuuaagaacaucgacggcuacuucaagaucuacagcaagcacaccccuaucaaccucgugcgggaucugccucagggcuucucugugcuggaaccccugguggaucugcccaucggcaucaacaucacccgguuucagacacugcuggcccugcacagaagcuaccugacaccuggcgauagcagcagcggauggacagcuggugccgccgcuuacuaugugggcuaccugcagccuagaaccuuccugcugaaguacaacgagaacggcaccaucaccgacgccguggauugugcucuggauccucugagcgagacaaagugcacccugaaguccuucaccguggaaaagggcaucuaccagaccagcaacuuccgggugcagcccaccgaauccaucgugcgguuccccaauaucaccaaucugugccccuucggcgagguguucaaugccaccagauucgccucuguguacgccuggaaccggaagcggaucagcaauugcguggccgacuacuccgugcuguacaacuccgccagcuucagcaccuucaagugcuacggcguguccccuaccaagcugaacgaccugugcuucacaaacguguacgccgacagcuucgugauccggggagaugaagugcggcagauugccccuggacagacaggcaagaucgccgacuacaacuacaagcugcccgacgacuucaccggcugugugauugccuggaacagcaacaaccuggacuccaaagucggcggcaacuacaauuaccuguaccggcuguuccggaaguccaaucugaagcccuucgagcgggacaucuccaccgagaucuaucaggccggcagcaccccuuguaacggcguggaaggcuucaacugcuacuucccacugcaguccuacggcuuucagcccacaaauggcgugggcuaucagcccuacagagugguggugcugagcuucgaacugcugcaugccccugccacagugugcggcccuaagaaaagcaccaaucucgugaagaacaaaugcgugaacuucaacuucaacggccugaccggcaccggcgugcugacagagagcaacaagaaguuccugccauuccagcaguuuggccgggauaucgccgauaccacagacgccguuagagauccccagacacuggaaauccuggacaucaccccuugcagcuucggcggagugucugugaucaccccuggcaccaacaccagcaaucagguggcagugcuguaccagggcgugaacuguaccgaagugcccguggccauucacgccgaucagcugacaccuacauggcggguguacuccaccggcagcaauguguuucagaccagagccggcugucugaucggagccgagcacgugaacaauagcuacgagugcgacauccccaucggcgcuggaaucugcgccagcuaccagacacagacaaacagcccucggagagccagaagcguggccagccagagcaucauugccuacacaaugucucugggcgccgagaacagcguggccuacuccaacaacucuaucgcuauccccaccaacuucaccaucagcgugaccacagagauccugccuguguccaugaccaagaccagcguggacugcaccauguacaucugcggcgauuccaccgagugcuccaaccugcugcugcaguacggcagcuucugcacccagcugaauagagcccugacagggaucgccguggaacaggacaagaacacccaagagguguucgcccaagugaagcagaucuacaagaccccuccuaucaaggacuucggcggcuucaauuucagccagauucugcccgauccuagcaagcccagcaagcggagcuucaucgaggaccugcuguucaacaaagugacacuggccgacgccggcuucaucaagcaguauggcgauugucugggcgacauugccgccagggaucugauuugcgcccagaaguuuaacggacugacagugcugccuccucugcugaccgaugagaugaucgcccaguacacaucugcccugcuggccggcacaaucacaagcggcuggacauuuggagcaggcgccgcucugcagauccccuuugcuaugcagauggccuaccgguucaacggcaucggagugacccagaaugugcuguacgagaaccagaagcugaucgccaaccaguucaacagcgccaucggcaagauccaggacagccugagcagcacagcaagcgcccugggaaagcugcaggacguggucaaccagaaugcccaggcacugaacacccuggucaagcagcuguccuccaacuucggcgccaucagcucugugcugaacgauauccugagcagacuggacaaggucgaggccgaggugcagaucgacagacugaucacaggcagacugcagagccuccagacauacgugacccagcagcugaucagagccgccgagauuagagccucugccaaucuggccgccaccaagaugucugagugugugcugggccagagcaagagaguggacuuuugcggcaagggcuaccaccugaugagcuucccucagucugccccucacggcgugguguuucugcacgugacauaugugcccgcucaagagaagaauuucaccaccgcuccagccaucugccacgacggcaaagcccacuuuccuagagaaggcguguucguguccaacggcacccauugguucgugacacagcggaacuucuacgagccccagaucaucaccaccgacaacaccuucgugucuggcaacugcgacgucgugaucggcauugugaacaauaccguguacgacccucugcagcccgagcuggacagcuucaaagaggaacuggacaaguacuuuaagaaccacacaagccccgacguggaccugggcgauaucagcggaaucaaugccagcgucgugaacauccagaaagagaucgaccggcugaacgagguggccaagaaucugaacgagagccugaucgaccugcaagaacuggggaaguacgagcaguacaucaaguggcccugguacaucuggcugggcuuuaucgccggacugauugccaucgugauggucacaaucaugcuguguugcaugaccagcugcuguagcugccugaagggcuguuguagcuguggcagcugcugcaaguucgacgaggacgauucugagcccgugcugaagggcgugaaacugcacuacacaugaugacucgagcugguacugcaugcacgcaaugcuagcugccccuuucccguccuggguaccccgagucucccccgaccucgggucccagguaugcucccaccuccaccugccccacucaccaccucugcuaguuccagacaccucccaagcacgcagcaaugcagcucaaaacgcuuagccuagccacacccccacgggaaacagcagugauuaaccuuuagcaauaaacgaaaguuuaacuaagcuauacuaaccccaggguuggucaauuucgugccagccacacccuggagcuagcaaaaaaaaaaaaaaaaaaaaaaaaaaaaaaaaaaaaaaaaaaaaaaaaaaaaaaaaaaaaaaaaaaaaaaaaaaaaaaaaaaaaaaaaaaaaaaaaaaaa

SEQ ID NO: 26362 - RNA, 4273 nt, Artificial Sequence
  SARS-CoV-2/Wuhan/WIV05/2019__EPI_ISL_402128 spike protein mRNA gc mod (1-1273)(N439K_D614G)
agaauaaacuaguauucuucugguccccacagacucagagagaacccgccaccauguucguguuccuggugcugcugccucugguguccagccagugugugaaccugaccaccagaacacagcugccuccagccuacaccaacagcuuuaccagaggcguguacuaccccgacaagguguucagauccagcgugcugcacucuacccaggaccuguuccugccuuucuucagcaacgugaccugguuccacgccauccacguguccggcaccaauggcaccaagagauucgacaaccccgugcugcccuucaacgacgggguguacuuugccagcaccgagaaguccaacaucaucagaggcuggaucuucggcaccacacuggacagcaagacccagagccugcugaucgugaacaacgccaccaacguggucaucaaagugugcgaguuccaguucugcaacgaccccuuccugggcgucuacuaccacaagaacaacaagagcuggauggaaagcgaguuccggguguacagcagcgccaacaacugcaccuucgaguacgugucccagccuuuccugauggaccuggaaggcaagcagggcaacuucaagaaccugcgcgaguucguguuuaagaacaucgacggcuacuucaagaucuacagcaagcacaccccuaucaaccucgugcgggaucugccucagggcuucucugcucuggaaccccugguggaucugcccaucggcaucaacaucacccgguuucagacacugcuggcccugcacagaagcuaccugacaccuggcgauagcagcagcggauggacagcuggugccgccgcuuacuaugugggcuaccugcagccuagaaccuuccugcugaaguacaacgagaacggcaccaucaccgacgccguggauugugcucuggauccucugagcgagacaaagugcacccugaaguccuucaccguggaaaagggcaucuaccagaccagcaacuuccgggugcagcccaccgaauccaucgugcgguuccccaauaucaccaaucugugccccuucggcgagguguucaaugccaccagauucgccucuguguacgccuggaaccggaagcggaucagcaauugcguggccgacuacuccgugcuguacaacuccgccagcuucagcaccuucaagugcuacggcguguccccuaccaagcugaacgaccugugcuucacaaacguguacgccgacagcuucgugauccggggagaugaagugcggcagauugccccuggacagacaggcaagaucgccgacuacaacuacaagcugcccgacgacuucaccggcugugugauugccuggaacagcaagaaccuggacuccaaagucggcggcaacuacaauuaccuguaccggcuguuccggaaguccaaucugaagcccuucgagcgggacaucuccaccgagaucuaucaggccggcagcaccccuuguaacggcguggaaggcuucaacugcuacuucccacugcaguccuacggcuuucagcccacaaauggcgugggcuaucagcccuacagagugguggugcugagcuucgaacugcugcaugccccugccacagugugcggcccuaagaaaagcaccaaucucgugaagaacaaaugcgugaacuucaacuucaacggccugaccggcaccggcgugcugacagagagcaacaagaaguuccugccauuccagcaguuuggccgggauaucgccgauaccacagacgccguuagagauccccagacacuggaaauccuggacaucaccccuugcagcuucggcggagugucugugaucaccccuggcaccaacaccagcaaucagguggcagugcuguaccagggcgugaacuguaccgaagugcccguggccauucacgccgaucagcugacaccuacauggcggguguacuccaccggcagcaauguguuucagaccagagccggcugucugaucggagccgagcacgugaacaauagcuacgagugcgacauccccaucggcgcuggaaucugcgccagcuaccagacacagacaaacagcccucggagagccagaagcguggccagccagagcaucauugccuacacaaugucucugggcgccgagaacagcguggccuacuccaacaacucuaucgcuauccccaccaacuucaccaucagcgugaccacagagauccugccuguguccaugaccaagaccagcguggacugcaccauguacaucugcggcgauuccaccgagugcuccaaccugcugcugcaguacggcagcuucugcacccagcugaauagagcccugacagggaucgccguggaacaggacaagaacacccaagagguguucgcccaagugaagcagaucuacaagaccccuccuaucaaggacuucggcggcuucaauuucagccagauucugcccgauccuagcaagcccagcaagcggagcuucaucgaggaccugcuguucaacaaagugacacuggccgacgccggcuucaucaagcaguauggcgauugucugggcgacauugccgccagggaucugauuugcgcccagaaguuuaacggacugacagugcugccuccucugcugaccgaugagaugaucgcccaguacacaucugcccugcuggccggcacaaucacaagcggcuggacauuuggagcaggcgccgcucugcagauccccuuugcuaugcagauggccuaccgguucaacggcaucggagugacccagaaugugcuguacgagaaccagaagcugaucgccaaccaguucaacagcgccaucggcaagauccaggacagccugagcagcacagcaagcgcccugggaaagcugcaggacguggucaaccagaaugcccaggcacugaacacccuggucaagcagcuguccuccaacuucggcgccaucagcucugugcugaacgauauccugagcagacuggacaaggucgaggccgaggugcagaucgacagacugaucacaggcagacugcagagccuccagacauacgugacccagcagcugaucagagccgccgagauuagagccucugccaaucuggccgccaccaagaugucugagugugugcugggccagagcaagagaguggacuuuugcggcaagggcuaccaccugaugagcuucccucagucugccccucacggcgugguguuucugcacgugacauaugugcccgcucaagagaagaauuucaccaccgcuccagccaucugccacgacggcaaagcccacuuuccuagagaaggcguguucguguccaacggcacccauugguucgugacacagcggaacuucuacgagccccagaucaucaccaccgacaacaccuucgugucuggcaacugcgacgucgugaucggcauugugaacaauaccguguacgacccucugcagcccgagcuggacagcuucaaagaggaacuggacaaguacuuuaagaaccacacaagccccgacguggaccugggcgauaucagcggaaucaaugccagcgucgugaacauccagaaagagaucgaccggcugaacgagguggccaagaaucugaacgagagccugaucgaccugcaagaacuggggaaguacgagcaguacaucaaguggcccugguacaucuggcugggcuuuaucgccggacugauugccaucgugauggucacaaucaugcuguguugcaugaccagcugcuguagcugccugaagggcuguuguagcuguggcagcugcugcaaguucgacgaggacgauucugagcccgugcugaagggcgugaaacugcacuacacaugaugacucgagcugguacugcaugcacgcaaugcuagcugccccuuucccguccuggguaccccgagucucccccgaccucgggucccagguaugcucccaccuccaccugccccacucaccaccucugcuaguuccagacaccucccaagcacgcagcaaugcagcucaaaacgcuuagccuagccacacccccacgggaaacagcagugauuaaccuuuagcaauaaacgaaaguuuaacuaagcuauacuaaccccaggguuggucaauuucgugccagccacacccuggagcuagcaaaaaaaaaaaaaaaaaaaaaaaaaaaaaaaaaaaaaaaaaaaaaaaaaaaaaaaaaaaaaaaaaaaaaaaaaaaaaaaaaaaaaaaaaaaaaaaaaaaa

SEQ ID NO: 26363 - RNA, 4273 nt, Artificial Sequence
  SARS-CoV-2/Wuhan/WIV05/2019__EPI_ISL_402128 spike protein mRNA gc mod (1-1273)(S477N_D614G)
agaauaaacuaguauucuucugguccccacagacucagagagaacccgccaccauguucguguuccuggugcugcugccucugguguccagccagugugugaaccugaccaccagaacacagcugccuccagccuacaccaacagcuuuaccagaggcguguacuaccccgacaagguguucagauccagcgugcugcacucuacccaggaccuguuccugccuuucuucagcaacgugaccugguuccacgccauccacguguccggcaccaauggcaccaagagauucgacaaccccgugcugcccuucaacgacgggguguacuuugccagcaccgagaaguccaacaucaucagaggcuggaucuucggcaccacacuggacagcaagacccagagccugcugaucgugaacaacgccaccaacguggucaucaaagugugcgaguuccaguucugcaacgaccccuuccugggcgucuacuaccacaagaacaacaagagcuggauggaaagcgaguuccggguguacagcagcgccaacaacugcaccuucgaguacgugucccagccuuuccugauggaccuggaaggcaagcagggcaacuucaagaaccugcgcgaguucguguuuaagaacaucgacggcuacuucaagaucuacagcaagcacaccccuaucaaccucgugcgggaucugccucagggcuucucugcucuggaaccccugguggaucugcccaucggcaucaacaucacccgguuucagacacugcuggcccugcacagaagcuaccugacaccuggcgauagcagcagcggauggacagcuggugccgccgcuuacuaugugggcuaccugcagccuagaaccuuccugcugaaguacaacgagaacggcaccaucaccgacgccguggauugugcucuggauccucugagcgagacaaagugcacccugaaguccuucaccguggaaaagggcaucuaccagaccagcaacuuccgggugcagcccaccgaauccaucgugcgguuccccaauaucaccaaucugugccccuucggcgagguguucaaugccaccagauucgccucuguguacgccuggaaccggaagcggaucagcaauugcguggccgacuacuccgugcuguacaacuccgccagcuucagcaccuucaagugcuacggcguguccccuaccaagcugaacgaccugugcuucacaaacguguacgccgacagcuucgugauccggggagaugaagugcggcagauugccccuggacagacaggcaagaucgccgacuacaacuacaagcugcccgacgacuucaccggcugugugauugccuggaacagcaacaaccuggacuccaaagucggcggcaacuacaauuaccuguaccggcuguuccggaaguccaaucugaagcccuucgagcgggacaucuccaccgagaucuaucaggccggcaacaccccuuguaacggcguggaaggcuucaacugcuacuucccacugcaguccuacggcuuucagcccacaaauggcgugggcuaucagcccuacagagugguggugcugagcuucgaacugcugcaugccccugccacagugugcggcccuaagaaaagcaccaaucucgugaagaacaaaugcgugaacuucaacuucaacggccugaccggcaccggcgugcugacagagagcaacaagaaguuccugccauuccagcaguuuggccgggauaucgccgauaccacagacgccguuagagauccccagacacuggaaauccuggacaucaccccuugcagcuucggcggagugucugugaucaccccuggcaccaacaccagcaaucagguggcagugcuguaccagggcgugaacuguaccgaagugcccguggccauucacgccgaucagcugacaccuacauggcggguguacuccaccggcagcaauguguuucagaccagagccggcugucugaucggagccgagcacgugaacaauagcuacgagugcgacauccccaucggcgcuggaaucugcgccagcuaccagacacagacaaacagcccucggagagccagaagcguggccagccagagcaucauugccuacacaaugucucugggcgccgagaacagcguggccuacuccaacaacucuaucgcuauccccaccaacuucaccaucagcgugaccacagagauccugccuguguccaugaccaagaccagcguggacugcaccauguacaucugcggcgauuccaccgagugcuccaaccugcugcugcaguacggcagcuucugcacccagcugaauagagcccugacagggaucgccguggaacaggacaagaacacccaagagguguucgcccaagugaagcagaucuacaagaccccuccuaucaaggacuucggcggcuucaauuucagccagauucugcccgauccuagcaagcccagcaagcggagcuucaucgaggaccugcuguucaacaaagugacacuggccgacgccggcuucaucaagcaguauggcgauugucugggcgacauugccgccagggaucugauuugcgcccagaaguuuaacggacugacagugcugccuccucugcugaccgaugagaugaucgcccaguacacaucugcccugcuggccggcacaaucacaagcggcuggacauuuggagcaggcgccgcucugcagauccccuuugcuaugcagauggccuaccgguucaacggcaucggagugacccagaaugugcuguacgagaaccagaagcugaucgccaaccaguucaacagcgccaucggcaagauccaggacagccugagcagcacagcaagcgcccugggaaagcugcaggacguggucaaccagaaugcccaggcacugaacacccuggucaagcagcuguccuccaacuucggcgccaucagcucugugcugaacgauauccugagcagacuggacaaggucgaggccgaggugcagaucgacagacugaucacaggcagacugcagagccuccagacauacgugacccagcagcugaucagagccgccgagauuagagccucugccaaucuggccgccaccaagaugucugagugugugcugggccagagcaagagaguggacuuuugcggcaagggcuaccaccugaugagcuucccucagucugccccucacggcgugguguuucugcacgugacauaugugcccgcucaagagaagaauuucaccaccgcuccagccaucugccacgacggcaaagcccacuuuccuagagaaggcguguucguguccaacggcacccauugguucgugacacagcggaacuucuacgagccccagaucaucaccaccgacaacaccuucgugucuggcaacugcgacgucgugaucggcauugugaacaauaccguguacgacccucugcagcccgagcuggacagcuucaaagaggaacuggacaaguacuuuaagaaccacacaagccccgacguggaccugggcgauaucagcggaaucaaugccagcgucgugaacauccagaaagagaucgaccggcugaacgagguggccaagaaucugaacgagagccugaucgaccugcaagaacuggggaaguacgagcaguacaucaaguggcccugguacaucuggcugggcuuuaucgccggacugauugccaucgugauggucacaaucaugcuguguugcaugaccagcugcuguagcugccugaagggcuguuguagcuguggcagcugcugcaaguucgacgaggacgauucugagcccgugcugaagggcgugaaacugcacuacacaugaugacucgagcugguacugcaugcacgcaaugcuagcugccccuuucccguccuggguaccccgagucucccccgaccucgggucccagguaugcucccaccuccaccugccccacucaccaccucugcuaguuccagacaccucccaagcacgcagcaaugcagcucaaaacgcuuagccuagccacacccccacgggaaacagcagugauuaaccuuuagcaauaaacgaaaguuuaacuaagcuauacuaaccccaggguuggucaauuucgugccagccacacccuggagcuagcaaaaaaaaaaaaaaaaaaaaaaaaaaaaaaaaaaaaaaaaaaaaaaaaaaaaaaaaaaaaaaaaaaaaaaaaaaaaaaaaaaaaaaaaaaaaaaaaaaaa

SEQ ID NO: 26364 - RNA, 4273 nt, Artificial Sequence
  SARS-CoV-2/Wuhan/WIV05/2019__EPI_ISL_402128 spike protein mRNA gc mod (1-1273)(N501Y_D614G)
agaauaaacuaguauucuucugguccccacagacucagagagaacccgccaccauguucguguuccuggugcugcugccucugguguccagccagugugugaaccugaccaccagaacacagcugccuccagccuacaccaacagcuuuaccagaggcguguacuaccccgacaagguguucagauccagcgugcugcacucuacccaggaccuguuccugccuuucuucagcaacgugaccugguuccacgccauccacguguccggcaccaauggcaccaagagauucgacaaccccgugcugcccuucaacgacgggguguacuuugccagcaccgagaaguccaacaucaucagaggcuggaucuucggcaccacacuggacagcaagacccagagccugcugaucgugaacaacgccaccaacguggucaucaaagugugcgaguuccaguucugcaacgaccccuuccugggcgucuacuaccacaagaacaacaagagcuggauggaaagcgaguuccggguguacagcagcgccaacaacugcaccuucgaguacgugucccagccuuuccugauggaccuggaaggcaagcagggcaacuucaagaaccugcgcgaguucguguuuaagaacaucgacggcuacuucaagaucuacagcaagcacaccccuaucaaccucgugcgggaucugccucagggcuucucugcucuggaaccccugguggaucugcccaucggcaucaacaucacccgguuucagacacugcuggcccugcacagaagcuaccugacaccuggcgauagcagcagcggauggacagcuggugccgccgcuuacuaugugggcuaccugcagccuagaaccuuccugcugaaguacaacgagaacggcaccaucaccgacgccguggauugugcucuggauccucugagcgagacaaagugcacccugaaguccuucaccguggaaaagggcaucuaccagaccagcaacuuccgggugcagcccaccgaauccaucgugcgguuccccaauaucaccaaucugugccccuucggcgagguguucaaugccaccagauucgccucuguguacgccuggaaccggaagcggaucagcaauugcguggccgacuacuccgugcuguacaacuccgccagcuucagcaccuucaagugcuacggcguguccccuaccaagcugaacgaccugugcuucacaaacguguacgccgacagcuucgugauccggggagaugaagugcggcagauugccccuggacagacaggcaagaucgccgacuacaacuacaagcugcccgacgacuucaccggcugugugauugccuggaacagcaacaaccuggacuccaaagucggcggcaacuacaauuaccuguaccggcuguuccggaaguccaaucugaagcccuucgagcgggacaucuccaccgagaucuaucaggccggcagcaccccuuguaacggcguggaaggcuucaacugcuacuucccacugcaguccuacggcuuucagcccacauacggcgugggcuaucagcccuacagagugguggugcugagcuucgaacugcugcaugccccugccacagugugcggcccuaagaaaagcaccaaucucgugaagaacaaaugcgugaacuucaacuucaacggccugaccggcaccggcgugcugacagagagcaacaagaaguuccugccauuccagcaguuuggccgggauaucgccgauaccacagacgccguuagagauccccagacacuggaaauccuggacaucaccccuugcagcuucggcggagugucugugaucaccccuggcaccaacaccagcaaucagguggcagugcuguaccagggcgugaacuguaccgaagugcccguggccauucacgccgaucagcugacaccuacauggcggguguacuccaccggcagcaauguguuucagaccagagccggcugucugaucggagccgagcacgugaacaauagcuacgagugcgacauccccaucggcgcuggaaucugcgccagcuaccagacacagacaaacagcccucggagagccagaagcguggccagccagagcaucauugccuacacaaugucucugggcgccgagaacagcguggccuacuccaacaacucuaucgcuauccccaccaacuucaccaucagcgugaccacagagauccugccuguguccaugaccaagaccagcguggacugcaccauguacaucugcggcgauuccaccgagugcuccaaccugcugcugcaguacggcagcuucugcacccagcugaauagagcccugacagggaucgccguggaacaggacaagaacacccaagagguguucgcccaagugaagcagaucuacaagaccccuccuaucaaggacuucggcggcuucaauuucagccagauucugcccgauccuagcaagcccagcaagcggagcuucaucgaggaccugcuguucaacaaagugacacuggccgacgccggcuucaucaagcaguauggcgauugucugggcgacauugccgccagggaucugauuugcgcccagaaguuuaacggacugacagugcugccuccucugcugaccgaugagaugaucgcccaguacacaucugcccugcuggccggcacaaucacaagcggcuggacauuuggagcaggcgccgcucugcagauccccuuugcuaugcagauggccuaccgguucaacggcaucggagugacccagaaugugcuguacgagaaccagaagcugaucgccaaccaguucaacagcgccaucggcaagauccaggacagccugagcagcacagcaagcgcccugggaaagcugcaggacguggucaaccagaaugcccaggcacugaacacccuggucaagcagcuguccuccaacuucggcgccaucagcucugugcugaacgauauccugagcagacuggacaaggucgaggccgaggugcagaucgacagacugaucacaggcagacugcagagccuccagacauacgugacccagcagcugaucagagccgccgagauuagagccucugccaaucuggccgccaccaagaugucugagugugugcugggccagagcaagagaguggacuuuugcggcaagggcuaccaccugaugagcuucccucagucugccccucacggcgugguguuucugcacgugacauaugugcccgcucaagagaagaauuucaccaccgcuccagccaucugccacgacggcaaagcccacuuuccuagagaaggcguguucguguccaacggcacccauugguucgugacacagcggaacuucuacgagccccagaucaucaccaccgacaacaccuucgugucuggcaacugcgacgucgugaucggcauugugaacaauaccguguacgacccucugcagcccgagcuggacagcuucaaagaggaacuggacaaguacuuuaagaaccacacaagccccgacguggaccugggcgauaucagcggaaucaaugccagcgucgugaacauccagaaagagaucgaccggcugaacgagguggccaagaaucugaacgagagccugaucgaccugcaagaacuggggaaguacgagcaguacaucaaguggcccugguacaucuggcugggcuuuaucgccggacugauugccaucgugauggucacaaucaugcuguguugcaugaccagcugcuguagcugccugaagggcuguuguagcuguggcagcugcugcaaguucgacgaggacgauucugagcccgugcugaagggcgugaaacugcacuacacaugaugacucgagcugguacugcaugcacgcaaugcuagcugccccuuucccguccuggguaccccgagucucccccgaccucgggucccagguaugcucccaccuccaccugccccacucaccaccucugcuaguuccagacaccucccaagcacgcagcaaugcagcucaaaacgcuuagccuagccacacccccacgggaaacagcagugauuaaccuuuagcaauaaacgaaaguuuaacuaagcuauacuaaccccaggguuggucaauuucgugccagccacacccuggagcuagcaaaaaaaaaaaaaaaaaaaaaaaaaaaaaaaaaaaaaaaaaaaaaaaaaaaaaaaaaaaaaaaaaaaaaaaaaaaaaaaaaaaaaaaaaaaaaaaaaaaa

SEQ ID NO: 26365 - RNA, 4267 nt, Artificial Sequence
  SARS-CoV-2/Wuhan/WIV05/2019__EPI_ISL_402128 spike protein mRNA gc mod (1-1273)(H69del_V70del_D614G)
agaauaaacuaguauucuucugguccccacagacucagagagaacccgccaccauguucguguuccuggugcugcugccucugguguccagccagugugugaaccugaccaccagaacacagcugccuccagccuacaccaacagcuuuaccagaggcguguacuaccccgacaagguguucagauccagcgugcugcacucuacccaggaccuguuccugccuuucuucagcaacgugaccugguuccacgccaucuccggcaccaauggcaccaagagauucgacaaccccgugcugcccuucaacgacgggguguacuuugccagcaccgagaaguccaacaucaucagaggcuggaucuucggcaccacacuggacagcaagacccagagccugcugaucgugaacaacgccaccaacguggucaucaaagugugcgaguuccaguucugcaacgaccccuuccugggcgucuacuaccacaagaacaacaagagcuggauggaaagcgaguuccggguguacagcagcgccaacaacugcaccuucgaguacgugucccagccuuuccugauggaccuggaaggcaagcagggcaacuucaagaaccugcgcgaguucguguuuaagaacaucgacggcuacuucaagaucuacagcaagcacaccccuaucaaccucgugcgggaucugccucagggcuucucugcucuggaaccccugguggaucugcccaucggcaucaacaucacccgguuucagacacugcuggcccugcacagaagcuaccugacaccuggcgauagcagcagcggauggacagcuggugccgccgcuuacuaugugggcuaccugcagccuagaaccuuccugcugaaguacaacgagaacggcaccaucaccgacgccguggauugugcucuggauccucugagcgagacaaagugcacccugaaguccuucaccguggaaaagggcaucuaccagaccagcaacuuccgggugcagcccaccgaauccaucgugcgguuccccaauaucaccaaucugugccccuucggcgagguguucaaugccaccagauucgccucuguguacgccuggaaccggaagcggaucagcaauugcguggccgacuacuccgugcuguacaacuccgccagcuucagcaccuucaagugcuacggcguguccccuaccaagcugaacgaccugugcuucacaaacguguacgccgacagcuucgugauccggggagaugaagugcggcagauugccccuggacagacaggcaagaucgccgacuacaacuacaagcugcccgacgacuucaccggcugugugauugccuggaacagcaacaaccuggacuccaaagucggcggcaacuacaauuaccuguaccggcuguuccggaaguccaaucugaagcccuucgagcgggacaucuccaccgagaucuaucaggccggcagcaccccuuguaacggcguggaaggcuucaacugcuacuucccacugcaguccuacggcuuucagcccacaaauggcgugggcuaucagcccuacagagugguggugcugagcuucgaacugcugcaugccccugccacagugugcggcccuaagaaaagcaccaaucucgugaagaacaaaugcgugaacuucaacuucaacggccugaccggcaccggcgugcugacagagagcaacaagaaguuccugccauuccagcaguuuggccgggauaucgccgauaccacagacgccguuagagauccccagacacuggaaauccuggacaucaccccuugcagcuucggcggagugucugugaucaccccuggcaccaacaccagcaaucagguggcagugcuguaccagggcgugaacuguaccgaagugcccguggccauucacgccgaucagcugacaccuacauggcggguguacuccaccggcagcaauguguuucagaccagagccggcugucugaucggagccgagcacgugaacaauagcuacgagugcgacauccccaucggcgcuggaaucugcgccagcuaccagacacagacaaacagcccucggagagccagaagcguggccagccagagcaucauugccuacacaaugucucugggcgccgagaacagcguggccuacuccaacaacucuaucgcuauccccaccaacuucaccaucagcgugaccacagagauccugccuguguccaugaccaagaccagcguggacugcaccauguacaucugcggcgauuccaccgagugcuccaaccugcugcugcaguacggcagcuucugcacccagcugaauagagcccugacagggaucgccguggaacaggacaagaacacccaagagguguucgcccaagugaagcagaucuacaagaccccuccuaucaaggacuucggcggcuucaauuucagccagauucugcccgauccuagcaagcccagcaagcggagcuucaucgaggaccugcuguucaacaaagugacacuggccgacgccggcuucaucaagcaguauggcgauugucugggcgacauugccgccagggaucugauuugcgcccagaaguuuaacggacugacagugcugccuccucugcugaccgaugagaugaucgcccaguacacaucugcccugcuggccggcacaaucacaagcggcuggacauuuggagcaggcgccgcucugcagauccccuuugcuaugcagauggccuaccgguucaacggcaucggagugacccagaaugugcuguacgagaaccagaagcugaucgccaaccaguucaacagcgccaucggcaagauccaggacagccugagcagcacagcaagcgcccugggaaagcugcaggacguggucaaccagaaugcccaggcacugaacacccuggucaagcagcuguccuccaacuucggcgccaucagcucugugcugaacgauauccugagcagacuggacaaggucgaggccgaggugcagaucgacagacugaucacaggcagacugcagagccuccagacauacgugacccagcagcugaucagagccgccgagauuagagccucugccaaucuggccgccaccaagaugucugagugugugcugggccagagcaagagaguggacuuuugcggcaagggcuaccaccugaugagcuucccucagucugccccucacggcgugguguuucugcacgugacauaugugcccgcucaagagaagaauuucaccaccgcuccagccaucugccacgacggcaaagcccacuuuccuagagaaggcguguucguguccaacggcacccauugguucgugacacagcggaacuucuacgagccccagaucaucaccaccgacaacaccuucgugucuggcaacugcgacgucgugaucggcauugugaacaauaccguguacgacccucugcagcccgagcuggacagcuucaaagaggaacuggacaaguacuuuaagaaccacacaagccccgacguggaccugggcgauaucagcggaaucaaugccagcgucgugaacauccagaaagagaucgaccggcugaacgagguggccaagaaucugaacgagagccugaucgaccugcaagaacuggggaaguacgagcaguacaucaaguggcccugguacaucuggcugggcuuuaucgccggacugauugccaucgugauggucacaaucaugcuguguugcaugaccagcugcuguagcugccugaagggcuguuguagcuguggcagcugcugcaaguucgacgaggacgauucugagcccgugcugaagggcgugaaacugcacuacacaugaugacucgagcugguacugcaugcacgcaaugcuagcugccccuuucccguccuggguaccccgagucucccccgaccucgggucccagguaugcucccaccuccaccugccccacucaccaccucugcuaguuccagacaccucccaagcacgcagcaaugcagcucaaaacgcuuagccuagccacacccccacgggaaacagcagugauuaaccuuuagcaauaaacgaaaguuuaacuaagcuauacuaaccccaggguuggucaauuucgugccagccacacccuggagcuagcaaaaaaaaaaaaaaaaaaaaaaaaaaaaaaaaaaaaaaaaaaaaaaaaaaaaaaaaaaaaaaaaaaaaaaaaaaaaaaaaaaaaaaaaaaaaaaaaaaaa

SEQ ID NO: 26366 - RNA, 4273 nt, Artificial Sequence
  SARS-CoV-2/Wuhan/WIV05/2019__EPI_ISL_402128 spike protein mRNA gc mod (1-1273)(Y453F_D614G)
agaauaaacuaguauucuucugguccccacagacucagagagaacccgccaccauguucguguuccuggugcugcugccucugguguccagccagugugugaaccugaccaccagaacacagcugccuccagccuacaccaacagcuuuaccagaggcguguacuaccccgacaagguguucagauccagcgugcugcacucuacccaggaccuguuccugccuuucuucagcaacgugaccugguuccacgccauccacguguccggcaccaauggcaccaagagauucgacaaccccgugcugcccuucaacgacgggguguacuuugccagcaccgagaaguccaacaucaucagaggcuggaucuucggcaccacacuggacagcaagacccagagccugcugaucgugaacaacgccaccaacguggucaucaaagugugcgaguuccaguucugcaacgaccccuuccugggcgucuacuaccacaagaacaacaagagcuggauggaaagcgaguuccggguguacagcagcgccaacaacugcaccuucgaguacgugucccagccuuuccugauggaccuggaaggcaagcagggcaacuucaagaaccugcgcgaguucguguuuaagaacaucgacggcuacuucaagaucuacagcaagcacaccccuaucaaccucgugcgggaucugccucagggcuucucugcucuggaaccccugguggaucugcccaucggcaucaacaucacccgguuucagacacugcuggcccugcacagaagcuaccugacaccuggcgauagcagcagcggauggacagcuggugccgccgcuuacuaugugggcuaccugcagccuagaaccuuccugcugaaguacaacgagaacggcaccaucaccgacgccguggauugugcucuggauccucugagcgagacaaagugcacccugaaguccuucaccguggaaaagggcaucuaccagaccagcaacuuccgggugcagcccaccgaauccaucgugcgguuccccaauaucaccaaucugugccccuucggcgagguguucaaugccaccagauucgccucuguguacgccuggaaccggaagcggaucagcaauugcguggccgacuacuccgugcuguacaacuccgccagcuucagcaccuucaagugcuacggcguguccccuaccaagcugaacgaccugugcuucacaaacguguacgccgacagcuucgugauccggggagaugaagugcggcagauugccccuggacagacaggcaagaucgccgacuacaacuacaagcugcccgacgacuucaccggcugugugauugccuggaacagcaacaaccuggacuccaaagucggcggcaacuacaauuaccuguuccggcuguuccggaaguccaaucugaagcccuucgagcgggacaucuccaccgagaucuaucaggccggcagcaccccuuguaacggcguggaaggcuucaacugcuacuucccacugcaguccuacggcuuucagcccacaaauggcgugggcuaucagcccuacagagugguggugcugagcuucgaacugcugcaugccccugccacagugugcggcccuaagaaaagcaccaaucucgugaagaacaaaugcgugaacuucaacuucaacggccugaccggcaccggcgugcugacagagagcaacaagaaguuccugccauuccagcaguuuggccgggauaucgccgauaccacagacgccguuagagauccccagacacuggaaauccuggacaucaccccuugcagcuucggcggagugucugugaucaccccuggcaccaacaccagcaaucagguggcagugcuguaccagggcgugaacuguaccgaagugcccguggccauucacgccgaucagcugacaccuacauggcggguguacuccaccggcagcaauguguuucagaccagagccggcugucugaucggagccgagcacgugaacaauagcuacgagugcgacauccccaucggcgcuggaaucugcgccagcuaccagacacagacaaacagcccucggagagccagaagcguggccagccagagcaucauugccuacacaaugucucugggcgccgagaacagcguggccuacuccaacaacucuaucgcuauccccaccaacuucaccaucagcgugaccacagagauccugccuguguccaugaccaagaccagcguggacugcaccauguacaucugcggcgauuccaccgagugcuccaaccugcugcugcaguacggcagcuucugcacccagcugaauagagcccugacagggaucgccguggaacaggacaagaacacccaagagguguucgcccaagugaagcagaucuacaagaccccuccuaucaaggacuucggcggcuucaauuucagccagauucugcccgauccuagcaagcccagcaagcggagcuucaucgaggaccugcuguucaacaaagugacacuggccgacgccggcuucaucaagcaguauggcgauugucugggcgacauugccgccagggaucugauuugcgcccagaaguuuaacggacugacagugcugccuccucugcugaccgaugagaugaucgcccaguacacaucugcccugcuggccggcacaaucacaagcggcuggacauuuggagcaggcgccgcucugcagauccccuuugcuaugcagauggccuaccgguucaacggcaucggagugacccagaaugugcuguacgagaaccagaagcugaucgccaaccaguucaacagcgccaucggcaagauccaggacagccugagcagcacagcaagcgcccugggaaagcugcaggacguggucaaccagaaugcccaggcacugaacacccuggucaagcagcuguccuccaacuucggcgccaucagcucugugcugaacgauauccugagcagacuggacaaggucgaggccgaggugcagaucgacagacugaucacaggcagacugcagagccuccagacauacgugacccagcagcugaucagagccgccgagauuagagccucugccaaucuggccgccaccaagaugucugagugugugcugggccagagcaagagaguggacuuuugcggcaagggcuaccaccugaugagcuucccucagucugccccucacggcgugguguuucugcacgugacauaugugcccgcucaagagaagaauuucaccaccgcuccagccaucugccacgacggcaaagcccacuuuccuagagaaggcguguucguguccaacggcacccauugguucgugacacagcggaacuucuacgagccccagaucaucaccaccgacaacaccuucgugucuggcaacugcgacgucgugaucggcauugugaacaauaccguguacgacccucugcagcccgagcuggacagcuucaaagaggaacuggacaaguacuuuaagaaccacacaagccccgacguggaccugggcgauaucagcggaaucaaugccagcgucgugaacauccagaaagagaucgaccggcugaacgagguggccaagaaucugaacgagagccugaucgaccugcaagaacuggggaaguacgagcaguacaucaaguggcccugguacaucuggcugggcuuuaucgccggacugauugccaucgugauggucacaaucaugcuguguugcaugaccagcugcuguagcugccugaagggcuguuguagcuguggcagcugcugcaaguucgacgaggacgauucugagcccgugcugaagggcgugaaacugcacuacacaugaugacucgagcugguacugcaugcacgcaaugcuagcugccccuuucccguccuggguaccccgagucucccccgaccucgggucccagguaugcucccaccuccaccugccccacucaccaccucugcuaguuccagacaccucccaagcacgcagcaaugcagcucaaaacgcuuagccuagccacacccccacgggaaacagcagugauuaaccuuuagcaauaaacgaaaguuuaacuaagcuauacuaaccccaggguuggucaauuucgugccagccacacccuggagcuagcaaaaaaaaaaaaaaaaaaaaaaaaaaaaaaaaaaaaaaaaaaaaaaaaaaaaaaaaaaaaaaaaaaaaaaaaaaaaaaaaaaaaaaaaaaaaaaaaaaaa

SEQ ID NO: 26367 - RNA, 4273 nt, Artificial Sequence
  SARS-CoV-2/Wuhan/WIV05/2019__EPI_ISL_402128 spike protein mRNA gc mod (1-1273)(D614G_I692V)
agaauaaacuaguauucuucugguccccacagacucagagagaacccgccaccauguucguguuccuggugcugcugccucugguguccagccagugugugaaccugaccaccagaacacagcugccuccagccuacaccaacagcuuuaccagaggcguguacuaccccgacaagguguucagauccagcgugcugcacucuacccaggaccuguuccugccuuucuucagcaacgugaccugguuccacgccauccacguguccggcaccaauggcaccaagagauucgacaaccccgugcugcccuucaacgacgggguguacuuugccagcaccgagaaguccaacaucaucagaggcuggaucuucggcaccacacuggacagcaagacccagagccugcugaucgugaacaacgccaccaacguggucaucaaagugugcgaguuccaguucugcaacgaccccuuccugggcgucuacuaccacaagaacaacaagagcuggauggaaagcgaguuccggguguacagcagcgccaacaacugcaccuucgaguacgugucccagccuuuccugauggaccuggaaggcaagcagggcaacuucaagaaccugcgcgaguucguguuuaagaacaucgacggcuacuucaagaucuacagcaagcacaccccuaucaaccucgugcgggaucugccucagggcuucucugcucuggaaccccugguggaucugcccaucggcaucaacaucacccgguuucagacacugcuggcccugcacagaagcuaccugacaccuggcgauagcagcagcggauggacagcuggugccgccgcuuacuaugugggcuaccugcagccuagaaccuuccugcugaaguacaacgagaacggcaccaucaccgacgccguggauugugcucuggauccucugagcgagacaaagugcacccugaaguccuucaccguggaaaagggcaucuaccagaccagcaacuuccgggugcagcccaccgaauccaucgugcgguuccccaauaucaccaaucugugccccuucggcgagguguucaaugccaccagauucgccucuguguacgccuggaaccggaagcggaucagcaauugcguggccgacuacuccgugcuguacaacuccgccagcuucagcaccuucaagugcuacggcguguccccuaccaagcugaacgaccugugcuucacaaacguguacgccgacagcuucgugauccggggagaugaagugcggcagauugccccuggacagacaggcaagaucgccgacuacaacuacaagcugcccgacgacuucaccggcugugugauugccuggaacagcaacaaccuggacuccaaagucggcggcaacuacaauuaccuguaccggcuguuccggaaguccaaucugaagcccuucgagcgggacaucuccaccgagaucuaucaggccggcagcaccccuuguaacggcguggaaggcuucaacugcuacuucccacugcaguccuacggcuuucagcccacaaauggcgugggcuaucagcccuacagagugguggugcugagcuucgaacugcugcaugccccugccacagugugcggcccuaagaaaagcaccaaucucgugaagaacaaaugcgugaacuucaacuucaacggccugaccggcaccggcgugcugacagagagcaacaagaaguuccugccauuccagcaguuuggccgggauaucgccgauaccacagacgccguuagagauccccagacacuggaaauccuggacaucaccccuugcagcuucggcggagugucugugaucaccccuggcaccaacaccagcaaucagguggcagugcuguaccagggcgugaacuguaccgaagugcccguggccauucacgccgaucagcugacaccuacauggcggguguacuccaccggcagcaauguguuucagaccagagccggcugucugaucggagccgagcacgugaacaauagcuacgagugcgacauccccaucggcgcuggaaucugcgccagcuaccagacacagacaaacagcccucggagagccagaagcguggccagccagagcgugauugccuacacaaugucucugggcgccgagaacagcguggccuacuccaacaacucuaucgcuauccccaccaacuucaccaucagcgugaccacagagauccugccuguguccaugaccaagaccagcguggacugcaccauguacaucugcggcgauuccaccgagugcuccaaccugcugcugcaguacggcagcuucugcacccagcugaauagagcccugacagggaucgccguggaacaggacaagaacacccaagagguguucgcccaagugaagcagaucuacaagaccccuccuaucaaggacuucggcggcuucaauuucagccagauucugcccgauccuagcaagcccagcaagcggagcuucaucgaggaccugcuguucaacaaagugacacuggccgacgccggcuucaucaagcaguauggcgauugucugggcgacauugccgccagggaucugauuugcgcccagaaguuuaacggacugacagugcugccuccucugcugaccgaugagaugaucgcccaguacacaucugcccugcuggccggcacaaucacaagcggcuggacauuuggagcaggcgccgcucugcagauccccuuugcuaugcagauggccuaccgguucaacggcaucggagugacccagaaugugcuguacgagaaccagaagcugaucgccaaccaguucaacagcgccaucggcaagauccaggacagccugagcagcacagcaagcgcccugggaaagcugcaggacguggucaaccagaaugcccaggcacugaacacccuggucaagcagcuguccuccaacuucggcgccaucagcucugugcugaacgauauccugagcagacuggacaaggucgaggccgaggugcagaucgacagacugaucacaggcagacugcagagccuccagacauacgugacccagcagcugaucagagccgccgagauuagagccucugccaaucuggccgccaccaagaugucugagugugugcugggccagagcaagagaguggacuuuugcggcaagggcuaccaccugaugagcuucccucagucugccccucacggcgugguguuucugcacgugacauaugugcccgcucaagagaagaauuucaccaccgcuccagccaucugccacgacggcaaagcccacuuuccuagagaaggcguguucguguccaacggcacccauugguucgugacacagcggaacuucuacgagccccagaucaucaccaccgacaacaccuucgugucuggcaacugcgacgucgugaucggcauugugaacaauaccguguacgacccucugcagcccgagcuggacagcuucaaagaggaacuggacaaguacuuuaagaaccacacaagccccgacguggaccugggcgauaucagcggaaucaaugccagcgucgugaacauccagaaagagaucgaccggcugaacgagguggccaagaaucugaacgagagccugaucgaccugcaagaacuggggaaguacgagcaguacaucaaguggcccugguacaucuggcugggcuuuaucgccggacugauugccaucgugauggucacaaucaugcuguguugcaugaccagcugcuguagcugccugaagggcuguuguagcuguggcagcugcugcaaguucgacgaggacgauucugagcccgugcugaagggcgugaaacugcacuacacaugaugacucgagcugguacugcaugcacgcaaugcuagcugccccuuucccguccuggguaccccgagucucccccgaccucgggucccagguaugcucccaccuccaccugccccacucaccaccucugcuaguuccagacaccucccaagcacgcagcaaugcagcucaaaacgcuuagccuagccacacccccacgggaaacagcagugauuaaccuuuagcaauaaacgaaaguuuaacuaagcuauacuaaccccaggguuggucaauuucgugccagccacacccuggagcuagcaaaaaaaaaaaaaaaaaaaaaaaaaaaaaaaaaaaaaaaaaaaaaaaaaaaaaaaaaaaaaaaaaaaaaaaaaaaaaaaaaaaaaaaaaaaaaaaaaaaa

SEQ ID NO: 26368 - RNA, 4273 nt, Artificial Sequence
  SARS-CoV-2/Wuhan/WIV05/2019__EPI_ISL_402128 spike protein mRNA gc mod (1-1273)(D614G_M1229I)
agaauaaacuaguauucuucugguccccacagacucagagagaacccgccaccauguucguguuccuggugcugcugccucugguguccagccagugugugaaccugaccaccagaacacagcugccuccagccuacaccaacagcuuuaccagaggcguguacuaccccgacaagguguucagauccagcgugcugcacucuacccaggaccuguuccugccuuucuucagcaacgugaccugguuccacgccauccacguguccggcaccaauggcaccaagagauucgacaaccccgugcugcccuucaacgacgggguguacuuugccagcaccgagaaguccaacaucaucagaggcuggaucuucggcaccacacuggacagcaagacccagagccugcugaucgugaacaacgccaccaacguggucaucaaagugugcgaguuccaguucugcaacgaccccuuccugggcgucuacuaccacaagaacaacaagagcuggauggaaagcgaguuccggguguacagcagcgccaacaacugcaccuucgaguacgugucccagccuuuccugauggaccuggaaggcaagcagggcaacuucaagaaccugcgcgaguucguguuuaagaacaucgacggcuacuucaagaucuacagcaagcacaccccuaucaaccucgugcgggaucugccucagggcuucucugcucuggaaccccugguggaucugcccaucggcaucaacaucacccgguuucagacacugcuggcccugcacagaagcuaccugacaccuggcgauagcagcagcggauggacagcuggugccgccgcuuacuaugugggcuaccugcagccuagaaccuuccugcugaaguacaacgagaacggcaccaucaccgacgccguggauugugcucuggauccucugagcgagacaaagugcacccugaaguccuucaccguggaaaagggcaucuaccagaccagcaacuuccgggugcagcccaccgaauccaucgugcgguuccccaauaucaccaaucugugccccuucggcgagguguucaaugccaccagauucgccucuguguacgccuggaaccggaagcggaucagcaauugcguggccgacuacuccgugcuguacaacuccgccagcuucagcaccuucaagugcuacggcguguccccuaccaagcugaacgaccugugcuucacaaacguguacgccgacagcuucgugauccggggagaugaagugcggcagauugccccuggacagacaggcaagaucgccgacuacaacuacaagcugcccgacgacuucaccggcugugugauugccuggaacagcaacaaccuggacuccaaagucggcggcaacuacaauuaccuguaccggcuguuccggaaguccaaucugaagcccuucgagcgggacaucuccaccgagaucuaucaggccggcagcaccccuuguaacggcguggaaggcuucaacugcuacuucccacugcaguccuacggcuuucagcccacaaauggcgugggcuaucagcccuacagagugguggugcugagcuucgaacugcugcaugccccugccacagugugcggcccuaagaaaagcaccaaucucgugaagaacaaaugcgugaacuucaacuucaacggccugaccggcaccggcgugcugacagagagcaacaagaaguuccugccauuccagcaguuuggccgggauaucgccgauaccacagacgccguuagagauccccagacacuggaaauccuggacaucaccccuugcagcuucggcggagugucugugaucaccccuggcaccaacaccagcaaucagguggcagugcuguaccagggcgugaacuguaccgaagugcccguggccauucacgccgaucagcugacaccuacauggcggguguacuccaccggcagcaauguguuucagaccagagccggcugucugaucggagccgagcacgugaacaauagcuacgagugcgacauccccaucggcgcuggaaucugcgccagcuaccagacacagacaaacagcccucggagagccagaagcguggccagccagagcaucauugccuacacaaugucucugggcgccgagaacagcguggccuacuccaacaacucuaucgcuauccccaccaacuucaccaucagcgugaccacagagauccugccuguguccaugaccaagaccagcguggacugcaccauguacaucugcggcgauuccaccgagugcuccaaccugcugcugcaguacggcagcuucugcacccagcugaauagagcccugacagggaucgccguggaacaggacaagaacacccaagagguguucgcccaagugaagcagaucuacaagaccccuccuaucaaggacuucggcggcuucaauuucagccagauucugcccgauccuagcaagcccagcaagcggagcuucaucgaggaccugcuguucaacaaagugacacuggccgacgccggcuucaucaagcaguauggcgauugucugggcgacauugccgccagggaucugauuugcgcccagaaguuuaacggacugacagugcugccuccucugcugaccgaugagaugaucgcccaguacacaucugcccugcuggccggcacaaucacaagcggcuggacauuuggagcaggcgccgcucugcagauccccuuugcuaugcagauggccuaccgguucaacggcaucggagugacccagaaugugcuguacgagaaccagaagcugaucgccaaccaguucaacagcgccaucggcaagauccaggacagccugagcagcacagcaagcgcccugggaaagcugcaggacguggucaaccagaaugcccaggcacugaacacccuggucaagcagcuguccuccaacuucggcgccaucagcucugugcugaacgauauccugagcagacuggacaaggucgaggccgaggugcagaucgacagacugaucacaggcagacugcagagccuccagacauacgugacccagcagcugaucagagccgccgagauuagagccucugccaaucuggccgccaccaagaugucugagugugugcugggccagagcaagagaguggacuuuugcggcaagggcuaccaccugaugagcuucccucagucugccccucacggcgugguguuucugcacgugacauaugugcccgcucaagagaagaauuucaccaccgcuccagccaucugccacgacggcaaagcccacuuuccuagagaaggcguguucguguccaacggcacccauugguucgugacacagcggaacuucuacgagccccagaucaucaccaccgacaacaccuucgugucuggcaacugcgacgucgugaucggcauugugaacaauaccguguacgacccucugcagcccgagcuggacagcuucaaagaggaacuggacaaguacuuuaagaaccacacaagccccgacguggaccugggcgauaucagcggaaucaaugccagcgucgugaacauccagaaagagaucgaccggcugaacgagguggccaagaaucugaacgagagccugaucgaccugcaagaacuggggaaguacgagcaguacaucaaguggcccugguacaucuggcugggcuuuaucgccggacugauugccaucgugaucgucacaaucaugcuguguugcaugaccagcugcuguagcugccugaagggcuguuguagcuguggcagcugcugcaaguucgacgaggacgauucugagcccgugcugaagggcgugaaacugcacuacacaugaugacucgagcugguacugcaugcacgcaaugcuagcugccccuuucccguccuggguaccccgagucucccccgaccucgggucccagguaugcucccaccuccaccugccccacucaccaccucugcuaguuccagacaccucccaagcacgcagcaaugcagcucaaaacgcuuagccuagccacacccccacgggaaacagcagugauuaaccuuuagcaauaaacgaaaguuuaacuaagcuauacuaaccccaggguuggucaauuucgugccagccacacccuggagcuagcaaaaaaaaaaaaaaaaaaaaaaaaaaaaaaaaaaaaaaaaaaaaaaaaaaaaaaaaaaaaaaaaaaaaaaaaaaaaaaaaaaaaaaaaaaaaaaaaaaaa

SEQ ID NO: 26369 - RNA, 4267 nt, Artificial Sequence
  SARS-CoV-2/Wuhan/WIV05/2019__EPI_ISL_402128 spike protein mRNA gc mod (1-1273)(H69del_V70del_A222V_Y453F_S477N_D614G_I692V)
agaauaaacuaguauucuucugguccccacagacucagagagaacccgccaccauguucguguuccuggugcugcugccucugguguccagccagugugugaaccugaccaccagaacacagcugccuccagccuacaccaacagcuuuaccagaggcguguacuaccccgacaagguguucagauccagcgugcugcacucuacccaggaccuguuccugccuuucuucagcaacgugaccugguuccacgccaucuccggcaccaauggcaccaagagauucgacaaccccgugcugcccuucaacgacgggguguacuuugccagcaccgagaaguccaacaucaucagaggcuggaucuucggcaccacacuggacagcaagacccagagccugcugaucgugaacaacgccaccaacguggucaucaaagugugcgaguuccaguucugcaacgaccccuuccugggcgucuacuaccacaagaacaacaagagcuggauggaaagcgaguuccggguguacagcagcgccaacaacugcaccuucgaguacgugucccagccuuuccugauggaccuggaaggcaagcagggcaacuucaagaaccugcgcgaguucguguuuaagaacaucgacggcuacuucaagaucuacagcaagcacaccccuaucaaccucgugcgggaucugccucagggcuucucugugcuggaaccccugguggaucugcccaucggcaucaacaucacccgguuucagacacugcuggcccugcacagaagcuaccugacaccuggcgauagcagcagcggauggacagcuggugccgccgcuuacuaugugggcuaccugcagccuagaaccuuccugcugaaguacaacgagaacggcaccaucaccgacgccguggauugugcucuggauccucugagcgagacaaagugcacccugaaguccuucaccguggaaaagggcaucuaccagaccagcaacuuccgggugcagcccaccgaauccaucgugcgguuccccaauaucaccaaucugugccccuucggcgagguguucaaugccaccagauucgccucuguguacgccuggaaccggaagcggaucagcaauugcguggccgacuacuccgugcuguacaacuccgccagcuucagcaccuucaagugcuacggcguguccccuaccaagcugaacgaccugugcuucacaaacguguacgccgacagcuucgugauccggggagaugaagugcggcagauugccccuggacagacaggcaagaucgccgacuacaacuacaagcugcccgacgacuucaccggcugugugauugccuggaacagcaacaaccuggacuccaaagucggcggcaacuacaauuaccuguuccggcuguuccggaaguccaaucugaagcccuucgagcgggacaucuccaccgagaucuaucaggccggcaacaccccuuguaacggcguggaaggcuucaacugcuacuucccacugcaguccuacggcuuucagcccacaaauggcgugggcuaucagcccuacagagugguggugcugagcuucgaacugcugcaugccccugccacagugugcggcccuaagaaaagcaccaaucucgugaagaacaaaugcgugaacuucaacuucaacggccugaccggcaccggcgugcugacagagagcaacaagaaguuccugccauuccagcaguuuggccgggauaucgccgauaccacagacgccguuagagauccccagacacuggaaauccuggacaucaccccuugcagcuucggcggagugucugugaucaccccuggcaccaacaccagcaaucagguggcagugcuguaccagggcgugaacuguaccgaagugcccguggccauucacgccgaucagcugacaccuacauggcggguguacuccaccggcagcaauguguuucagaccagagccggcugucugaucggagccgagcacgugaacaauagcuacgagugcgacauccccaucggcgcuggaaucugcgccagcuaccagacacagacaaacagcccucggagagccagaagcguggccagccagagcgugauugccuacacaaugucucugggcgccgagaacagcguggccuacuccaacaacucuaucgcuauccccaccaacuucaccaucagcgugaccacagagauccugccuguguccaugaccaagaccagcguggacugcaccauguacaucugcggcgauuccaccgagugcuccaaccugcugcugcaguacggcagcuucugcacccagcugaauagagcccugacagggaucgccguggaacaggacaagaacacccaagagguguucgcccaagugaagcagaucuacaagaccccuccuaucaaggacuucggcggcuucaauuucagccagauucugcccgauccuagcaagcccagcaagcggagcuucaucgaggaccugcuguucaacaaagugacacuggccgacgccggcuucaucaagcaguauggcgauugucugggcgacauugccgccagggaucugauuugcgcccagaaguuuaacggacugacagugcugccuccucugcugaccgaugagaugaucgcccaguacacaucugcccugcuggccggcacaaucacaagcggcuggacauuuggagcaggcgccgcucugcagauccccuuugcuaugcagauggccuaccgguucaacggcaucggagugacccagaaugugcuguacgagaaccagaagcugaucgccaaccaguucaacagcgccaucggcaagauccaggacagccugagcagcacagcaagcgcccugggaaagcugcaggacguggucaaccagaaugcccaggcacugaacacccuggucaagcagcuguccuccaacuucggcgccaucagcucugugcugaacgauauccugagcagacuggacaaggucgaggccgaggugcagaucgacagacugaucacaggcagacugcagagccuccagacauacgugacccagcagcugaucagagccgccgagauuagagccucugccaaucuggccgccaccaagaugucugagugugugcugggccagagcaagagaguggacuuuugcggcaagggcuaccaccugaugagcuucccucagucugccccucacggcgugguguuucugcacgugacauaugugcccgcucaagagaagaauuucaccaccgcuccagccaucugccacgacggcaaagcccacuuuccuagagaaggcguguucguguccaacggcacccauugguucgugacacagcggaacuucuacgagccccagaucaucaccaccgacaacaccuucgugucuggcaacugcgacgucgugaucggcauugugaacaauaccguguacgacccucugcagcccgagcuggacagcuucaaagaggaacuggacaaguacuuuaagaaccacacaagccccgacguggaccugggcgauaucagcggaaucaaugccagcgucgugaacauccagaaagagaucgaccggcugaacgagguggccaagaaucugaacgagagccugaucgaccugcaagaacuggggaaguacgagcaguacaucaaguggcccugguacaucuggcugggcuuuaucgccggacugauugccaucgugauggucacaaucaugcuguguugcaugaccagcugcuguagcugccugaagggcuguuguagcuguggcagcugcugcaaguucgacgaggacgauucugagcccgugcugaagggcgugaaacugcacuacacaugaugacucgagcugguacugcaugcacgcaaugcuagcugccccuuucccguccuggguaccccgagucucccccgaccucgggucccagguaugcucccaccuccaccugccccacucaccaccucugcuaguuccagacaccucccaagcacgcagcaaugcagcucaaaacgcuuagccuagccacacccccacgggaaacagcagugauuaaccuuuagcaauaaacgaaaguuuaacuaagcuauacuaaccccaggguuggucaauuucgugccagccacacccuggagcuagcaaaaaaaaaaaaaaaaaaaaaaaaaaaaaaaaaaaaaaaaaaaaaaaaaaaaaaaaaaaaaaaaaaaaaaaaaaaaaaaaaaaaaaaaaaaaaaaaaaaa

SEQ ID NO: 26370 - RNA, 4267 nt, Artificial Sequence
  SARS-CoV-2/Wuhan/WIV05/2019__EPI_ISL_402128 spike protein mRNA gc mod (1-1273)(H69del_V70del_Y453F_D614G_I692V_M1229I)
agaauaaacuaguauucuucugguccccacagacucagagagaacccgccaccauguucguguuccuggugcugcugccucugguguccagccagugugugaaccugaccaccagaacacagcugccuccagccuacaccaacagcuuuaccagaggcguguacuaccccgacaagguguucagauccagcgugcugcacucuacccaggaccuguuccugccuuucuucagcaacgugaccugguuccacgccaucuccggcaccaauggcaccaagagauucgacaaccccgugcugcccuucaacgacgggguguacuuugccagcaccgagaaguccaacaucaucagaggcuggaucuucggcaccacacuggacagcaagacccagagccugcugaucgugaacaacgccaccaacguggucaucaaagugugcgaguuccaguucugcaacgaccccuuccugggcgucuacuaccacaagaacaacaagagcuggauggaaagcgaguuccggguguacagcagcgccaacaacugcaccuucgaguacgugucccagccuuuccugauggaccuggaaggcaagcagggcaacuucaagaaccugcgcgaguucguguuuaagaacaucgacggcuacuucaagaucuacagcaagcacaccccuaucaaccucgugcgggaucugccucagggcuucucugcucuggaaccccugguggaucugcccaucggcaucaacaucacccgguuucagacacugcuggcccugcacagaagcuaccugacaccuggcgauagcagcagcggauggacagcuggugccgccgcuuacuaugugggcuaccugcagccuagaaccuuccugcugaaguacaacgagaacggcaccaucaccgacgccguggauugugcucuggauccucugagcgagacaaagugcacccugaaguccuucaccguggaaaagggcaucuaccagaccagcaacuuccgggugcagcccaccgaauccaucgugcgguuccccaauaucaccaaucugugccccuucggcgagguguucaaugccaccagauucgccucuguguacgccuggaaccggaagcggaucagcaauugcguggccgacuacuccgugcuguacaacuccgccagcuucagcaccuucaagugcuacggcguguccccuaccaagcugaacgaccugugcuucacaaacguguacgccgacagcuucgugauccggggagaugaagugcggcagauugccccuggacagacaggcaagaucgccgacuacaacuacaagcugcccgacgacuucaccggcugugugauugccuggaacagcaacaaccuggacuccaaagucggcggcaacuacaauuaccuguuccggcuguuccggaaguccaaucugaagcccuucgagcgggacaucuccaccgagaucuaucaggccggcagcaccccuuguaacggcguggaaggcuucaacugcuacuucccacugcaguccuacggcuuucagcccacaaauggcgugggcuaucagcccuacagagugguggugcugagcuucgaacugcugcaugccccugccacagugugcggcccuaagaaaagcaccaaucucgugaagaacaaaugcgugaacuucaacuucaacggccugaccggcaccggcgugcugacagagagcaacaagaaguuccugccauuccagcaguuuggccgggauaucgccgauaccacagacgccguuagagauccccagacacuggaaauccuggacaucaccccuugcagcuucggcggagugucugugaucaccccuggcaccaacaccagcaaucagguggcagugcuguaccagggcgugaacuguaccgaagugcccguggccauucacgccgaucagcugacaccuacauggcggguguacuccaccggcagcaauguguuucagaccagagccggcugucugaucggagccgagcacgugaacaauagcuacgagugcgacauccccaucggcgcuggaaucugcgccagcuaccagacacagacaaacagcccucggagagccagaagcguggccagccagagcgugauugccuacacaaugucucugggcgccgagaacagcguggccuacuccaacaacucuaucgcuauccccaccaacuucaccaucagcgugaccacagagauccugccuguguccaugaccaagaccagcguggacugcaccauguacaucugcggcgauuccaccgagugcuccaaccugcugcugcaguacggcagcuucugcacccagcugaauagagcccugacagggaucgccguggaacaggacaagaacacccaagagguguucgcccaagugaagcagaucuacaagaccccuccuaucaaggacuucggcggcuucaauuucagccagauucugcccgauccuagcaagcccagcaagcggagcuucaucgaggaccugcuguucaacaaagugacacuggccgacgccggcuucaucaagcaguauggcgauugucugggcgacauugccgccagggaucugauuugcgcccagaaguuuaacggacugacagugcugccuccucugcugaccgaugagaugaucgcccaguacacaucugcccugcuggccggcacaaucacaagcggcuggacauuuggagcaggcgccgcucugcagauccccuuugcuaugcagauggccuaccgguucaacggcaucggagugacccagaaugugcuguacgagaaccagaagcugaucgccaaccaguucaacagcgccaucggcaagauccaggacagccugagcagcacagcaagcgcccugggaaagcugcaggacguggucaaccagaaugcccaggcacugaacacccuggucaagcagcuguccuccaacuucggcgccaucagcucugugcugaacgauauccugagcagacuggacaaggucgaggccgaggugcagaucgacagacugaucacaggcagacugcagagccuccagacauacgugacccagcagcugaucagagccgccgagauuagagccucugccaaucuggccgccaccaagaugucugagugugugcugggccagagcaagagaguggacuuuugcggcaagggcuaccaccugaugagcuucccucagucugccccucacggcgugguguuucugcacgugacauaugugcccgcucaagagaagaauuucaccaccgcuccagccaucugccacgacggcaaagcccacuuuccuagagaaggcguguucguguccaacggcacccauugguucgugacacagcggaacuucuacgagccccagaucaucaccaccgacaacaccuucgugucuggcaacugcgacgucgugaucggcauugugaacaauaccguguacgacccucugcagcccgagcuggacagcuucaaagaggaacuggacaaguacuuuaagaaccacacaagccccgacguggaccugggcgauaucagcggaaucaaugccagcgucgugaacauccagaaagagaucgaccggcugaacgagguggccaagaaucugaacgagagccugaucgaccugcaagaacuggggaaguacgagcaguacaucaaguggcccugguacaucuggcugggcuuuaucgccggacugauugccaucgugaucgucacaaucaugcuguguugcaugaccagcugcuguagcugccugaagggcuguuguagcuguggcagcugcugcaaguucgacgaggacgauucugagcccgugcugaagggcgugaaacugcacuacacaugaugacucgagcugguacugcaugcacgcaaugcuagcugccccuuucccguccuggguaccccgagucucccccgaccucgggucccagguaugcucccaccuccaccugccccacucaccaccucugcuaguuccagacaccucccaagcacgcagcaaugcagcucaaaacgcuuagccuagccacacccccacgggaaacagcagugauuaaccuuuagcaauaaacgaaaguuuaacuaagcuauacuaaccccaggguuggucaauuucgugccagccacacccuggagcuagcaaaaaaaaaaaaaaaaaaaaaaaaaaaaaaaaaaaaaaaaaaaaaaaaaaaaaaaaaaaaaaaaaaaaaaaaaaaaaaaaaaaaaaaaaaaaaaaaaaaa

SEQ ID NO: 26371 - RNA, 4264 nt, Artificial Sequence
  SARS-CoV-2/Wuhan/WIV05/2019__EPI_ISL_402128 spike protein mRNA gc mod (1-1273)(H69del_V70del_Y144del_N501Y_A570D_D614G_P681H_T716I_S982 A_D1118H)
agaauaaacuaguauucuucugguccccacagacucagagagaacccgccaccauguucguguuccuggugcugcugccucugguguccagccagugugugaaccugaccaccagaacacagcugccuccagccuacaccaacagcuuuaccagaggcguguacuaccccgacaagguguucagauccagcgugcugcacucuacccaggaccuguuccugccuuucuucagcaacgugaccugguuccacgccaucuccggcaccaauggcaccaagagauucgacaaccccgugcugcccuucaacgacgggguguacuuugccagcaccgagaaguccaacaucaucagaggcuggaucuucggcaccacacuggacagcaagacccagagccugcugaucgugaacaacgccaccaacguggucaucaaagugugcgaguuccaguucugcaacgaccccuuccugggcgucuaccacaagaacaacaagagcuggauggaaagcgaguuccggguguacagcagcgccaacaacugcaccuucgaguacgugucccagccuuuccugauggaccuggaaggcaagcagggcaacuucaagaaccugcgcgaguucguguuuaagaacaucgacggcuacuucaagaucuacagcaagcacaccccuaucaaccucgugcgggaucugccucagggcuucucugcucuggaaccccugguggaucugcccaucggcaucaacaucacccgguuucagacacugcuggcccugcacagaagcuaccugacaccuggcgauagcagcagcggauggacagcuggugccgccgcuuacuaugugggcuaccugcagccuagaaccuuccugcugaaguacaacgagaacggcaccaucaccgacgccguggauugugcucuggauccucugagcgagacaaagugcacccugaaguccuucaccguggaaaagggcaucuaccagaccagcaacuuccgggugcagcccaccgaauccaucgugcgguuccccaauaucaccaaucugugccccuucggcgagguguucaaugccaccagauucgccucuguguacgccuggaaccggaagcggaucagcaauugcguggccgacuacuccgugcuguacaacuccgccagcuucagcaccuucaagugcuacggcguguccccuaccaagcugaacgaccugugcuucacaaacguguacgccgacagcuucgugauccggggagaugaagugcggcagauugccccuggacagacaggcaagaucgccgacuacaacuacaagcugcccgacgacuucaccggcugugugauugccuggaacagcaacaaccuggacuccaaagucggcggcaacuacaauuaccuguaccggcuguuccggaaguccaaucugaagcccuucgagcgggacaucuccaccgagaucuaucaggccggcagcaccccuuguaacggcguggaaggcuucaacugcuacuucccacugcaguccuacggcuuucagcccacauacggcgugggcuaucagcccuacagagugguggugcugagcuucgaacugcugcaugccccugccacagugugcggcccuaagaaaagcaccaaucucgugaagaacaaaugcgugaacuucaacuucaacggccugaccggcaccggcgugcugacagagagcaacaagaaguuccugccauuccagcaguuuggccgggauaucgacgauaccacagacgccguuagagauccccagacacuggaaauccuggacaucaccccuugcagcuucggcggagugucugugaucaccccuggcaccaacaccagcaaucagguggcagugcuguaccagggcgugaacuguaccgaagugcccguggccauucacgccgaucagcugacaccuacauggcggguguacuccaccggcagcaauguguuucagaccagagccggcugucugaucggagccgagcacgugaacaauagcuacgagugcgacauccccaucggcgcuggaaucugcgccagcuaccagacacagacaaacagccaccggagagccagaagcguggccagccagagcaucauugccuacacaaugucucugggcgccgagaacagcguggccuacuccaacaacucuaucgcuauccccaucaacuucaccaucagcgugaccacagagauccugccuguguccaugaccaagaccagcguggacugcaccauguacaucugcggcgauuccaccgagugcuccaaccugcugcugcaguacggcagcuucugcacccagcugaauagagcccugacagggaucgccguggaacaggacaagaacacccaagagguguucgcccaagugaagcagaucuacaagaccccuccuaucaaggacuucggcggcuucaauuucagccagauucugcccgauccuagcaagcccagcaagcggagcuucaucgaggaccugcuguucaacaaagugacacuggccgacgccggcuucaucaagcaguauggcgauugucugggcgacauugccgccagggaucugauuugcgcccagaaguuuaacggacugacagugcugccuccucugcugaccgaugagaugaucgcccaguacacaucugcccugcuggccggcacaaucacaagcggcuggacauuuggagcaggcgccgcucugcagauccccuuugcuaugcagauggccuaccgguucaacggcaucggagugacccagaaugugcuguacgagaaccagaagcugaucgccaaccaguucaacagcgccaucggcaagauccaggacagccugagcagcacagcaagcgcccugggaaagcugcaggacguggucaaccagaaugcccaggcacugaacacccuggucaagcagcuguccuccaacuucggcgccaucagcucugugcugaacgauauccuggccagacuggacaaggucgaggccgaggugcagaucgacagacugaucacaggcagacugcagagccuccagacauacgugacccagcagcugaucagagccgccgagauuagagccucugccaaucuggccgccaccaagaugucugagugugugcugggccagagcaagagaguggacuuuugcggcaagggcuaccaccugaugagcuucccucagucugccccucacggcgugguguuucugcacgugacauaugugcccgcucaagagaagaauuucaccaccgcuccagccaucugccacgacggcaaagcccacuuuccuagagaaggcguguucguguccaacggcacccauugguucgugacacagcggaacuucuacgagccccagaucaucaccacccacaacaccuucgugucuggcaacugcgacgucgugaucggcauugugaacaauaccguguacgacccucugcagcccgagcuggacagcuucaaagaggaacuggacaaguacuuuaagaaccacacaagccccgacguggaccugggcgauaucagcggaaucaaugccagcgucgugaacauccagaaagagaucgaccggcugaacgagguggccaagaaucugaacgagagccugaucgaccugcaagaacuggggaaguacgagcaguacaucaaguggcccugguacaucuggcugggcuuuaucgccggacugauugccaucgugauggucacaaucaugcuguguugcaugaccagcugcuguagcugccugaagggcuguuguagcuguggcagcugcugcaaguucgacgaggacgauucugagcccgugcugaagggcgugaaacugcacuacacaugaugacucgagcugguacugcaugcacgcaaugcuagcugccccuuucccguccuggguaccccgagucucccccgaccucgggucccagguaugcucccaccuccaccugccccacucaccaccucugcuaguuccagacaccucccaagcacgcagcaaugcagcucaaaacgcuuagccuagccacacccccacgggaaacagcagugauuaaccuuuagcaauaaacgaaaguuuaacuaagcuauacuaaccccaggguuggucaauuucgugccagccacacccuggagcuagcaaaaaaaaaaaaaaaaaaaaaaaaaaaaaaaaaaaaaaaaaaaaaaaaaaaaaaaaaaaaaaaaaaaaaaaaaaaaaaaaaaaaaaaaaaaaaaaaaaaa

SEQ ID NO: 26372 - RNA, 4273 nt, Artificial Sequence
  SARS-CoV-2/Wuhan/WIV05/2019__EPI_ISL_402128 spike protein mRNA gc mod (1-1273)(K417N_E484K_N501Y_D614G)
agaauaaacuaguauucuucugguccccacagacucagagagaacccgccaccauguucguguuccuggugcugcugccucugguguccagccagugugugaaccugaccaccagaacacagcugccuccagccuacaccaacagcuuuaccagaggcguguacuaccccgacaagguguucagauccagcgugcugcacucuacccaggaccuguuccugccuuucuucagcaacgugaccugguuccacgccauccacguguccggcaccaauggcaccaagagauucgacaaccccgugcugcccuucaacgacgggguguacuuugccagcaccgagaaguccaacaucaucagaggcuggaucuucggcaccacacuggacagcaagacccagagccugcugaucgugaacaacgccaccaacguggucaucaaagugugcgaguuccaguucugcaacgaccccuuccugggcgucuacuaccacaagaacaacaagagcuggauggaaagcgaguuccggguguacagcagcgccaacaacugcaccuucgaguacgugucccagccuuuccugauggaccuggaaggcaagcagggcaacuucaagaaccugcgcgaguucguguuuaagaacaucgacggcuacuucaagaucuacagcaagcacaccccuaucaaccucgugcgggaucugccucagggcuucucugcucuggaaccccugguggaucugcccaucggcaucaacaucacccgguuucagacacugcuggcccugcacagaagcuaccugacaccuggcgauagcagcagcggauggacagcuggugccgccgcuuacuaugugggcuaccugcagccuagaaccuuccugcugaaguacaacgagaacggcaccaucaccgacgccguggauugugcucuggauccucugagcgagacaaagugcacccugaaguccuucaccguggaaaagggcaucuaccagaccagcaacuuccgggugcagcccaccgaauccaucgugcgguuccccaauaucaccaaucugugccccuucggcgagguguucaaugccaccagauucgccucuguguacgccuggaaccggaagcggaucagcaauugcguggccgacuacuccgugcuguacaacuccgccagcuucagcaccuucaagugcuacggcguguccccuaccaagcugaacgaccugugcuucacaaacguguacgccgacagcuucgugauccggggagaugaagugcggcagauugccccuggacagacaggcaacaucgccgacuacaacuacaagcugcccgacgacuucaccggcugugugauugccuggaacagcaacaaccuggacuccaaagucggcggcaacuacaauuaccuguaccggcuguuccggaaguccaaucugaagcccuucgagcgggacaucuccaccgagaucuaucaggccggcagcaccccuuguaacggcgugaagggcuucaacugcuacuucccacugcaguccuacggcuuucagcccacauacggcgugggcuaucagcccuacagagugguggugcugagcuucgaacugcugcaugccccugccacagugugcggcccuaagaaaagcaccaaucucgugaagaacaaaugcgugaacuucaacuucaacggccugaccggcaccggcgugcugacagagagcaacaagaaguuccugccauuccagcaguuuggccgggauaucgccgauaccacagacgccguuagagauccccagacacuggaaauccuggacaucaccccuugcagcuucggcggagugucugugaucaccccuggcaccaacaccagcaaucagguggcagugcuguaccagggcgugaacuguaccgaagugcccguggccauucacgccgaucagcugacaccuacauggcggguguacuccaccggcagcaauguguuucagaccagagccggcugucugaucggagccgagcacgugaacaauagcuacgagugcgacauccccaucggcgcuggaaucugcgccagcuaccagacacagacaaacagcccucggagagccagaagcguggccagccagagcaucauugccuacacaaugucucugggcgccgagaacagcguggccuacuccaacaacucuaucgcuauccccaccaacuucaccaucagcgugaccacagagauccugccuguguccaugaccaagaccagcguggacugcaccauguacaucugcggcgauuccaccgagugcuccaaccugcugcugcaguacggcagcuucugcacccagcugaauagagcccugacagggaucgccguggaacaggacaagaacacccaagagguguucgcccaagugaagcagaucuacaagaccccuccuaucaaggacuucggcggcuucaauuucagccagauucugcccgauccuagcaagcccagcaagcggagcuucaucgaggaccugcuguucaacaaagugacacuggccgacgccggcuucaucaagcaguauggcgauugucugggcgacauugccgccagggaucugauuugcgcccagaaguuuaacggacugacagugcugccuccucugcugaccgaugagaugaucgcccaguacacaucugcccugcuggccggcacaaucacaagcggcuggacauuuggagcaggcgccgcucugcagauccccuuugcuaugcagauggccuaccgguucaacggcaucggagugacccagaaugugcuguacgagaaccagaagcugaucgccaaccaguucaacagcgccaucggcaagauccaggacagccugagcagcacagcaagcgcccugggaaagcugcaggacguggucaaccagaaugcccaggcacugaacacccuggucaagcagcuguccuccaacuucggcgccaucagcucugugcugaacgauauccugagcagacuggacaaggucgaggccgaggugcagaucgacagacugaucacaggcagacugcagagccuccagacauacgugacccagcagcugaucagagccgccgagauuagagccucugccaaucuggccgccaccaagaugucugagugugugcugggccagagcaagagaguggacuuuugcggcaagggcuaccaccugaugagcuucccucagucugccccucacggcgugguguuucugcacgugacauaugugcccgcucaagagaagaauuucaccaccgcuccagccaucugccacgacggcaaagcccacuuuccuagagaaggcguguucguguccaacggcacccauugguucgugacacagcggaacuucuacgagccccagaucaucaccaccgacaacaccuucgugucuggcaacugcgacgucgugaucggcauugugaacaauaccguguacgacccucugcagcccgagcuggacagcuucaaagaggaacuggacaaguacuuuaagaaccacacaagccccgacguggaccugggcgauaucagcggaaucaaugccagcgucgugaacauccagaaagagaucgaccggcugaacgagguggccaagaaucugaacgagagccugaucgaccugcaagaacuggggaaguacgagcaguacaucaaguggcccugguacaucuggcugggcuuuaucgccggacugauugccaucgugauggucacaaucaugcuguguugcaugaccagcugcuguagcugccugaagggcuguuguagcuguggcagcugcugcaaguucgacgaggacgauucugagcccgugcugaagggcgugaaacugcacuacacaugaugacucgagcugguacugcaugcacgcaaugcuagcugccccuuucccguccuggguaccccgagucucccccgaccucgggucccagguaugcucccaccuccaccugccccacucaccaccucugcuaguuccagacaccucccaagcacgcagcaaugcagcucaaaacgcuuagccuagccacacccccacgggaaacagcagugauuaaccuuuagcaauaaacgaaaguuuaacuaagcuauacuaaccccaggguuggucaauuucgugccagccacacccuggagcuagcaaaaaaaaaaaaaaaaaaaaaaaaaaaaaaaaaaaaaaaaaaaaaaaaaaaaaaaaaaaaaaaaaaaaaaaaaaaaaaaaaaaaaaaaaaaaaaaaaaaa

SEQ ID NO: 26373 - RNA, 4264 nt, Artificial Sequence
  SARS-CoV-2/Wuhan/WIV05/2019__EPI_ISL_402128 spike protein mRNA gc mod (1-1273)(L18F_D80A_D215G_L242del_A243del_L244del_R246I_K417N_E484 K_N501Y_D614G_A701V)
agaauaaacuaguauucuucugguccccacagacucagagagaacccgccaccauguucguguuccuggugcugcugccucugguguccagccagugugugaacuucaccaccagaacacagcugccuccagccuacaccaacagcuuuaccagaggcguguacuaccccgacaagguguucagauccagcgugcugcacucuacccaggaccuguuccugccuuucuucagcaacgugaccugguuccacgccauccacguguccggcaccaauggcaccaagagauucgccaaccccgugcugcccuucaacgacgggguguacuuugccagcaccgagaaguccaacaucaucagaggcuggaucuucggcaccacacuggacagcaagacccagagccugcugaucgugaacaacgccaccaacguggucaucaaagugugcgaguuccaguucugcaacgaccccuuccugggcgucuacuaccacaagaacaacaagagcuggauggaaagcgaguuccggguguacagcagcgccaacaacugcaccuucgaguacgugucccagccuuuccugauggaccuggaaggcaagcagggcaacuucaagaaccugcgcgaguucguguuuaagaacaucgacggcuacuucaagaucuacagcaagcacaccccuaucaaccucgugcggggccugccucagggcuucucugcucuggaaccccugguggaucugcccaucggcaucaacaucacccgguuucagacacugcacaucagcuaccugacaccuggcgauagcagcagcggauggacagcuggugccgccgcuuacuaugugggcuaccugcagccuagaaccuuccugcugaaguacaacgagaacggcaccaucaccgacgccguggauugugcucuggauccucugagcgagacaaagugcacccugaaguccuucaccguggaaaagggcaucuaccagaccagcaacuuccgggugcagcccaccgaauccaucgugcgguuccccaauaucaccaaucugugccccuucggcgagguguucaaugccaccagauucgccucuguguacgccuggaaccggaagcggaucagcaauugcguggccgacuacuccgugcuguacaacuccgccagcuucagcaccuucaagugcuacggcguguccccuaccaagcugaacgaccugugcuucacaaacguguacgccgacagcuucgugauccggggagaugaagugcggcagauugccccuggacagacaggcaacaucgccgacuacaacuacaagcugcccgacgacuucaccggcugugugauugccuggaacagcaacaaccuggacuccaaagucggcggcaacuacaauuaccuguaccggcuguuccggaaguccaaucugaagcccuucgagcgggacaucuccaccgagaucuaucaggccggcagcaccccuuguaacggcgugaagggcuucaacugcuacuucccacugcaguccuacggcuuucagcccacauacggcgugggcuaucagcccuacagagugguggugcugagcuucgaacugcugcaugccccugccacagugugcggcccuaagaaaagcaccaaucucgugaagaacaaaugcgugaacuucaacuucaacggccugaccggcaccggcgugcugacagagagcaacaagaaguuccugccauuccagcaguuuggccgggauaucgccgauaccacagacgccguuagagauccccagacacuggaaauccuggacaucaccccuugcagcuucggcggagugucugugaucaccccuggcaccaacaccagcaaucagguggcagugcuguaccagggcgugaacuguaccgaagugcccguggccauucacgccgaucagcugacaccuacauggcggguguacuccaccggcagcaauguguuucagaccagagccggcugucugaucggagccgagcacgugaacaauagcuacgagugcgacauccccaucggcgcuggaaucugcgccagcuaccagacacagacaaacagcccucggagagccagaagcguggccagccagagcaucauugccuacacaaugucucugggcguggagaacagcguggccuacuccaacaacucuaucgcuauccccaccaacuucaccaucagcgugaccacagagauccugccuguguccaugaccaagaccagcguggacugcaccauguacaucugcggcgauuccaccgagugcuccaaccugcugcugcaguacggcagcuucugcacccagcugaauagagcccugacagggaucgccguggaacaggacaagaacacccaagagguguucgcccaagugaagcagaucuacaagaccccuccuaucaaggacuucggcggcuucaauuucagccagauucugcccgauccuagcaagcccagcaagcggagcuucaucgaggaccugcuguucaacaaagugacacuggccgacgccggcuucaucaagcaguauggcgauugucugggcgacauugccgccagggaucugauuugcgcccagaaguuuaacggacugacagugcugccuccucugcugaccgaugagaugaucgcccaguacacaucugcccugcuggccggcacaaucacaagcggcuggacauuuggagcaggcgccgcucugcagauccccuuugcuaugcagauggccuaccgguucaacggcaucggagugacccagaaugugcuguacgagaaccagaagcugaucgccaaccaguucaacagcgccaucggcaagauccaggacagccugagcagcacagcaagcgcccugggaaagcugcaggacguggucaaccagaaugcccaggcacugaacacccuggucaagcagcuguccuccaacuucggcgccaucagcucugugcugaacgauauccugagcagacuggacaaggucgaggccgaggugcagaucgacagacugaucacaggcagacugcagagccuccagacauacgugacccagcagcugaucagagccgccgagauuagagccucugccaaucuggccgccaccaagaugucugagugugugcugggccagagcaagagaguggacuuuugcggcaagggcuaccaccugaugagcuucccucagucugccccucacggcgugguguuucugcacgugacauaugugcccgcucaagagaagaauuucaccaccgcuccagccaucugccacgacggcaaagcccacuuuccuagagaaggcguguucguguccaacggcacccauugguucgugacacagcggaacuucuacgagccccagaucaucaccaccgacaacaccuucgugucuggcaacugcgacgucgugaucggcauugugaacaauaccguguacgacccucugcagcccgagcuggacagcuucaaagaggaacuggacaaguacuuuaagaaccacacaagccccgacguggaccugggcgauaucagcggaaucaaugccagcgucgugaacauccagaaagagaucgaccggcugaacgagguggccaagaaucugaacgagagccugaucgaccugcaagaacuggggaaguacgagcaguacaucaaguggcccugguacaucuggcugggcuuuaucgccggacugauugccaucgugauggucacaaucaugcuguguugcaugaccagcugcuguagcugccugaagggcuguuguagcuguggcagcugcugcaaguucgacgaggacgauucugagcccgugcugaagggcgugaaacugcacuacacaugaugacucgagcugguacugcaugcacgcaaugcuagcugccccuuucccguccuggguaccccgagucucccccgaccucgggucccagguaugcucccaccuccaccugccccacucaccaccucugcuaguuccagacaccucccaagcacgcagcaaugcagcucaaaacgcuuagccuagccacacccccacgggaaacagcagugauuaaccuuuagcaauaaacgaaaguuuaacuaagcuauacuaaccccaggguuggucaauuucgugccagccacacccuggagcuagcaaaaaaaaaaaaaaaaaaaaaaaaaaaaaaaaaaaaaaaaaaaaaaaaaaaaaaaaaaaaaaaaaaaaaaaaaaaaaaaaaaaaaaaaaaaaaaaaaaaa

SEQ ID NO: 26374 - RNA, 4273 nt, Artificial Sequence
  SARS-CoV-2/Wuhan/WIV05/2019__EPI_ISL_402128 spike protein mRNA gc mod (1-1273)(E484K_D614G)
agaauaaacuaguauucuucugguccccacagacucagagagaacccgccaccauguucguguuccuggugcugcugccucugguguccagccagugugugaaccugaccaccagaacacagcugccuccagccuacaccaacagcuuuaccagaggcguguacuaccccgacaagguguucagauccagcgugcugcacucuacccaggaccuguuccugccuuucuucagcaacgugaccugguuccacgccauccacguguccggcaccaauggcaccaagagauucgacaaccccgugcugcccuucaacgacgggguguacuuugccagcaccgagaaguccaacaucaucagaggcuggaucuucggcaccacacuggacagcaagacccagagccugcugaucgugaacaacgccaccaacguggucaucaaagugugcgaguuccaguucugcaacgaccccuuccugggcgucuacuaccacaagaacaacaagagcuggauggaaagcgaguuccggguguacagcagcgccaacaacugcaccuucgaguacgugucccagccuuuccugauggaccuggaaggcaagcagggcaacuucaagaaccugcgcgaguucguguuuaagaacaucgacggcuacuucaagaucuacagcaagcacaccccuaucaaccucgugcgggaucugccucagggcuucucugcucuggaaccccugguggaucugcccaucggcaucaacaucacccgguuucagacacugcuggcccugcacagaagcuaccugacaccuggcgauagcagcagcggauggacagcuggugccgccgcuuacuaugugggcuaccugcagccuagaaccuuccugcugaaguacaacgagaacggcaccaucaccgacgccguggauugugcucuggauccucugagcgagacaaagugcacccugaaguccuucaccguggaaaagggcaucuaccagaccagcaacuuccgggugcagcccaccgaauccaucgugcgguuccccaauaucaccaaucugugccccuucggcgagguguucaaugccaccagauucgccucuguguacgccuggaaccggaagcggaucagcaauugcguggccgacuacuccgugcuguacaacuccgccagcuucagcaccuucaagugcuacggcguguccccuaccaagcugaacgaccugugcuucacaaacguguacgccgacagcuucgugauccggggagaugaagugcggcagauugccccuggacagacaggcaagaucgccgacuacaacuacaagcugcccgacgacuucaccggcugugugauugccuggaacagcaacaaccuggacuccaaagucggcggcaacuacaauuaccuguaccggcuguuccggaaguccaaucugaagcccuucgagcgggacaucuccaccgagaucuaucaggccggcagcaccccuuguaacggcgugaagggcuucaacugcuacuucccacugcaguccuacggcuuucagcccacaaauggcgugggcuaucagcccuacagagugguggugcugagcuucgaacugcugcaugccccugccacagugugcggcccuaagaaaagcaccaaucucgugaagaacaaaugcgugaacuucaacuucaacggccugaccggcaccggcgugcugacagagagcaacaagaaguuccugccauuccagcaguuuggccgggauaucgccgauaccacagacgccguuagagauccccagacacuggaaauccuggacaucaccccuugcagcuucggcggagugucugugaucaccccuggcaccaacaccagcaaucagguggcagugcuguaccagggcgugaacuguaccgaagugcccguggccauucacgccgaucagcugacaccuacauggcggguguacuccaccggcagcaauguguuucagaccagagccggcugucugaucggagccgagcacgugaacaauagcuacgagugcgacauccccaucggcgcuggaaucugcgccagcuaccagacacagacaaacagcccucggagagccagaagcguggccagccagagcaucauugccuacacaaugucucugggcgccgagaacagcguggccuacuccaacaacucuaucgcuauccccaccaacuucaccaucagcgugaccacagagauccugccuguguccaugaccaagaccagcguggacugcaccauguacaucugcggcgauuccaccgagugcuccaaccugcugcugcaguacggcagcuucugcacccagcugaauagagcccugacagggaucgccguggaacaggacaagaacacccaagagguguucgcccaagugaagcagaucuacaagaccccuccuaucaaggacuucggcggcuucaauuucagccagauucugcccgauccuagcaagcccagcaagcggagcuucaucgaggaccugcuguucaacaaagugacacuggccgacgccggcuucaucaagcaguauggcgauugucugggcgacauugccgccagggaucugauuugcgcccagaaguuuaacggacugacagugcugccuccucugcugaccgaugagaugaucgcccaguacacaucugcccugcuggccggcacaaucacaagcggcuggacauuuggagcaggcgccgcucugcagauccccuuugcuaugcagauggccuaccgguucaacggcaucggagugacccagaaugugcuguacgagaaccagaagcugaucgccaaccaguucaacagcgccaucggcaagauccaggacagccugagcagcacagcaagcgcccugggaaagcugcaggacguggucaaccagaaugcccaggcacugaacacccuggucaagcagcuguccuccaacuucggcgccaucagcucugugcugaacgauauccugagcagacuggacaaggucgaggccgaggugcagaucgacagacugaucacaggcagacugcagagccuccagacauacgugacccagcagcugaucagagccgccgagauuagagccucugccaaucuggccgccaccaagaugucugagugugugcugggccagagcaagagaguggacuuuugcggcaagggcuaccaccugaugagcuucccucagucugccccucacggcgugguguuucugcacgugacauaugugcccgcucaagagaagaauuucaccaccgcuccagccaucugccacgacggcaaagcccacuuuccuagagaaggcguguucguguccaacggcacccauugguucgugacacagcggaacuucuacgagccccagaucaucaccaccgacaacaccuucgugucuggcaacugcgacgucgugaucggcauugugaacaauaccguguacgacccucugcagcccgagcuggacagcuucaaagaggaacuggacaaguacuuuaagaaccacacaagccccgacguggaccugggcgauaucagcggaaucaaugccagcgucgugaacauccagaaagagaucgaccggcugaacgagguggccaagaaucugaacgagagccugaucgaccugcaagaacuggggaaguacgagcaguacaucaaguggcccugguacaucuggcugggcuuuaucgccggacugauugccaucgugauggucacaaucaugcuguguugcaugaccagcugcuguagcugccugaagggcuguuguagcuguggcagcugcugcaaguucgacgaggacgauucugagcccgugcugaagggcgugaaacugcacuacacaugaugacucgagcugguacugcaugcacgcaaugcuagcugccccuuucccguccuggguaccccgagucucccccgaccucgggucccagguaugcucccaccuccaccugccccacucaccaccucugcuaguuccagacaccucccaagcacgcagcaaugcagcucaaaacgcuuagccuagccacacccccacgggaaacagcagugauuaaccuuuagcaauaaacgaaaguuuaacuaagcuauacuaaccccaggguuggucaauuucgugccagccacacccuggagcuagcaaaaaaaaaaaaaaaaaaaaaaaaaaaaaaaaaaaaaaaaaaaaaaaaaaaaaaaaaaaaaaaaaaaaaaaaaaaaaaaaaaaaaaaaaaaaaaaaaaaa

SEQ ID NO: 26375 - RNA, 4273 nt, Artificial Sequence
  SARS-CoV-2/Wuhan/WIV05/2019__EPI_ISL_402128 spike protein mRNA gc mod (1-1273)(L18F_T20N_P26S_D138Y_R190S_K417T_E484K_N501Y_D614G_H655Y _T1027I)
agaauaaacuaguauucuucugguccccacagacucagagagaacccgccaccauguucguguuccuggugcugcugccucugguguccagccagugugugaacuucaccaacagaacacagcugccuagcgccuacaccaacagcuuuaccagaggcguguacuaccccgacaagguguucagauccagcgugcugcacucuacccaggaccuguuccugccuuucuucagcaacgugaccugguuccacgccauccacguguccggcaccaauggcaccaagagauucgacaaccccgugcugcccuucaacgacgggguguacuuugccagcaccgagaaguccaacaucaucagaggcuggaucuucggcaccacacuggacagcaagacccagagccugcugaucgugaacaacgccaccaacguggucaucaaagugugcgaguuccaguucugcaacuaccccuuccugggcgucuacuaccacaagaacaacaagagcuggauggaaagcgaguuccggguguacagcagcgccaacaacugcaccuucgaguacgugucccagccuuuccugauggaccuggaaggcaagcagggcaacuucaagaaccugagcgaguucguguuuaagaacaucgacggcuacuucaagaucuacagcaagcacaccccuaucaaccucgugcgggaucugccucagggcuucucugcucuggaaccccugguggaucugcccaucggcaucaacaucacccgguuucagacacugcuggcccugcacagaagcuaccugacaccuggcgauagcagcagcggauggacagcuggugccgccgcuuacuaugugggcuaccugcagccuagaaccuuccugcugaaguacaacgagaacggcaccaucaccgacgccguggauugugcucuggauccucugagcgagacaaagugcacccugaaguccuucaccguggaaaagggcaucuaccagaccagcaacuuccgggugcagcccaccgaauccaucgugcgguuccccaauaucaccaaucugugccccuucggcgagguguucaaugccaccagauucgccucuguguacgccuggaaccggaagcggaucagcaauugcguggccgacuacuccgugcuguacaacuccgccagcuucagcaccuucaagugcuacggcguguccccuaccaagcugaacgaccugugcuucacaaacguguacgccgacagcuucgugauccggggagaugaagugcggcagauugccccuggacagacaggcaccaucgccgacuacaacuacaagcugcccgacgacuucaccggcugugugauugccuggaacagcaacaaccuggacuccaaagucggcggcaacuacaauuaccuguaccggcuguuccggaaguccaaucugaagcccuucgagcgggacaucuccaccgagaucuaucaggccggcagcaccccuuguaacggcgugaagggcuucaacugcuacuucccacugcaguccuacggcuuucagcccacauacggcgugggcuaucagcccuacagagugguggugcugagcuucgaacugcugcaugccccugccacagugugcggcccuaagaaaagcaccaaucucgugaagaacaaaugcgugaacuucaacuucaacggccugaccggcaccggcgugcugacagagagcaacaagaaguuccugccauuccagcaguuuggccgggauaucgccgauaccacagacgccguuagagauccccagacacuggaaauccuggacaucaccccuugcagcuucggcggagugucugugaucaccccuggcaccaacaccagcaaucagguggcagugcuguaccagggcgugaacuguaccgaagugcccguggccauucacgccgaucagcugacaccuacauggcggguguacuccaccggcagcaauguguuucagaccagagccggcugucugaucggagccgaguacgugaacaauagcuacgagugcgacauccccaucggcgcuggaaucugcgccagcuaccagacacagacaaacagcccucggagagccagaagcguggccagccagagcaucauugccuacacaaugucucugggcgccgagaacagcguggccuacuccaacaacucuaucgcuauccccaccaacuucaccaucagcgugaccacagagauccugccuguguccaugaccaagaccagcguggacugcaccauguacaucugcggcgauuccaccgagugcuccaaccugcugcugcaguacggcagcuucugcacccagcugaauagagcccugacagggaucgccguggaacaggacaagaacacccaagagguguucgcccaagugaagcagaucuacaagaccccuccuaucaaggacuucggcggcuucaauuucagccagauucugcccgauccuagcaagcccagcaagcggagcuucaucgaggaccugcuguucaacaaagugacacuggccgacgccggcuucaucaagcaguauggcgauugucugggcgacauugccgccagggaucugauuugcgcccagaaguuuaacggacugacagugcugccuccucugcugaccgaugagaugaucgcccaguacacaucugcccugcuggccggcacaaucacaagcggcuggacauuuggagcaggcgccgcucugcagauccccuuugcuaugcagauggccuaccgguucaacggcaucggagugacccagaaugugcuguacgagaaccagaagcugaucgccaaccaguucaacagcgccaucggcaagauccaggacagccugagcagcacagcaagcgcccugggaaagcugcaggacguggucaaccagaaugcccaggcacugaacacccuggucaagcagcuguccuccaacuucggcgccaucagcucugugcugaacgauauccugagcagacuggacaaggucgaggccgaggugcagaucgacagacugaucacaggcagacugcagagccuccagacauacgugacccagcagcugaucagagccgccgagauuagagccucugccaaucuggccgccaucaagaugucugagugugugcugggccagagcaagagaguggacuuuugcggcaagggcuaccaccugaugagcuucccucagucugccccucacggcgugguguuucugcacgugacauaugugcccgcucaagagaagaauuucaccaccgcuccagccaucugccacgacggcaaagcccacuuuccuagagaaggcguguucguguccaacggcacccauugguucgugacacagcggaacuucuacgagccccagaucaucaccaccgacaacaccuucgugucuggcaacugcgacgucgugaucggcauugugaacaauaccguguacgacccucugcagcccgagcuggacagcuucaaagaggaacuggacaaguacuuuaagaaccacacaagccccgacguggaccugggcgauaucagcggaaucaaugccagcgucgugaacauccagaaagagaucgaccggcugaacgagguggccaagaaucugaacgagagccugaucgaccugcaagaacuggggaaguacgagcaguacaucaaguggcccugguacaucuggcugggcuuuaucgccggacugauugccaucgugauggucacaaucaugcuguguugcaugaccagcugcuguagcugccugaagggcuguuguagcuguggcagcugcugcaaguucgacgaggacgauucugagcccgugcugaagggcgugaaacugcacuacacaugaugacucgagcugguacugcaugcacgcaaugcuagcugccccuuucccguccuggguaccccgagucucccccgaccucgggucccagguaugcucccaccuccaccugccccacucaccaccucugcuaguuccagacaccucccaagcacgcagcaaugcagcucaaaacgcuuagccuagccacacccccacgggaaacagcagugauuaaccuuuagcaauaaacgaaaguuuaacuaagcuauacuaaccccaggguuggucaauuucgugccagccacacccuggagcuagcaaaaaaaaaaaaaaaaaaaaaaaaaaaaaaaaaaaaaaaaaaaaaaaaaaaaaaaaaaaaaaaaaaaaaaaaaaaaaaaaaaaaaaaaaaaaaaaaaaaa

SEQ ID NO: 26376 - RNA, 4273 nt, Artificial Sequence
  SARS-CoV-2/Wuhan/WIV05/2019__EPI_ISL_402128 spike protein mRNA gc mod (1-1273)(S13I_W152C_L452R_D614G)
agaauaaacuaguauucuucugguccccacagacucagagagaacccgccaccauguucguguuccuggugcugcugccucugguguccauccagugugugaaccugaccaccagaacacagcugccuccagccuacaccaacagcuuuaccagaggcguguacuaccccgacaagguguucagauccagcgugcugcacucuacccaggaccuguuccugccuuucuucagcaacgugaccugguuccacgccauccacguguccggcaccaauggcaccaagagauucgacaaccccgugcugcccuucaacgacgggguguacuuugccagcaccgagaaguccaacaucaucagaggcuggaucuucggcaccacacuggacagcaagacccagagccugcugaucgugaacaacgccaccaacguggucaucaaagugugcgaguuccaguucugcaacgaccccuuccugggcgucuacuaccacaagaacaacaagagcugcauggaaagcgaguuccggguguacagcagcgccaacaacugcaccuucgaguacgugucccagccuuuccugauggaccuggaaggcaagcagggcaacuucaagaaccugcgcgaguucguguuuaagaacaucgacggcuacuucaagaucuacagcaagcacaccccuaucaaccucgugcgggaucugccucagggcuucucugcucuggaaccccugguggaucugcccaucggcaucaacaucacccgguuucagacacugcuggcccugcacagaagcuaccugacaccuggcgauagcagcagcggauggacagcuggugccgccgcuuacuaugugggcuaccugcagccuagaaccuuccugcugaaguacaacgagaacggcaccaucaccgacgccguggauugugcucuggauccucugagcgagacaaagugcacccugaaguccuucaccguggaaaagggcaucuaccagaccagcaacuuccgggugcagcccaccgaauccaucgugcgguuccccaauaucaccaaucugugccccuucggcgagguguucaaugccaccagauucgccucuguguacgccuggaaccggaagcggaucagcaauugcguggccgacuacuccgugcuguacaacuccgccagcuucagcaccuucaagugcuacggcguguccccuaccaagcugaacgaccugugcuucacaaacguguacgccgacagcuucgugauccggggagaugaagugcggcagauugccccuggacagacaggcaagaucgccgacuacaacuacaagcugcccgacgacuucaccggcugugugauugccuggaacagcaacaaccuggacuccaaagucggcggcaacuacaauuaccgcuaccggcuguuccggaaguccaaucugaagcccuucgagcgggacaucuccaccgagaucuaucaggccggcagcaccccuuguaacggcguggaaggcuucaacugcuacuucccacugcaguccuacggcuuucagcccacaaauggcgugggcuaucagcccuacagagugguggugcugagcuucgaacugcugcaugccccugccacagugugcggcccuaagaaaagcaccaaucucgugaagaacaaaugcgugaacuucaacuucaacggccugaccggcaccggcgugcugacagagagcaacaagaaguuccugccauuccagcaguuuggccgggauaucgccgauaccacagacgccguuagagauccccagacacuggaaauccuggacaucaccccuugcagcuucggcggagugucugugaucaccccuggcaccaacaccagcaaucagguggcagugcuguaccagggcgugaacuguaccgaagugcccguggccauucacgccgaucagcugacaccuacauggcggguguacuccaccggcagcaauguguuucagaccagagccggcugucugaucggagccgagcacgugaacaauagcuacgagugcgacauccccaucggcgcuggaaucugcgccagcuaccagacacagacaaacagcccucggagagccagaagcguggccagccagagcaucauugccuacacaaugucucugggcgccgagaacagcguggccuacuccaacaacucuaucgcuauccccaccaacuucaccaucagcgugaccacagagauccugccuguguccaugaccaagaccagcguggacugcaccauguacaucugcggcgauuccaccgagugcuccaaccugcugcugcaguacggcagcuucugcacccagcugaauagagcccugacagggaucgccguggaacaggacaagaacacccaagagguguucgcccaagugaagcagaucuacaagaccccuccuaucaaggacuucggcggcuucaauuucagccagauucugcccgauccuagcaagcccagcaagcggagcuucaucgaggaccugcuguucaacaaagugacacuggccgacgccggcuucaucaagcaguauggcgauugucugggcgacauugccgccagggaucugauuugcgcccagaaguuuaacggacugacagugcugccuccucugcugaccgaugagaugaucgcccaguacacaucugcccugcuggccggcacaaucacaagcggcuggacauuuggagcaggcgccgcucugcagauccccuuugcuaugcagauggccuaccgguucaacggcaucggagugacccagaaugugcuguacgagaaccagaagcugaucgccaaccaguucaacagcgccaucggcaagauccaggacagccugagcagcacagcaagcgcccugggaaagcugcaggacguggucaaccagaaugcccaggcacugaacacccuggucaagcagcuguccuccaacuucggcgccaucagcucugugcugaacgauauccugagcagacuggacaaggucgaggccgaggugcagaucgacagacugaucacaggcagacugcagagccuccagacauacgugacccagcagcugaucagagccgccgagauuagagccucugccaaucuggccgccaccaagaugucugagugugugcugggccagagcaagagaguggacuuuugcggcaagggcuaccaccugaugagcuucccucagucugccccucacggcgugguguuucugcacgugacauaugugcccgcucaagagaagaauuucaccaccgcuccagccaucugccacgacggcaaagcccacuuuccuagagaaggcguguucguguccaacggcacccauugguucgugacacagcggaacuucuacgagccccagaucaucaccaccgacaacaccuucgugucuggcaacugcgacgucgugaucggcauugugaacaauaccguguacgacccucugcagcccgagcuggacagcuucaaagaggaacuggacaaguacuuuaagaaccacacaagccccgacguggaccugggcgauaucagcggaaucaaugccagcgucgugaacauccagaaagagaucgaccggcugaacgagguggccaagaaucugaacgagagccugaucgaccugcaagaacuggggaaguacgagcaguacaucaaguggcccugguacaucuggcugggcuuuaucgccggacugauugccaucgugauggucacaaucaugcuguguugcaugaccagcugcuguagcugccugaagggcuguuguagcuguggcagcugcugcaaguucgacgaggacgauucugagcccgugcugaagggcgugaaacugcacuacacaugaugacucgagcugguacugcaugcacgcaaugcuagcugccccuuucccguccuggguaccccgagucucccccgaccucgggucccagguaugcucccaccuccaccugccccacucaccaccucugcuaguuccagacaccucccaagcacgcagcaaugcagcucaaaacgcuuagccuagccacacccccacgggaaacagcagugauuaaccuuuagcaauaaacgaaaguuuaacuaagcuauacuaaccccaggguuggucaauuucgugccagccacacccuggagcuagcaaaaaaaaaaaaaaaaaaaaaaaaaaaaaaaaaaaaaaaaaaaaaaaaaaaaaaaaaaaaaaaaaaaaaaaaaaaaaaaaaaaaaaaaaaaaaaaaaaaa

SEQ ID NO: 26377 - RNA, 4273 nt, Artificial Sequence
  SARS-CoV-2/Wuhan/WIV05/2019__EPI_ISL_402128 spike protein mRNA gc (1-1273)(K986P_V987P)
agaauaaacuaguauucuucugguccccacagacucagagagaacccgccaccauguucguguuccugguccuccugccccuggugagcucccagugcgugaaccucaccacccgcacgcagcugccgcccgccuacaccaacagcuucacccggggcgucuacuaccccgacaagguguuccgcuccagcgugcugcacuccacccaggaccucuuccugcccuucuucagcaacgucacgugguuccacgccauccacguguccgggaccaacggcaccaagcgguucgacaacccggugcugcccuucaacgacggggucuacuucgcgagcaccgagaaguccaacaucauccgcggcuggaucuucgggacgacccucgacagcaagacccagucccugcugaucgugaacaacgccaccaacguggucaucaaggugugcgaguuccaguucugcaacgaccccuuccucggcguguacuaccacaagaacaacaagagcuggauggaguccgaguuccgggucuacagcuccgccaacaacugcacguucgaguacgugagccagcccuuccugauggaccuggagggcaagcaggggaacuucaagaaccuccgcgaguucguguucaagaacaucgacggcuacuucaagaucuacuccaagcacaccccgaucaaccugguccgggaccugccccagggguucagcgcccucgagccccugguggaccugcccaucggcaucaacaucacccgcuuccagacccuccuggcccugcaccgguccuaccucacgccgggggacagcagcuccggcuggaccgcgggcgccgccgccuacuacgugggguaccugcagccccgcaccuuccugcucaaguacaacgagaacggcaccaucacggacgcggucgacugcgcccuggacccccugagcgagaccaagugcacccucaaguccuucaccguggagaaggggaucuaccagacgagcaacuuccgggugcagcccaccgaguccaucguccgcuucccgaacaucaccaaccugugccccuucggcgagguguucaacgccacccgguucgccagcgucuacgccuggaaccgcaagcggaucuccaacugcguggcggacuacagcgugcuguacaacuccgccagcuucuccacguucaagugcuacggcgucagccccaccaagcucaacgaccugugcuucaccaacguguacgccgacuccuucgugauccgcggggacgagguccggcagaucgcccccggccagaccgggaagaucgccgacuacaacuacaagcugccggacgacuucacgggcugcgugaucgcguggaacagcaacaaccucgacuccaaggucgggggcaacuacaacuaccuguaccgccuguuccgcaagagcaaccucaagcccuucgagcgggacaucuccaccgagaucuaccaggccggcagcacccccugcaacgggguggagggcuucaacugcuacuucccccugcaguccuacggguuccagccgaccaacggcgugggguaccagcccuaccggguggucgugcugagcuucgagcuccugcacgcccccgccacggugugcggccccaagaaguccaccaaccuggucaagaacaagugcgugaacuucaacuucaacggccucaccgggaccggcgugcugaccgagagcaacaagaaguuccugccguuccagcaguucgggcgcgacaucgccgacacgaccgacgcgguccgcgacccccagacccuggagauccucgacaucacccccugcagcuucggcgggguguccgugaucacgccgggcaccaacaccagcaaccaggucgccgugcuguaccaggacgugaacugcaccgagguccccguggccauccacgccgaccagcugacgcccaccuggcggguguacuccaccggcagcaacgucuuccagacccgcgccgggugccucaucggcgcggagcacgugaacaacuccuacgagugcgacauccccaucggggccggcaucugcgccagcuaccagacgcagaccaacuccccgcggcgcgcccggagcguggcgucccagagcaucaucgccuacaccaugucccugggcgccgagaacagcgucgccuacuccaacaacagcaucgccauccccaccaacuucacgaucuccgugaccaccgagauccugcccgugagcaugaccaagacgagcgucgacugcaccauguacaucugcggggacuccaccgagugcagcaaccuccugcugcaguacggcuccuucugcacccagcucaaccgcgcgcugacggggaucgccguggagcaggacaagaacacccaggagguguucgcccaggucaagcagaucuacaagacgcccccgaucaaggacuucggcggguucaacuucagccagauccugcccgaccccuccaagcccagcaagcgguccuucaucgaggaccuccuguucaacaaggugacccuggccgacgccggcuucaucaagcaguacggcgacugccucggggacaucgcggcccgcgaccugaucugcgcccagaaguucaacggccugaccgugcucccgccccugcugaccgacgagaugaucgcccaguacaccagcgcccuccuggcggggaccaucacguccggcuggaccuucggggccggcgccgcccugcagauccccuucgcgaugcagauggccuaccgguucaacggcaucggggucacccagaacgugcucuacgagaaccagaagcugaucgccaaccaguucaacagcgccaucggcaagauccaggacucccugagcuccaccgccagcgcgcucgggaagcugcaggacguggucaaccagaacgcccaggcccugaacacgcucgugaagcagcuguccagcaacuucggcgccaucuccagcgugcugaacgacauccucucccgccuggacccgcccgaggccgaggugcagaucgaccggcugaucaccgggcgccuccagagccugcagaccuacgugacccagcagcugauccgggcggccgagauccgcgccagcgccaaccucgccgcgaccaagauguccgagugcguccugggccagagcaagcggguggacuucugcggcaagggguaccaccugauguccuucccccagagcgccccgcacggcguggucuuccuccacgugacguacguccccgcccaggagaagaacuucaccaccgcccccgcgaucugccacgacgggaaggcccacuucccccgcgagggcguguucguguccaacgggacccacugguucgucacgcagcggaacuucuacgagccgcagaucaucaccaccgacaacaccuucgugagcggcaacugcgacguggucaucggcaucgugaacaacacgguguacgacccccugcagcccgagcuggacuccuucaaggaggagcucgacaaguacuucaagaaccacaccagccccgacgucgaccugggggacaucuccggcaucaacgccagcguggugaacauccagaaggagaucgaccgccugaacgaggucgccaagaaccucaacgagucccugaucgaccugcaggagcucgggaaguacgagcaguacaucaaguggccgugguacaucuggcugggcuucaucgccggccugaucgcgaucgugauggugaccaucaugcucugcugcaugaccagcugcugcuccugccugaaggggugcugcagcugcggcuccugcugcaaguucgacgaggacgacagcgagcccguccugaagggggugaagcuccacuacacgugaugacucgagcugguacugcaugcacgcaaugcuagcugccccuuucccguccuggguaccccgagucucccccgaccucgggucccagguaugcucccaccuccaccugccccacucaccaccucugcuaguuccagacaccucccaagcacgcagcaaugcagcucaaaacgcuuagccuagccacacccccacgggaaacagcagugauuaaccuuuagcaauaaacgaaaguuuaacuaagcuauacuaaccccaggguuggucaauuucgugccagccacacccuggagcuagcaaaaaaaaaaaaaaaaaaaaaaaaaaaaaaaaaaaaaaaaaaaaaaaaaaaaaaaaaaaaaaaaaaaaaaaaaaaaaaaaaaaaaaaaaaaaaaaaaaaa

SEQ ID NO: 26378 - RNA, 4273 nt, Artificial Sequence
  SARS-CoV-2/Wuhan/WIV05/2019__EPI_ISL_402128 spike protein mRNA gc (1-1273)(K986P_V987P_ D614G)
agaauaaacuaguauucuucugguccccacagacucagagagaacccgccaccauguucguguuccugguccuccugccccuggugagcucccagugcgugaaccucaccacccgcacgcagcugccgcccgccuacaccaacagcuucacccggggcgucuacuaccccgacaagguguuccgcuccagcgugcugcacuccacccaggaccucuuccugcccuucuucagcaacgucacgugguuccacgccauccacguguccgggaccaacggcaccaagcgguucgacaacccggugcugcccuucaacgacggggucuacuucgcgagcaccgagaaguccaacaucauccgcggcuggaucuucgggacgacccucgacagcaagacccagucccugcugaucgugaacaacgccaccaacguggucaucaaggugugcgaguuccaguucugcaacgaccccuuccucggcguguacuaccacaagaacaacaagagcuggauggaguccgaguuccgggucuacagcuccgccaacaacugcacguucgaguacgugagccagcccuuccugauggaccuggagggcaagcaggggaacuucaagaaccuccgcgaguucguguucaagaacaucgacggcuacuucaagaucuacuccaagcacaccccgaucaaccugguccgggaccugccccagggguucagcgcccucgagccccugguggaccugcccaucggcaucaacaucacccgcuuccagacccuccuggcccugcaccgguccuaccucacgccgggggacagcagcuccggcuggaccgcgggcgccgccgccuacuacgugggguaccugcagccccgcaccuuccugcucaaguacaacgagaacggcaccaucacggacgcggucgacugcgcccuggacccccugagcgagaccaagugcacccucaaguccuucaccguggagaaggggaucuaccagacgagcaacuuccgggugcagcccaccgaguccaucguccgcuucccgaacaucaccaaccugugccccuucggcgagguguucaacgccacccgguucgccagcgucuacgccuggaaccgcaagcggaucuccaacugcguggcggacuacagcgugcuguacaacuccgccagcuucuccacguucaagugcuacggcgucagccccaccaagcucaacgaccugugcuucaccaacguguacgccgacuccuucgugauccgcggggacgagguccggcagaucgcccccggccagaccgggaagaucgccgacuacaacuacaagcugccggacgacuucacgggcugcgugaucgcguggaacagcaacaaccucgacuccaaggucgggggcaacuacaacuaccuguaccgccuguuccgcaagagcaaccucaagcccuucgagcgggacaucuccaccgagaucuaccaggccggcagcacccccugcaacgggguggagggcuucaacugcuacuucccccugcaguccuacggguuccagccgaccaacggcgugggguaccagcccuaccggguggucgugcugagcuucgagcuccugcacgcccccgccacggugugcggccccaagaaguccaccaaccuggucaagaacaagugcgugaacuucaacuucaacggccucaccgggaccggcgugcugaccgagagcaacaagaaguuccugccguuccagcaguucgggcgcgacaucgccgacacgaccgacgcgguccgcgacccccagacccuggagauccucgacaucacccccugcagcuucggcgggguguccgugaucacgccgggcaccaacaccagcaaccaggucgccgugcuguaccagggcgugaacugcaccgagguccccguggccauccacgccgaccagcugacgcccaccuggcggguguacuccaccggcagcaacgucuuccagacccgcgccgggugccucaucggcgcggagcacgugaacaacuccuacgagugcgacauccccaucggggccggcaucugcgccagcuaccagacgcagaccaacuccccgcggcgcgcccggagcguggcgucccagagcaucaucgccuacaccaugucccugggcgccgagaacagcgucgccuacuccaacaacagcaucgccauccccaccaacuucacgaucuccgugaccaccgagauccugcccgugagcaugaccaagacgagcgucgacugcaccauguacaucugcggggacuccaccgagugcagcaaccuccugcugcaguacggcuccuucugcacccagcucaaccgcgcgcugacggggaucgccguggagcaggacaagaacacccaggagguguucgcccaggucaagcagaucuacaagacgcccccgaucaaggacuucggcggguucaacuucagccagauccugcccgaccccuccaagcccagcaagcgguccuucaucgaggaccuccuguucaacaaggugacccuggccgacgccggcuucaucaagcaguacggcgacugccucggggacaucgcggcccgcgaccugaucugcgcccagaaguucaacggccugaccgugcucccgccccugcugaccgacgagaugaucgcccaguacaccagcgcccuccuggcggggaccaucacguccggcuggaccuucggggccggcgccgcccugcagauccccuucgcgaugcagauggccuaccgguucaacggcaucggggucacccagaacgugcucuacgagaaccagaagcugaucgccaaccaguucaacagcgccaucggcaagauccaggacucccugagcuccaccgccagcgcgcucgggaagcugcaggacguggucaaccagaacgcccaggcccugaacacgcucgugaagcagcuguccagcaacuucggcgccaucuccagcgugcugaacgacauccucucccgccuggacccgcccgaggccgaggugcagaucgaccggcugaucaccgggcgccuccagagccugcagaccuacgugacccagcagcugauccgggcggccgagauccgcgccagcgccaaccucgccgcgaccaagauguccgagugcguccugggccagagcaagcggguggacuucugcggcaagggguaccaccugauguccuucccccagagcgccccgcacggcguggucuuccuccacgugacguacguccccgcccaggagaagaacuucaccaccgcccccgcgaucugccacgacgggaaggcccacuucccccgcgagggcguguucguguccaacgggacccacugguucgucacgcagcggaacuucuacgagccgcagaucaucaccaccgacaacaccuucgugagcggcaacugcgacguggucaucggcaucgugaacaacacgguguacgacccccugcagcccgagcuggacuccuucaaggaggagcucgacaaguacuucaagaaccacaccagccccgacgucgaccugggggacaucuccggcaucaacgccagcguggugaacauccagaaggagaucgaccgccugaacgaggucgccaagaaccucaacgagucccugaucgaccugcaggagcucgggaaguacgagcaguacaucaaguggccgugguacaucuggcugggcuucaucgccggccugaucgcgaucgugauggugaccaucaugcucugcugcaugaccagcugcugcuccugccugaaggggugcugcagcugcggcuccugcugcaaguucgacgaggacgacagcgagcccguccugaagggggugaagcuccacuacacgugaugacucgagcugguacugcaugcacgcaaugcuagcugccccuuucccguccuggguaccccgagucucccccgaccucgggucccagguaugcucccaccuccaccugccccacucaccaccucugcuaguuccagacaccucccaagcacgcagcaaugcagcucaaaacgcuuagccuagccacacccccacgggaaacagcagugauuaaccuuuagcaauaaacgaaaguuuaacuaagcuauacuaaccccaggguuggucaauuucgugccagccacacccuggagcuagcaaaaaaaaaaaaaaaaaaaaaaaaaaaaaaaaaaaaaaaaaaaaaaaaaaaaaaaaaaaaaaaaaaaaaaaaaaaaaaaaaaaaaaaaaaaaaaaaaaaa

SEQ ID NO: 26379 - RNA, 4273 nt, Artificial Sequence
  SARS-CoV-2/Wuhan/WIV05/2019__EPI_ISL_402128 spike protein mRNA gc (1-1273)(K986P_V987P_A222V_D614G)
agaauaaacuaguauucuucugguccccacagacucagagagaacccgccaccauguucguguuccugguccuccugccccuggugagcucccagugcgugaaccucaccacccgcacgcagcugccgcccgccuacaccaacagcuucacccggggcgucuacuaccccgacaagguguuccgcuccagcgugcugcacuccacccaggaccucuuccugcccuucuucagcaacgucacgugguuccacgccauccacguguccgggaccaacggcaccaagcgguucgacaacccggugcugcccuucaacgacggggucuacuucgcgagcaccgagaaguccaacaucauccgcggcuggaucuucgggacgacccucgacagcaagacccagucccugcugaucgugaacaacgccaccaacguggucaucaaggugugcgaguuccaguucugcaacgaccccuuccucggcguguacuaccacaagaacaacaagagcuggauggaguccgaguuccgggucuacagcuccgccaacaacugcacguucgaguacgugagccagcccuuccugauggaccuggagggcaagcaggggaacuucaagaaccuccgcgaguucguguucaagaacaucgacggcuacuucaagaucuacuccaagcacaccccgaucaaccugguccgggaccugccccagggguucagcguccucgagccccugguggaccugcccaucggcaucaacaucacccgcuuccagacccuccuggcccugcaccgguccuaccucacgccgggggacagcagcuccggcuggaccgcgggcgccgccgccuacuacgugggguaccugcagccccgcaccuuccugcucaaguacaacgagaacggcaccaucacggacgcggucgacugcgcccuggacccccugagcgagaccaagugcacccucaaguccuucaccguggagaaggggaucuaccagacgagcaacuuccgggugcagcccaccgaguccaucguccgcuucccgaacaucaccaaccugugccccuucggcgagguguucaacgccacccgguucgccagcgucuacgccuggaaccgcaagcggaucuccaacugcguggcggacuacagcgugcuguacaacuccgccagcuucuccacguucaagugcuacggcgucagccccaccaagcucaacgaccugugcuucaccaacguguacgccgacuccuucgugauccgcggggacgagguccggcagaucgcccccggccagaccgggaagaucgccgacuacaacuacaagcugccggacgacuucacgggcugcgugaucgcguggaacagcaacaaccucgacuccaaggucgggggcaacuacaacuaccuguaccgccuguuccgcaagagcaaccucaagcccuucgagcgggacaucuccaccgagaucuaccaggccggcagcacccccugcaacgggguggagggcuucaacugcuacuucccccugcaguccuacggguuccagccgaccaacggcgugggguaccagcccuaccggguggucgugcugagcuucgagcuccugcacgcccccgccacggugugcggccccaagaaguccaccaaccuggucaagaacaagugcgugaacuucaacuucaacggccucaccgggaccggcgugcugaccgagagcaacaagaaguuccugccguuccagcaguucgggcgcgacaucgccgacacgaccgacgcgguccgcgacccccagacccuggagauccucgacaucacccccugcagcuucggcgggguguccgugaucacgccgggcaccaacaccagcaaccaggucgccgugcuguaccagggcgugaacugcaccgagguccccguggccauccacgccgaccagcugacgcccaccuggcggguguacuccaccggcagcaacgucuuccagacccgcgccgggugccucaucggcgcggagcacgugaacaacuccuacgagugcgacauccccaucggggccggcaucugcgccagcuaccagacgcagaccaacuccccgcggcgcgcccggagcguggcgucccagagcaucaucgccuacaccaugucccugggcgccgagaacagcgucgccuacuccaacaacagcaucgccauccccaccaacuucacgaucuccgugaccaccgagauccugcccgugagcaugaccaagacgagcgucgacugcaccauguacaucugcggggacuccaccgagugcagcaaccuccugcugcaguacggcuccuucugcacccagcucaaccgcgcgcugacggggaucgccguggagcaggacaagaacacccaggagguguucgcccaggucaagcagaucuacaagacgcccccgaucaaggacuucggcggguucaacuucagccagauccugcccgaccccuccaagcccagcaagcgguccuucaucgaggaccuccuguucaacaaggugacccuggccgacgccggcuucaucaagcaguacggcgacugccucggggacaucgcggcccgcgaccugaucugcgcccagaaguucaacggccugaccgugcucccgccccugcugaccgacgagaugaucgcccaguacaccagcgcccuccuggcggggaccaucacguccggcuggaccuucggggccggcgccgcccugcagauccccuucgcgaugcagauggccuaccgguucaacggcaucggggucacccagaacgugcucuacgagaaccagaagcugaucgccaaccaguucaacagcgccaucggcaagauccaggacucccugagcuccaccgccagcgcgcucgggaagcugcaggacguggucaaccagaacgcccaggcccugaacacgcucgugaagcagcuguccagcaacuucggcgccaucuccagcgugcugaacgacauccucucccgccuggacccgcccgaggccgaggugcagaucgaccggcugaucaccgggcgccuccagagccugcagaccuacgugacccagcagcugauccgggcggccgagauccgcgccagcgccaaccucgccgcgaccaagauguccgagugcguccugggccagagcaagcggguggacuucugcggcaagggguaccaccugauguccuucccccagagcgccccgcacggcguggucuuccuccacgugacguacguccccgcccaggagaagaacuucaccaccgcccccgcgaucugccacgacgggaaggcccacuucccccgcgagggcguguucguguccaacgggacccacugguucgucacgcagcggaacuucuacgagccgcagaucaucaccaccgacaacaccuucgugagcggcaacugcgacguggucaucggcaucgugaacaacacgguguacgacccccugcagcccgagcuggacuccuucaaggaggagcucgacaaguacuucaagaaccacaccagccccgacgucgaccugggggacaucuccggcaucaacgccagcguggugaacauccagaaggagaucgaccgccugaacgaggucgccaagaaccucaacgagucccugaucgaccugcaggagcucgggaaguacgagcaguacaucaaguggccgugguacaucuggcugggcuucaucgccggccugaucgcgaucgugauggugaccaucaugcucugcugcaugaccagcugcugcuccugccugaaggggugcugcagcugcggcuccugcugcaaguucgacgaggacgacagcgagcccguccugaagggggugaagcuccacuacacgugaugacucgagcugguacugcaugcacgcaaugcuagcugccccuuucccguccuggguaccccgagucucccccgaccucgggucccagguaugcucccaccuccaccugccccacucaccaccucugcuaguuccagacaccucccaagcacgcagcaaugcagcucaaaacgcuuagccuagccacacccccacgggaaacagcagugauuaaccuuuagcaauaaacgaaaguuuaacuaagcuauacuaaccccaggguuggucaauuucgugccagccacacccuggagcuagcaaaaaaaaaaaaaaaaaaaaaaaaaaaaaaaaaaaaaaaaaaaaaaaaaaaaaaaaaaaaaaaaaaaaaaaaaaaaaaaaaaaaaaaaaaaaaaaaaaaa

SEQ ID NO: 26380 - RNA, 4273 nt, Artificial Sequence
  SARS-CoV-2/Wuhan/WIV05/2019__EPI_ISL_402128 spike protein mRNA gc (1-1273)(K986P_V987P_N439K_D614G)
agaauaaacuaguauucuucugguccccacagacucagagagaacccgccaccauguucguguuccugguccuccugccccuggugagcucccagugcgugaaccucaccacccgcacgcagcugccgcccgccuacaccaacagcuucacccggggcgucuacuaccccgacaagguguuccgcuccagcgugcugcacuccacccaggaccucuuccugcccuucuucagcaacgucacgugguuccacgccauccacguguccgggaccaacggcaccaagcgguucgacaacccggugcugcccuucaacgacggggucuacuucgcgagcaccgagaaguccaacaucauccgcggcuggaucuucgggacgacccucgacagcaagacccagucccugcugaucgugaacaacgccaccaacguggucaucaaggugugcgaguuccaguucugcaacgaccccuuccucggcguguacuaccacaagaacaacaagagcuggauggaguccgaguuccgggucuacagcuccgccaacaacugcacguucgaguacgugagccagcccuuccugauggaccuggagggcaagcaggggaacuucaagaaccuccgcgaguucguguucaagaacaucgacggcuacuucaagaucuacuccaagcacaccccgaucaaccugguccgggaccugccccagggguucagcgcccucgagccccugguggaccugcccaucggcaucaacaucacccgcuuccagacccuccuggcccugcaccgguccuaccucacgccgggggacagcagcuccggcuggaccgcgggcgccgccgccuacuacgugggguaccugcagccccgcaccuuccugcucaaguacaacgagaacggcaccaucacggacgcggucgacugcgcccuggacccccugagcgagaccaagugcacccucaaguccuucaccguggagaaggggaucuaccagacgagcaacuuccgggugcagcccaccgaguccaucguccgcuucccgaacaucaccaaccugugccccuucggcgagguguucaacgccacccgguucgccagcgucuacgccuggaaccgcaagcggaucuccaacugcguggcggacuacagcgugcuguacaacuccgccagcuucuccacguucaagugcuacggcgucagccccaccaagcucaacgaccugugcuucaccaacguguacgccgacuccuucgugauccgcggggacgagguccggcagaucgcccccggccagaccgggaagaucgccgacuacaacuacaagcugccggacgacuucacgggcugcgugaucgcguggaacagcaagaaccucgacuccaaggucgggggcaacuacaacuaccuguaccgccuguuccgcaagagcaaccucaagcccuucgagcgggacaucuccaccgagaucuaccaggccggcagcacccccugcaacgggguggagggcuucaacugcuacuucccccugcaguccuacggguuccagccgaccaacggcgugggguaccagcccuaccggguggucgugcugagcuucgagcuccugcacgcccccgccacggugugcggccccaagaaguccaccaaccuggucaagaacaagugcgugaacuucaacuucaacggccucaccgggaccggcgugcugaccgagagcaacaagaaguuccugccguuccagcaguucgggcgcgacaucgccgacacgaccgacgcgguccgcgacccccagacccuggagauccucgacaucacccccugcagcuucggcgggguguccgugaucacgccgggcaccaacaccagcaaccaggucgccgugcuguaccagggcgugaacugcaccgagguccccguggccauccacgccgaccagcugacgcccaccuggcggguguacuccaccggcagcaacgucuuccagacccgcgccgggugccucaucggcgcggagcacgugaacaacuccuacgagugcgacauccccaucggggccggcaucugcgccagcuaccagacgcagaccaacuccccgcggcgcgcccggagcguggcgucccagagcaucaucgccuacaccaugucccugggcgccgagaacagcgucgccuacuccaacaacagcaucgccauccccaccaacuucacgaucuccgugaccaccgagauccugcccgugagcaugaccaagacgagcgucgacugcaccauguacaucugcggggacuccaccgagugcagcaaccuccugcugcaguacggcuccuucugcacccagcucaaccgcgcgcugacggggaucgccguggagcaggacaagaacacccaggagguguucgcccaggucaagcagaucuacaagacgcccccgaucaaggacuucggcggguucaacuucagccagauccugcccgaccccuccaagcccagcaagcgguccuucaucgaggaccuccuguucaacaaggugacccuggccgacgccggcuucaucaagcaguacggcgacugccucggggacaucgcggcccgcgaccugaucugcgcccagaaguucaacggccugaccgugcucccgccccugcugaccgacgagaugaucgcccaguacaccagcgcccuccuggcggggaccaucacguccggcuggaccuucggggccggcgccgcccugcagauccccuucgcgaugcagauggccuaccgguucaacggcaucggggucacccagaacgugcucuacgagaaccagaagcugaucgccaaccaguucaacagcgccaucggcaagauccaggacucccugagcuccaccgccagcgcgcucgggaagcugcaggacguggucaaccagaacgcccaggcccugaacacgcucgugaagcagcuguccagcaacuucggcgccaucuccagcgugcugaacgacauccucucccgccuggacccgcccgaggccgaggugcagaucgaccggcugaucaccgggcgccuccagagccugcagaccuacgugacccagcagcugauccgggcggccgagauccgcgccagcgccaaccucgccgcgaccaagauguccgagugcguccugggccagagcaagcggguggacuucugcggcaagggguaccaccugauguccuucccccagagcgccccgcacggcguggucuuccuccacgugacguacguccccgcccaggagaagaacuucaccaccgcccccgcgaucugccacgacgggaaggcccacuucccccgcgagggcguguucguguccaacgggacccacugguucgucacgcagcggaacuucuacgagccgcagaucaucaccaccgacaacaccuucgugagcggcaacugcgacguggucaucggcaucgugaacaacacgguguacgacccccugcagcccgagcuggacuccuucaaggaggagcucgacaaguacuucaagaaccacaccagccccgacgucgaccugggggacaucuccggcaucaacgccagcguggugaacauccagaaggagaucgaccgccugaacgaggucgccaagaaccucaacgagucccugaucgaccugcaggagcucgggaaguacgagcaguacaucaaguggccgugguacaucuggcugggcuucaucgccggccugaucgcgaucgugauggugaccaucaugcucugcugcaugaccagcugcugcuccugccugaaggggugcugcagcugcggcuccugcugcaaguucgacgaggacgacagcgagcccguccugaagggggugaagcuccacuacacgugaugacucgagcugguacugcaugcacgcaaugcuagcugccccuuucccguccuggguaccccgagucucccccgaccucgggucccagguaugcucccaccuccaccugccccacucaccaccucugcuaguuccagacaccucccaagcacgcagcaaugcagcucaaaacgcuuagccuagccacacccccacgggaaacagcagugauuaaccuuuagcaauaaacgaaaguuuaacuaagcuauacuaaccccaggguuggucaauuucgugccagccacacccuggagcuagcaaaaaaaaaaaaaaaaaaaaaaaaaaaaaaaaaaaaaaaaaaaaaaaaaaaaaaaaaaaaaaaaaaaaaaaaaaaaaaaaaaaaaaaaaaaaaaaaaaaa

SEQ ID NO: 26381 - RNA, 4273 nt, Artificial Sequence
  SARS-CoV-2/Wuhan/WIV05/2019__EPI_ISL_402128 spike protein mRNA gc (1-1273)(K986P_V987P_S477N_D614G)
agaauaaacuaguauucuucugguccccacagacucagagagaacccgccaccauguucguguuccugguccuccugccccuggugagcucccagugcgugaaccucaccacccgcacgcagcugccgcccgccuacaccaacagcuucacccggggcgucuacuaccccgacaagguguuccgcuccagcgugcugcacuccacccaggaccucuuccugcccuucuucagcaacgucacgugguuccacgccauccacguguccgggaccaacggcaccaagcgguucgacaacccggugcugcccuucaacgacggggucuacuucgcgagcaccgagaaguccaacaucauccgcggcuggaucuucgggacgacccucgacagcaagacccagucccugcugaucgugaacaacgccaccaacguggucaucaaggugugcgaguuccaguucugcaacgaccccuuccucggcguguacuaccacaagaacaacaagagcuggauggaguccgaguuccgggucuacagcuccgccaacaacugcacguucgaguacgugagccagcccuuccugauggaccuggagggcaagcaggggaacuucaagaaccuccgcgaguucguguucaagaacaucgacggcuacuucaagaucuacuccaagcacaccccgaucaaccugguccgggaccugccccagggguucagcgcccucgagccccugguggaccugcccaucggcaucaacaucacccgcuuccagacccuccuggcccugcaccgguccuaccucacgccgggggacagcagcuccggcuggaccgcgggcgccgccgccuacuacgugggguaccugcagccccgcaccuuccugcucaaguacaacgagaacggcaccaucacggacgcggucgacugcgcccuggacccccugagcgagaccaagugcacccucaaguccuucaccguggagaaggggaucuaccagacgagcaacuuccgggugcagcccaccgaguccaucguccgcuucccgaacaucaccaaccugugccccuucggcgagguguucaacgccacccgguucgccagcgucuacgccuggaaccgcaagcggaucuccaacugcguggcggacuacagcgugcuguacaacuccgccagcuucuccacguucaagugcuacggcgucagccccaccaagcucaacgaccugugcuucaccaacguguacgccgacuccuucgugauccgcggggacgagguccggcagaucgcccccggccagaccgggaagaucgccgacuacaacuacaagcugccggacgacuucacgggcugcgugaucgcguggaacagcaacaaccucgacuccaaggucgggggcaacuacaacuaccuguaccgccuguuccgcaagagcaaccucaagcccuucgagcgggacaucuccaccgagaucuaccaggccggcaacacccccugcaacgggguggagggcuucaacugcuacuucccccugcaguccuacggguuccagccgaccaacggcgugggguaccagcccuaccggguggucgugcugagcuucgagcuccugcacgcccccgccacggugugcggccccaagaaguccaccaaccuggucaagaacaagugcgugaacuucaacuucaacggccucaccgggaccggcgugcugaccgagagcaacaagaaguuccugccguuccagcaguucgggcgcgacaucgccgacacgaccgacgcgguccgcgacccccagacccuggagauccucgacaucacccccugcagcuucggcgggguguccgugaucacgccgggcaccaacaccagcaaccaggucgccgugcuguaccagggcgugaacugcaccgagguccccguggccauccacgccgaccagcugacgcccaccuggcggguguacuccaccggcagcaacgucuuccagacccgcgccgggugccucaucggcgcggagcacgugaacaacuccuacgagugcgacauccccaucggggccggcaucugcgccagcuaccagacgcagaccaacuccccgcggcgcgcccggagcguggcgucccagagcaucaucgccuacaccaugucccugggcgccgagaacagcgucgccuacuccaacaacagcaucgccauccccaccaacuucacgaucuccgugaccaccgagauccugcccgugagcaugaccaagacgagcgucgacugcaccauguacaucugcggggacuccaccgagugcagcaaccuccugcugcaguacggcuccuucugcacccagcucaaccgcgcgcugacggggaucgccguggagcaggacaagaacacccaggagguguucgcccaggucaagcagaucuacaagacgcccccgaucaaggacuucggcggguucaacuucagccagauccugcccgaccccuccaagcccagcaagcgguccuucaucgaggaccuccuguucaacaaggugacccuggccgacgccggcuucaucaagcaguacggcgacugccucggggacaucgcggcccgcgaccugaucugcgcccagaaguucaacggccugaccgugcucccgccccugcugaccgacgagaugaucgcccaguacaccagcgcccuccuggcggggaccaucacguccggcuggaccuucggggccggcgccgcccugcagauccccuucgcgaugcagauggccuaccgguucaacggcaucggggucacccagaacgugcucuacgagaaccagaagcugaucgccaaccaguucaacagcgccaucggcaagauccaggacucccugagcuccaccgccagcgcgcucgggaagcugcaggacguggucaaccagaacgcccaggcccugaacacgcucgugaagcagcuguccagcaacuucggcgccaucuccagcgugcugaacgacauccucucccgccuggacccgcccgaggccgaggugcagaucgaccggcugaucaccgggcgccuccagagccugcagaccuacgugacccagcagcugauccgggcggccgagauccgcgccagcgccaaccucgccgcgaccaagauguccgagugcguccugggccagagcaagcggguggacuucugcggcaagggguaccaccugauguccuucccccagagcgccccgcacggcguggucuuccuccacgugacguacguccccgcccaggagaagaacuucaccaccgcccccgcgaucugccacgacgggaaggcccacuucccccgcgagggcguguucguguccaacgggacccacugguucgucacgcagcggaacuucuacgagccgcagaucaucaccaccgacaacaccuucgugagcggcaacugcgacguggucaucggcaucgugaacaacacgguguacgacccccugcagcccgagcuggacuccuucaaggaggagcucgacaaguacuucaagaaccacaccagccccgacgucgaccugggggacaucuccggcaucaacgccagcguggugaacauccagaaggagaucgaccgccugaacgaggucgccaagaaccucaacgagucccugaucgaccugcaggagcucgggaaguacgagcaguacaucaaguggccgugguacaucuggcugggcuucaucgccggccugaucgcgaucgugauggugaccaucaugcucugcugcaugaccagcugcugcuccugccugaaggggugcugcagcugcggcuccugcugcaaguucgacgaggacgacagcgagcccguccugaagggggugaagcuccacuacacgugaugacucgagcugguacugcaugcacgcaaugcuagcugccccuuucccguccuggguaccccgagucucccccgaccucgggucccagguaugcucccaccuccaccugccccacucaccaccucugcuaguuccagacaccucccaagcacgcagcaaugcagcucaaaacgcuuagccuagccacacccccacgggaaacagcagugauuaaccuuuagcaauaaacgaaaguuuaacuaagcuauacuaaccccaggguuggucaauuucgugccagccacacccuggagcuagcaaaaaaaaaaaaaaaaaaaaaaaaaaaaaaaaaaaaaaaaaaaaaaaaaaaaaaaaaaaaaaaaaaaaaaaaaaaaaaaaaaaaaaaaaaaaaaaaaaaa

SEQ ID NO: 26382 - RNA, 4273 nt, Artificial Sequence
  SARS-CoV-2/Wuhan/WIV05/2019__EPI_ISL_402128 spike protein mRNA gc (1-1273)(K986P_V987P_N501Y_D614G)
agaauaaacuaguauucuucugguccccacagacucagagagaacccgccaccauguucguguuccugguccuccugccccuggugagcucccagugcgugaaccucaccacccgcacgcagcugccgcccgccuacaccaacagcuucacccggggcgucuacuaccccgacaagguguuccgcuccagcgugcugcacuccacccaggaccucuuccugcccuucuucagcaacgucacgugguuccacgccauccacguguccgggaccaacggcaccaagcgguucgacaacccggugcugcccuucaacgacggggucuacuucgcgagcaccgagaaguccaacaucauccgcggcuggaucuucgggacgacccucgacagcaagacccagucccugcugaucgugaacaacgccaccaacguggucaucaaggugugcgaguuccaguucugcaacgaccccuuccucggcguguacuaccacaagaacaacaagagcuggauggaguccgaguuccgggucuacagcuccgccaacaacugcacguucgaguacgugagccagcccuuccugauggaccuggagggcaagcaggggaacuucaagaaccuccgcgaguucguguucaagaacaucgacggcuacuucaagaucuacuccaagcacaccccgaucaaccugguccgggaccugccccagggguucagcgcccucgagccccugguggaccugcccaucggcaucaacaucacccgcuuccagacccuccuggcccugcaccgguccuaccucacgccgggggacagcagcuccggcuggaccgcgggcgccgccgccuacuacgugggguaccugcagccccgcaccuuccugcucaaguacaacgagaacggcaccaucacggacgcggucgacugcgcccuggacccccugagcgagaccaagugcacccucaaguccuucaccguggagaaggggaucuaccagacgagcaacuuccgggugcagcccaccgaguccaucguccgcuucccgaacaucaccaaccugugccccuucggcgagguguucaacgccacccgguucgccagcgucuacgccuggaaccgcaagcggaucuccaacugcguggcggacuacagcgugcuguacaacuccgccagcuucuccacguucaagugcuacggcgucagccccaccaagcucaacgaccugugcuucaccaacguguacgccgacuccuucgugauccgcggggacgagguccggcagaucgcccccggccagaccgggaagaucgccgacuacaacuacaagcugccggacgacuucacgggcugcgugaucgcguggaacagcaacaaccucgacuccaaggucgggggcaacuacaacuaccuguaccgccuguuccgcaagagcaaccucaagcccuucgagcgggacaucuccaccgagaucuaccaggccggcagcacccccugcaacgggguggagggcuucaacugcuacuucccccugcaguccuacggguuccagccgaccuacggcgugggguaccagcccuaccggguggucgugcugagcuucgagcuccugcacgcccccgccacggugugcggccccaagaaguccaccaaccuggucaagaacaagugcgugaacuucaacuucaacggccucaccgggaccggcgugcugaccgagagcaacaagaaguuccugccguuccagcaguucgggcgcgacaucgccgacacgaccgacgcgguccgcgacccccagacccuggagauccucgacaucacccccugcagcuucggcgggguguccgugaucacgccgggcaccaacaccagcaaccaggucgccgugcuguaccagggcgugaacugcaccgagguccccguggccauccacgccgaccagcugacgcccaccuggcggguguacuccaccggcagcaacgucuuccagacccgcgccgggugccucaucggcgcggagcacgugaacaacuccuacgagugcgacauccccaucggggccggcaucugcgccagcuaccagacgcagaccaacuccccgcggcgcgcccggagcguggcgucccagagcaucaucgccuacaccaugucccugggcgccgagaacagcgucgccuacuccaacaacagcaucgccauccccaccaacuucacgaucuccgugaccaccgagauccugcccgugagcaugaccaagacgagcgucgacugcaccauguacaucugcggggacuccaccgagugcagcaaccuccugcugcaguacggcuccuucugcacccagcucaaccgcgcgcugacggggaucgccguggagcaggacaagaacacccaggagguguucgcccaggucaagcagaucuacaagacgcccccgaucaaggacuucggcggguucaacuucagccagauccugcccgaccccuccaagcccagcaagcgguccuucaucgaggaccuccuguucaacaaggugacccuggccgacgccggcuucaucaagcaguacggcgacugccucggggacaucgcggcccgcgaccugaucugcgcccagaaguucaacggccugaccgugcucccgccccugcugaccgacgagaugaucgcccaguacaccagcgcccuccuggcggggaccaucacguccggcuggaccuucggggccggcgccgcccugcagauccccuucgcgaugcagauggccuaccgguucaacggcaucggggucacccagaacgugcucuacgagaaccagaagcugaucgccaaccaguucaacagcgccaucggcaagauccaggacucccugagcuccaccgccagcgcgcucgggaagcugcaggacguggucaaccagaacgcccaggcccugaacacgcucgugaagcagcuguccagcaacuucggcgccaucuccagcgugcugaacgacauccucucccgccuggacccgcccgaggccgaggugcagaucgaccggcugaucaccgggcgccuccagagccugcagaccuacgugacccagcagcugauccgggcggccgagauccgcgccagcgccaaccucgccgcgaccaagauguccgagugcguccugggccagagcaagcggguggacuucugcggcaagggguaccaccugauguccuucccccagagcgccccgcacggcguggucuuccuccacgugacguacguccccgcccaggagaagaacuucaccaccgcccccgcgaucugccacgacgggaaggcccacuucccccgcgagggcguguucguguccaacgggacccacugguucgucacgcagcggaacuucuacgagccgcagaucaucaccaccgacaacaccuucgugagcggcaacugcgacguggucaucggcaucgugaacaacacgguguacgacccccugcagcccgagcuggacuccuucaaggaggagcucgacaaguacuucaagaaccacaccagccccgacgucgaccugggggacaucuccggcaucaacgccagcguggugaacauccagaaggagaucgaccgccugaacgaggucgccaagaaccucaacgagucccugaucgaccugcaggagcucgggaaguacgagcaguacaucaaguggccgugguacaucuggcugggcuucaucgccggccugaucgcgaucgugauggugaccaucaugcucugcugcaugaccagcugcugcuccugccugaaggggugcugcagcugcggcuccugcugcaaguucgacgaggacgacagcgagcccguccugaagggggugaagcuccacuacacgugaugacucgagcugguacugcaugcacgcaaugcuagcugccccuuucccguccuggguaccccgagucucccccgaccucgggucccagguaugcucccaccuccaccugccccacucaccaccucugcuaguuccagacaccucccaagcacgcagcaaugcagcucaaaacgcuuagccuagccacacccccacgggaaacagcagugauuaaccuuuagcaauaaacgaaaguuuaacuaagcuauacuaaccccaggguuggucaauuucgugccagccacacccuggagcuagcaaaaaaaaaaaaaaaaaaaaaaaaaaaaaaaaaaaaaaaaaaaaaaaaaaaaaaaaaaaaaaaaaaaaaaaaaaaaaaaaaaaaaaaaaaaaaaaaaaaa

SEQ ID NO: 26383 - RNA, 4267 nt, Artificial Sequence
  SARS-CoV-2/Wuhan/WIV05/2019__EPI_ISL_402128 spike protein mRNA gc (1-1273)(K986P_V987P_H69del_V70del_D614G)
agaauaaacuaguauucuucugguccccacagacucagagagaacccgccaccauguucguguuccugguccuccugccccuggugagcucccagugcgugaaccucaccacccgcacgcagcugccgcccgccuacaccaacagcuucacccggggcgucuacuaccccgacaagguguuccgcuccagcgugcugcacuccacccaggaccucuuccugcccuucuucagcaacgucacgugguuccacgccaucuccgggaccaacggcaccaagcgguucgacaacccggugcugcccuucaacgacggggucuacuucgcgagcaccgagaaguccaacaucauccgcggcuggaucuucgggacgacccucgacagcaagacccagucccugcugaucgugaacaacgccaccaacguggucaucaaggugugcgaguuccaguucugcaacgaccccuuccucggcguguacuaccacaagaacaacaagagcuggauggaguccgaguuccgggucuacagcuccgccaacaacugcacguucgaguacgugagccagcccuuccugauggaccuggagggcaagcaggggaacuucaagaaccuccgcgaguucguguucaagaacaucgacggcuacuucaagaucuacuccaagcacaccccgaucaaccugguccgggaccugccccagggguucagcgcccucgagccccugguggaccugcccaucggcaucaacaucacccgcuuccagacccuccuggcccugcaccgguccuaccucacgccgggggacagcagcuccggcuggaccgcgggcgccgccgccuacuacgugggguaccugcagccccgcaccuuccugcucaaguacaacgagaacggcaccaucacggacgcggucgacugcgcccuggacccccugagcgagaccaagugcacccucaaguccuucaccguggagaaggggaucuaccagacgagcaacuuccgggugcagcccaccgaguccaucguccgcuucccgaacaucaccaaccugugccccuucggcgagguguucaacgccacccgguucgccagcgucuacgccuggaaccgcaagcggaucuccaacugcguggcggacuacagcgugcuguacaacuccgccagcuucuccacguucaagugcuacggcgucagccccaccaagcucaacgaccugugcuucaccaacguguacgccgacuccuucgugauccgcggggacgagguccggcagaucgcccccggccagaccgggaagaucgccgacuacaacuacaagcugccggacgacuucacgggcugcgugaucgcguggaacagcaacaaccucgacuccaaggucgggggcaacuacaacuaccuguaccgccuguuccgcaagagcaaccucaagcccuucgagcgggacaucuccaccgagaucuaccaggccggcagcacccccugcaacgggguggagggcuucaacugcuacuucccccugcaguccuacggguuccagccgaccaacggcgugggguaccagcccuaccggguggucgugcugagcuucgagcuccugcacgcccccgccacggugugcggccccaagaaguccaccaaccuggucaagaacaagugcgugaacuucaacuucaacggccucaccgggaccggcgugcugaccgagagcaacaagaaguuccugccguuccagcaguucgggcgcgacaucgccgacacgaccgacgcgguccgcgacccccagacccuggagauccucgacaucacccccugcagcuucggcgggguguccgugaucacgccgggcaccaacaccagcaaccaggucgccgugcuguaccagggcgugaacugcaccgagguccccguggccauccacgccgaccagcugacgcccaccuggcggguguacuccaccggcagcaacgucuuccagacccgcgccgggugccucaucggcgcggagcacgugaacaacuccuacgagugcgacauccccaucggggccggcaucugcgccagcuaccagacgcagaccaacuccccgcggcgcgcccggagcguggcgucccagagcaucaucgccuacaccaugucccugggcgccgagaacagcgucgccuacuccaacaacagcaucgccauccccaccaacuucacgaucuccgugaccaccgagauccugcccgugagcaugaccaagacgagcgucgacugcaccauguacaucugcggggacuccaccgagugcagcaaccuccugcugcaguacggcuccuucugcacccagcucaaccgcgcgcugacggggaucgccguggagcaggacaagaacacccaggagguguucgcccaggucaagcagaucuacaagacgcccccgaucaaggacuucggcggguucaacuucagccagauccugcccgaccccuccaagcccagcaagcgguccuucaucgaggaccuccuguucaacaaggugacccuggccgacgccggcuucaucaagcaguacggcgacugccucggggacaucgcggcccgcgaccugaucugcgcccagaaguucaacggccugaccgugcucccgccccugcugaccgacgagaugaucgcccaguacaccagcgcccuccuggcggggaccaucacguccggcuggaccuucggggccggcgccgcccugcagauccccuucgcgaugcagauggccuaccgguucaacggcaucggggucacccagaacgugcucuacgagaaccagaagcugaucgccaaccaguucaacagcgccaucggcaagauccaggacucccugagcuccaccgccagcgcgcucgggaagcugcaggacguggucaaccagaacgcccaggcccugaacacgcucgugaagcagcuguccagcaacuucggcgccaucuccagcgugcugaacgacauccucucccgccuggacccgcccgaggccgaggugcagaucgaccggcugaucaccgggcgccuccagagccugcagaccuacgugacccagcagcugauccgggcggccgagauccgcgccagcgccaaccucgccgcgaccaagauguccgagugcguccugggccagagcaagcggguggacuucugcggcaagggguaccaccugauguccuucccccagagcgccccgcacggcguggucuuccuccacgugacguacguccccgcccaggagaagaacuucaccaccgcccccgcgaucugccacgacgggaaggcccacuucccccgcgagggcguguucguguccaacgggacccacugguucgucacgcagcggaacuucuacgagccgcagaucaucaccaccgacaacaccuucgugagcggcaacugcgacguggucaucggcaucgugaacaacacgguguacgacccccugcagcccgagcuggacuccuucaaggaggagcucgacaaguacuucaagaaccacaccagccccgacgucgaccugggggacaucuccggcaucaacgccagcguggugaacauccagaaggagaucgaccgccugaacgaggucgccaagaaccucaacgagucccugaucgaccugcaggagcucgggaaguacgagcaguacaucaaguggccgugguacaucuggcugggcuucaucgccggccugaucgcgaucgugauggugaccaucaugcucugcugcaugaccagcugcugcuccugccugaaggggugcugcagcugcggcuccugcugcaaguucgacgaggacgacagcgagcccguccugaagggggugaagcuccacuacacgugaugacucgagcugguacugcaugcacgcaaugcuagcugccccuuucccguccuggguaccccgagucucccccgaccucgggucccagguaugcucccaccuccaccugccccacucaccaccucugcuaguuccagacaccucccaagcacgcagcaaugcagcucaaaacgcuuagccuagccacacccccacgggaaacagcagugauuaaccuuuagcaauaaacgaaaguuuaacuaagcuauacuaaccccaggguuggucaauuucgugccagccacacccuggagcuagcaaaaaaaaaaaaaaaaaaaaaaaaaaaaaaaaaaaaaaaaaaaaaaaaaaaaaaaaaaaaaaaaaaaaaaaaaaaaaaaaaaaaaaaaaaaaaaaaaaaa

SEQ ID NO: 26384 - RNA, 4273 nt, Artificial Sequence
  SARS-CoV-2/Wuhan/WIV05/2019__EPI_ISL_402128 spike protein mRNA gc (1-1273)(K986P_V987P_Y453F_D614G)
agaauaaacuaguauucuucugguccccacagacucagagagaacccgccaccauguucguguuccugguccuccugccccuggugagcucccagugcgugaaccucaccacccgcacgcagcugccgcccgccuacaccaacagcuucacccggggcgucuacuaccccgacaagguguuccgcuccagcgugcugcacuccacccaggaccucuuccugcccuucuucagcaacgucacgugguuccacgccauccacguguccgggaccaacggcaccaagcgguucgacaacccggugcugcccuucaacgacggggucuacuucgcgagcaccgagaaguccaacaucauccgcggcuggaucuucgggacgacccucgacagcaagacccagucccugcugaucgugaacaacgccaccaacguggucaucaaggugugcgaguuccaguucugcaacgaccccuuccucggcguguacuaccacaagaacaacaagagcuggauggaguccgaguuccgggucuacagcuccgccaacaacugcacguucgaguacgugagccagcccuuccugauggaccuggagggcaagcaggggaacuucaagaaccuccgcgaguucguguucaagaacaucgacggcuacuucaagaucuacuccaagcacaccccgaucaaccugguccgggaccugccccagggguucagcgcccucgagccccugguggaccugcccaucggcaucaacaucacccgcuuccagacccuccuggcccugcaccgguccuaccucacgccgggggacagcagcuccggcuggaccgcgggcgccgccgccuacuacgugggguaccugcagccccgcaccuuccugcucaaguacaacgagaacggcaccaucacggacgcggucgacugcgcccuggacccccugagcgagaccaagugcacccucaaguccuucaccguggagaaggggaucuaccagacgagcaacuuccgggugcagcccaccgaguccaucguccgcuucccgaacaucaccaaccugugccccuucggcgagguguucaacgccacccgguucgccagcgucuacgccuggaaccgcaagcggaucuccaacugcguggcggacuacagcgugcuguacaacuccgccagcuucuccacguucaagugcuacggcgucagccccaccaagcucaacgaccugugcuucaccaacguguacgccgacuccuucgugauccgcggggacgagguccggcagaucgcccccggccagaccgggaagaucgccgacuacaacuacaagcugccggacgacuucacgggcugcgugaucgcguggaacagcaacaaccucgacuccaaggucgggggcaacuacaacuaccuguuccgccuguuccgcaagagcaaccucaagcccuucgagcgggacaucuccaccgagaucuaccaggccggcagcacccccugcaacgggguggagggcuucaacugcuacuucccccugcaguccuacggguuccagccgaccaacggcgugggguaccagcccuaccggguggucgugcugagcuucgagcuccugcacgcccccgccacggugugcggccccaagaaguccaccaaccuggucaagaacaagugcgugaacuucaacuucaacggccucaccgggaccggcgugcugaccgagagcaacaagaaguuccugccguuccagcaguucgggcgcgacaucgccgacacgaccgacgcgguccgcgacccccagacccuggagauccucgacaucacccccugcagcuucggcgggguguccgugaucacgccgggcaccaacaccagcaaccaggucgccgugcuguaccagggcgugaacugcaccgagguccccguggccauccacgccgaccagcugacgcccaccuggcggguguacuccaccggcagcaacgucuuccagacccgcgccgggugccucaucggcgcggagcacgugaacaacuccuacgagugcgacauccccaucggggccggcaucugcgccagcuaccagacgcagaccaacuccccgcggcgcgcccggagcguggcgucccagagcaucaucgccuacaccaugucccugggcgccgagaacagcgucgccuacuccaacaacagcaucgccauccccaccaacuucacgaucuccgugaccaccgagauccugcccgugagcaugaccaagacgagcgucgacugcaccauguacaucugcggggacuccaccgagugcagcaaccuccugcugcaguacggcuccuucugcacccagcucaaccgcgcgcugacggggaucgccguggagcaggacaagaacacccaggagguguucgcccaggucaagcagaucuacaagacgcccccgaucaaggacuucggcggguucaacuucagccagauccugcccgaccccuccaagcccagcaagcgguccuucaucgaggaccuccuguucaacaaggugacccuggccgacgccggcuucaucaagcaguacggcgacugccucggggacaucgcggcccgcgaccugaucugcgcccagaaguucaacggccugaccgugcucccgccccugcugaccgacgagaugaucgcccaguacaccagcgcccuccuggcggggaccaucacguccggcuggaccuucggggccggcgccgcccugcagauccccuucgcgaugcagauggccuaccgguucaacggcaucggggucacccagaacgugcucuacgagaaccagaagcugaucgccaaccaguucaacagcgccaucggcaagauccaggacucccugagcuccaccgccagcgcgcucgggaagcugcaggacguggucaaccagaacgcccaggcccugaacacgcucgugaagcagcuguccagcaacuucggcgccaucuccagcgugcugaacgacauccucucccgccuggacccgcccgaggccgaggugcagaucgaccggcugaucaccgggcgccuccagagccugcagaccuacgugacccagcagcugauccgggcggccgagauccgcgccagcgccaaccucgccgcgaccaagauguccgagugcguccugggccagagcaagcggguggacuucugcggcaagggguaccaccugauguccuucccccagagcgccccgcacggcguggucuuccuccacgugacguacguccccgcccaggagaagaacuucaccaccgcccccgcgaucugccacgacgggaaggcccacuucccccgcgagggcguguucguguccaacgggacccacugguucgucacgcagcggaacuucuacgagccgcagaucaucaccaccgacaacaccuucgugagcggcaacugcgacguggucaucggcaucgugaacaacacgguguacgacccccugcagcccgagcuggacuccuucaaggaggagcucgacaaguacuucaagaaccacaccagccccgacgucgaccugggggacaucuccggcaucaacgccagcguggugaacauccagaaggagaucgaccgccugaacgaggucgccaagaaccucaacgagucccugaucgaccugcaggagcucgggaaguacgagcaguacaucaaguggccgugguacaucuggcugggcuucaucgccggccugaucgcgaucgugauggugaccaucaugcucugcugcaugaccagcugcugcuccugccugaaggggugcugcagcugcggcuccugcugcaaguucgacgaggacgacagcgagcccguccugaagggggugaagcuccacuacacgugaugacucgagcugguacugcaugcacgcaaugcuagcugccccuuucccguccuggguaccccgagucucccccgaccucgggucccagguaugcucccaccuccaccugccccacucaccaccucugcuaguuccagacaccucccaagcacgcagcaaugcagcucaaaacgcuuagccuagccacacccccacgggaaacagcagugauuaaccuuuagcaauaaacgaaaguuuaacuaagcuauacuaaccccaggguuggucaauuucgugccagccacacccuggagcuagcaaaaaaaaaaaaaaaaaaaaaaaaaaaaaaaaaaaaaaaaaaaaaaaaaaaaaaaaaaaaaaaaaaaaaaaaaaaaaaaaaaaaaaaaaaaaaaaaaaaa

SEQ ID NO: 26385 - RNA, 4273 nt, Artificial Sequence
  SARS-CoV-2/Wuhan/WIV05/2019__EPI_ISL_402128 spike protein mRNA gc (1-1273)(K986P_V987P_D614G_I692V)
agaauaaacuaguauucuucugguccccacagacucagagagaacccgccaccauguucguguuccugguccuccugccccuggugagcucccagugcgugaaccucaccacccgcacgcagcugccgcccgccuacaccaacagcuucacccggggcgucuacuaccccgacaagguguuccgcuccagcgugcugcacuccacccaggaccucuuccugcccuucuucagcaacgucacgugguuccacgccauccacguguccgggaccaacggcaccaagcgguucgacaacccggugcugcccuucaacgacggggucuacuucgcgagcaccgagaaguccaacaucauccgcggcuggaucuucgggacgacccucgacagcaagacccagucccugcugaucgugaacaacgccaccaacguggucaucaaggugugcgaguuccaguucugcaacgaccccuuccucggcguguacuaccacaagaacaacaagagcuggauggaguccgaguuccgggucuacagcuccgccaacaacugcacguucgaguacgugagccagcccuuccugauggaccuggagggcaagcaggggaacuucaagaaccuccgcgaguucguguucaagaacaucgacggcuacuucaagaucuacuccaagcacaccccgaucaaccugguccgggaccugccccagggguucagcgcccucgagccccugguggaccugcccaucggcaucaacaucacccgcuuccagacccuccuggcccugcaccgguccuaccucacgccgggggacagcagcuccggcuggaccgcgggcgccgccgccuacuacgugggguaccugcagccccgcaccuuccugcucaaguacaacgagaacggcaccaucacggacgcggucgacugcgcccuggacccccugagcgagaccaagugcacccucaaguccuucaccguggagaaggggaucuaccagacgagcaacuuccgggugcagcccaccgaguccaucguccgcuucccgaacaucaccaaccugugccccuucggcgagguguucaacgccacccgguucgccagcgucuacgccuggaaccgcaagcggaucuccaacugcguggcggacuacagcgugcuguacaacuccgccagcuucuccacguucaagugcuacggcgucagccccaccaagcucaacgaccugugcuucaccaacguguacgccgacuccuucgugauccgcggggacgagguccggcagaucgcccccggccagaccgggaagaucgccgacuacaacuacaagcugccggacgacuucacgggcugcgugaucgcguggaacagcaacaaccucgacuccaaggucgggggcaacuacaacuaccuguaccgccuguuccgcaagagcaaccucaagcccuucgagcgggacaucuccaccgagaucuaccaggccggcagcacccccugcaacgggguggagggcuucaacugcuacuucccccugcaguccuacggguuccagccgaccaacggcgugggguaccagcccuaccggguggucgugcugagcuucgagcuccugcacgcccccgccacggugugcggccccaagaaguccaccaaccuggucaagaacaagugcgugaacuucaacuucaacggccucaccgggaccggcgugcugaccgagagcaacaagaaguuccugccguuccagcaguucgggcgcgacaucgccgacacgaccgacgcgguccgcgacccccagacccuggagauccucgacaucacccccugcagcuucggcgggguguccgugaucacgccgggcaccaacaccagcaaccaggucgccgugcuguaccagggcgugaacugcaccgagguccccguggccauccacgccgaccagcugacgcccaccuggcggguguacuccaccggcagcaacgucuuccagacccgcgccgggugccucaucggcgcggagcacgugaacaacuccuacgagugcgacauccccaucggggccggcaucugcgccagcuaccagacgcagaccaacuccccgcggcgcgcccggagcguggcgucccagagcgucaucgccuacaccaugucccugggcgccgagaacagcgucgccuacuccaacaacagcaucgccauccccaccaacuucacgaucuccgugaccaccgagauccugcccgugagcaugaccaagacgagcgucgacugcaccauguacaucugcggggacuccaccgagugcagcaaccuccugcugcaguacggcuccuucugcacccagcucaaccgcgcgcugacggggaucgccguggagcaggacaagaacacccaggagguguucgcccaggucaagcagaucuacaagacgcccccgaucaaggacuucggcggguucaacuucagccagauccugcccgaccccuccaagcccagcaagcgguccuucaucgaggaccuccuguucaacaaggugacccuggccgacgccggcuucaucaagcaguacggcgacugccucggggacaucgcggcccgcgaccugaucugcgcccagaaguucaacggccugaccgugcucccgccccugcugaccgacgagaugaucgcccaguacaccagcgcccuccuggcggggaccaucacguccggcuggaccuucggggccggcgccgcccugcagauccccuucgcgaugcagauggccuaccgguucaacggcaucggggucacccagaacgugcucuacgagaaccagaagcugaucgccaaccaguucaacagcgccaucggcaagauccaggacucccugagcuccaccgccagcgcgcucgggaagcugcaggacguggucaaccagaacgcccaggcccugaacacgcucgugaagcagcuguccagcaacuucggcgccaucuccagcgugcugaacgacauccucucccgccuggacccgcccgaggccgaggugcagaucgaccggcugaucaccgggcgccuccagagccugcagaccuacgugacccagcagcugauccgggcggccgagauccgcgccagcgccaaccucgccgcgaccaagauguccgagugcguccugggccagagcaagcggguggacuucugcggcaagggguaccaccugauguccuucccccagagcgccccgcacggcguggucuuccuccacgugacguacguccccgcccaggagaagaacuucaccaccgcccccgcgaucugccacgacgggaaggcccacuucccccgcgagggcguguucguguccaacgggacccacugguucgucacgcagcggaacuucuacgagccgcagaucaucaccaccgacaacaccuucgugagcggcaacugcgacguggucaucggcaucgugaacaacacgguguacgacccccugcagcccgagcuggacuccuucaaggaggagcucgacaaguacuucaagaaccacaccagccccgacgucgaccugggggacaucuccggcaucaacgccagcguggugaacauccagaaggagaucgaccgccugaacgaggucgccaagaaccucaacgagucccugaucgaccugcaggagcucgggaaguacgagcaguacaucaaguggccgugguacaucuggcugggcuucaucgccggccugaucgcgaucgugauggugaccaucaugcucugcugcaugaccagcugcugcuccugccugaaggggugcugcagcugcggcuccugcugcaaguucgacgaggacgacagcgagcccguccugaagggggugaagcuccacuacacgugaugacucgagcugguacugcaugcacgcaaugcuagcugccccuuucccguccuggguaccccgagucucccccgaccucgggucccagguaugcucccaccuccaccugccccacucaccaccucugcuaguuccagacaccucccaagcacgcagcaaugcagcucaaaacgcuuagccuagccacacccccacgggaaacagcagugauuaaccuuuagcaauaaacgaaaguuuaacuaagcuauacuaaccccaggguuggucaauuucgugccagccacacccuggagcuagcaaaaaaaaaaaaaaaaaaaaaaaaaaaaaaaaaaaaaaaaaaaaaaaaaaaaaaaaaaaaaaaaaaaaaaaaaaaaaaaaaaaaaaaaaaaaaaaaaaaa

SEQ ID NO: 26386 - RNA, 4273 nt, Artificial Sequence
  SARS-CoV-2/Wuhan/WIV05/2019__EPI_ISL_402128 spike protein mRNA gc (1-1273)(K986P_V987P_D614G_M1229I)
agaauaaacuaguauucuucugguccccacagacucagagagaacccgccaccauguucguguuccugguccuccugccccuggugagcucccagugcgugaaccucaccacccgcacgcagcugccgcccgccuacaccaacagcuucacccggggcgucuacuaccccgacaagguguuccgcuccagcgugcugcacuccacccaggaccucuuccugcccuucuucagcaacgucacgugguuccacgccauccacguguccgggaccaacggcaccaagcgguucgacaacccggugcugcccuucaacgacggggucuacuucgcgagcaccgagaaguccaacaucauccgcggcuggaucuucgggacgacccucgacagcaagacccagucccugcugaucgugaacaacgccaccaacguggucaucaaggugugcgaguuccaguucugcaacgaccccuuccucggcguguacuaccacaagaacaacaagagcuggauggaguccgaguuccgggucuacagcuccgccaacaacugcacguucgaguacgugagccagcccuuccugauggaccuggagggcaagcaggggaacuucaagaaccuccgcgaguucguguucaagaacaucgacggcuacuucaagaucuacuccaagcacaccccgaucaaccugguccgggaccugccccagggguucagcgcccucgagccccugguggaccugcccaucggcaucaacaucacccgcuuccagacccuccuggcccugcaccgguccuaccucacgccgggggacagcagcuccggcuggaccgcgggcgccgccgccuacuacgugggguaccugcagccccgcaccuuccugcucaaguacaacgagaacggcaccaucacggacgcggucgacugcgcccuggacccccugagcgagaccaagugcacccucaaguccuucaccguggagaaggggaucuaccagacgagcaacuuccgggugcagcccaccgaguccaucguccgcuucccgaacaucaccaaccugugccccuucggcgagguguucaacgccacccgguucgccagcgucuacgccuggaaccgcaagcggaucuccaacugcguggcggacuacagcgugcuguacaacuccgccagcuucuccacguucaagugcuacggcgucagccccaccaagcucaacgaccugugcuucaccaacguguacgccgacuccuucgugauccgcggggacgagguccggcagaucgcccccggccagaccgggaagaucgccgacuacaacuacaagcugccggacgacuucacgggcugcgugaucgcguggaacagcaacaaccucgacuccaaggucgggggcaacuacaacuaccuguaccgccuguuccgcaagagcaaccucaagcccuucgagcgggacaucuccaccgagaucuaccaggccggcagcacccccugcaacgggguggagggcuucaacugcuacuucccccugcaguccuacggguuccagccgaccaacggcgugggguaccagcccuaccggguggucgugcugagcuucgagcuccugcacgcccccgccacggugugcggccccaagaaguccaccaaccuggucaagaacaagugcgugaacuucaacuucaacggccucaccgggaccggcgugcugaccgagagcaacaagaaguuccugccguuccagcaguucgggcgcgacaucgccgacacgaccgacgcgguccgcgacccccagacccuggagauccucgacaucacccccugcagcuucggcgggguguccgugaucacgccgggcaccaacaccagcaaccaggucgccgugcuguaccagggcgugaacugcaccgagguccccguggccauccacgccgaccagcugacgcccaccuggcggguguacuccaccggcagcaacgucuuccagacccgcgccgggugccucaucggcgcggagcacgugaacaacuccuacgagugcgacauccccaucggggccggcaucugcgccagcuaccagacgcagaccaacuccccgcggcgcgcccggagcguggcgucccagagcaucaucgccuacaccaugucccugggcgccgagaacagcgucgccuacuccaacaacagcaucgccauccccaccaacuucacgaucuccgugaccaccgagauccugcccgugagcaugaccaagacgagcgucgacugcaccauguacaucugcggggacuccaccgagugcagcaaccuccugcugcaguacggcuccuucugcacccagcucaaccgcgcgcugacggggaucgccguggagcaggacaagaacacccaggagguguucgcccaggucaagcagaucuacaagacgcccccgaucaaggacuucggcggguucaacuucagccagauccugcccgaccccuccaagcccagcaagcgguccuucaucgaggaccuccuguucaacaaggugacccuggccgacgccggcuucaucaagcaguacggcgacugccucggggacaucgcggcccgcgaccugaucugcgcccagaaguucaacggccugaccgugcucccgccccugcugaccgacgagaugaucgcccaguacaccagcgcccuccuggcggggaccaucacguccggcuggaccuucggggccggcgccgcccugcagauccccuucgcgaugcagauggccuaccgguucaacggcaucggggucacccagaacgugcucuacgagaaccagaagcugaucgccaaccaguucaacagcgccaucggcaagauccaggacucccugagcuccaccgccagcgcgcucgggaagcugcaggacguggucaaccagaacgcccaggcccugaacacgcucgugaagcagcuguccagcaacuucggcgccaucuccagcgugcugaacgacauccucucccgccuggacccgcccgaggccgaggugcagaucgaccggcugaucaccgggcgccuccagagccugcagaccuacgugacccagcagcugauccgggcggccgagauccgcgccagcgccaaccucgccgcgaccaagauguccgagugcguccugggccagagcaagcggguggacuucugcggcaagggguaccaccugauguccuucccccagagcgccccgcacggcguggucuuccuccacgugacguacguccccgcccaggagaagaacuucaccaccgcccccgcgaucugccacgacgggaaggcccacuucccccgcgagggcguguucguguccaacgggacccacugguucgucacgcagcggaacuucuacgagccgcagaucaucaccaccgacaacaccuucgugagcggcaacugcgacguggucaucggcaucgugaacaacacgguguacgacccccugcagcccgagcuggacuccuucaaggaggagcucgacaaguacuucaagaaccacaccagccccgacgucgaccugggggacaucuccggcaucaacgccagcguggugaacauccagaaggagaucgaccgccugaacgaggucgccaagaaccucaacgagucccugaucgaccugcaggagcucgggaaguacgagcaguacaucaaguggccgugguacaucuggcugggcuucaucgccggccugaucgcgaucgugaucgugaccaucaugcucugcugcaugaccagcugcugcuccugccugaaggggugcugcagcugcggcuccugcugcaaguucgacgaggacgacagcgagcccguccugaagggggugaagcuccacuacacgugaugacucgagcugguacugcaugcacgcaaugcuagcugccccuuucccguccuggguaccccgagucucccccgaccucgggucccagguaugcucccaccuccaccugccccacucaccaccucugcuaguuccagacaccucccaagcacgcagcaaugcagcucaaaacgcuuagccuagccacacccccacgggaaacagcagugauuaaccuuuagcaauaaacgaaaguuuaacuaagcuauacuaaccccaggguuggucaauuucgugccagccacacccuggagcuagcaaaaaaaaaaaaaaaaaaaaaaaaaaaaaaaaaaaaaaaaaaaaaaaaaaaaaaaaaaaaaaaaaaaaaaaaaaaaaaaaaaaaaaaaaaaaaaaaaaaa

SEQ ID NO: 26387 - RNA, 4267 nt, Artificial Sequence
  SARS-CoV-2/Wuhan/WIV05/2019__EPI_ISL_402128 spike protein mRNA gc (1-1273)(K986P_V987P_H69del_V70del_A222V_Y453F_S477N_D614G_I692V)
agaauaaacuaguauucuucugguccccacagacucagagagaacccgccaccauguucguguuccugguccuccugccccuggugagcucccagugcgugaaccucaccacccgcacgcagcugccgcccgccuacaccaacagcuucacccggggcgucuacuaccccgacaagguguuccgcuccagcgugcugcacuccacccaggaccucuuccugcccuucuucagcaacgucacgugguuccacgccaucuccgggaccaacggcaccaagcgguucgacaacccggugcugcccuucaacgacggggucuacuucgcgagcaccgagaaguccaacaucauccgcggcuggaucuucgggacgacccucgacagcaagacccagucccugcugaucgugaacaacgccaccaacguggucaucaaggugugcgaguuccaguucugcaacgaccccuuccucggcguguacuaccacaagaacaacaagagcuggauggaguccgaguuccgggucuacagcuccgccaacaacugcacguucgaguacgugagccagcccuuccugauggaccuggagggcaagcaggggaacuucaagaaccuccgcgaguucguguucaagaacaucgacggcuacuucaagaucuacuccaagcacaccccgaucaaccugguccgggaccugccccagggguucagcguccucgagccccugguggaccugcccaucggcaucaacaucacccgcuuccagacccuccuggcccugcaccgguccuaccucacgccgggggacagcagcuccggcuggaccgcgggcgccgccgccuacuacgugggguaccugcagccccgcaccuuccugcucaaguacaacgagaacggcaccaucacggacgcggucgacugcgcccuggacccccugagcgagaccaagugcacccucaaguccuucaccguggagaaggggaucuaccagacgagcaacuuccgggugcagcccaccgaguccaucguccgcuucccgaacaucaccaaccugugccccuucggcgagguguucaacgccacccgguucgccagcgucuacgccuggaaccgcaagcggaucuccaacugcguggcggacuacagcgugcuguacaacuccgccagcuucuccacguucaagugcuacggcgucagccccaccaagcucaacgaccugugcuucaccaacguguacgccgacuccuucgugauccgcggggacgagguccggcagaucgcccccggccagaccgggaagaucgccgacuacaacuacaagcugccggacgacuucacgggcugcgugaucgcguggaacagcaacaaccucgacuccaaggucgggggcaacuacaacuaccuguuccgccuguuccgcaagagcaaccucaagcccuucgagcgggacaucuccaccgagaucuaccaggccggcaacacccccugcaacgggguggagggcuucaacugcuacuucccccugcaguccuacggguuccagccgaccaacggcgugggguaccagcccuaccggguggucgugcugagcuucgagcuccugcacgcccccgccacggugugcggccccaagaaguccaccaaccuggucaagaacaagugcgugaacuucaacuucaacggccucaccgggaccggcgugcugaccgagagcaacaagaaguuccugccguuccagcaguucgggcgcgacaucgccgacacgaccgacgcgguccgcgacccccagacccuggagauccucgacaucacccccugcagcuucggcgggguguccgugaucacgccgggcaccaacaccagcaaccaggucgccgugcuguaccagggcgugaacugcaccgagguccccguggccauccacgccgaccagcugacgcccaccuggcggguguacuccaccggcagcaacgucuuccagacccgcgccgggugccucaucggcgcggagcacgugaacaacuccuacgagugcgacauccccaucggggccggcaucugcgccagcuaccagacgcagaccaacuccccgcggcgcgcccggagcguggcgucccagagcgucaucgccuacaccaugucccugggcgccgagaacagcgucgccuacuccaacaacagcaucgccauccccaccaacuucacgaucuccgugaccaccgagauccugcccgugagcaugaccaagacgagcgucgacugcaccauguacaucugcggggacuccaccgagugcagcaaccuccugcugcaguacggcuccuucugcacccagcucaaccgcgcgcugacggggaucgccguggagcaggacaagaacacccaggagguguucgcccaggucaagcagaucuacaagacgcccccgaucaaggacuucggcggguucaacuucagccagauccugcccgaccccuccaagcccagcaagcgguccuucaucgaggaccuccuguucaacaaggugacccuggccgacgccggcuucaucaagcaguacggcgacugccucggggacaucgcggcccgcgaccugaucugcgcccagaaguucaacggccugaccgugcucccgccccugcugaccgacgagaugaucgcccaguacaccagcgcccuccuggcggggaccaucacguccggcuggaccuucggggccggcgccgcccugcagauccccuucgcgaugcagauggccuaccgguucaacggcaucggggucacccagaacgugcucuacgagaaccagaagcugaucgccaaccaguucaacagcgccaucggcaagauccaggacucccugagcuccaccgccagcgcgcucgggaagcugcaggacguggucaaccagaacgcccaggcccugaacacgcucgugaagcagcuguccagcaacuucggcgccaucuccagcgugcugaacgacauccucucccgccuggacccgcccgaggccgaggugcagaucgaccggcugaucaccgggcgccuccagagccugcagaccuacgugacccagcagcugauccgggcggccgagauccgcgccagcgccaaccucgccgcgaccaagauguccgagugcguccugggccagagcaagcggguggacuucugcggcaagggguaccaccugauguccuucccccagagcgccccgcacggcguggucuuccuccacgugacguacguccccgcccaggagaagaacuucaccaccgcccccgcgaucugccacgacgggaaggcccacuucccccgcgagggcguguucguguccaacgggacccacugguucgucacgcagcggaacuucuacgagccgcagaucaucaccaccgacaacaccuucgugagcggcaacugcgacguggucaucggcaucgugaacaacacgguguacgacccccugcagcccgagcuggacuccuucaaggaggagcucgacaaguacuucaagaaccacaccagccccgacgucgaccugggggacaucuccggcaucaacgccagcguggugaacauccagaaggagaucgaccgccugaacgaggucgccaagaaccucaacgagucccugaucgaccugcaggagcucgggaaguacgagcaguacaucaaguggccgugguacaucuggcugggcuucaucgccggccugaucgcgaucgugauggugaccaucaugcucugcugcaugaccagcugcugcuccugccugaaggggugcugcagcugcggcuccugcugcaaguucgacgaggacgacagcgagcccguccugaagggggugaagcuccacuacacgugaugacucgagcugguacugcaugcacgcaaugcuagcugccccuuucccguccuggguaccccgagucucccccgaccucgggucccagguaugcucccaccuccaccugccccacucaccaccucugcuaguuccagacaccucccaagcacgcagcaaugcagcucaaaacgcuuagccuagccacacccccacgggaaacagcagugauuaaccuuuagcaauaaacgaaaguuuaacuaagcuauacuaaccccaggguuggucaauuucgugccagccacacccuggagcuagcaaaaaaaaaaaaaaaaaaaaaaaaaaaaaaaaaaaaaaaaaaaaaaaaaaaaaaaaaaaaaaaaaaaaaaaaaaaaaaaaaaaaaaaaaaaaaaaaaaaa

SEQ ID NO: 26388 - RNA, 4267 nt, Artificial Sequence
  SARS-CoV-2/Wuhan/WIV05/2019__EPI_ISL_402128 spike protein mRNA gc (1-1273)(K986P_V987P_H69del_V70del_Y453F_D614G_I692V_M1229I)
agaauaaacuaguauucuucugguccccacagacucagagagaacccgccaccauguucguguuccugguccuccugccccuggugagcucccagugcgugaaccucaccacccgcacgcagcugccgcccgccuacaccaacagcuucacccggggcgucuacuaccccgacaagguguuccgcuccagcgugcugcacuccacccaggaccucuuccugcccuucuucagcaacgucacgugguuccacgccaucuccgggaccaacggcaccaagcgguucgacaacccggugcugcccuucaacgacggggucuacuucgcgagcaccgagaaguccaacaucauccgcggcuggaucuucgggacgacccucgacagcaagacccagucccugcugaucgugaacaacgccaccaacguggucaucaaggugugcgaguuccaguucugcaacgaccccuuccucggcguguacuaccacaagaacaacaagagcuggauggaguccgaguuccgggucuacagcuccgccaacaacugcacguucgaguacgugagccagcccuuccugauggaccuggagggcaagcaggggaacuucaagaaccuccgcgaguucguguucaagaacaucgacggcuacuucaagaucuacuccaagcacaccccgaucaaccugguccgggaccugccccagggguucagcgcccucgagccccugguggaccugcccaucggcaucaacaucacccgcuuccagacccuccuggcccugcaccgguccuaccucacgccgggggacagcagcuccggcuggaccgcgggcgccgccgccuacuacgugggguaccugcagccccgcaccuuccugcucaaguacaacgagaacggcaccaucacggacgcggucgacugcgcccuggacccccugagcgagaccaagugcacccucaaguccuucaccguggagaaggggaucuaccagacgagcaacuuccgggugcagcccaccgaguccaucguccgcuucccgaacaucaccaaccugugccccuucggcgagguguucaacgccacccgguucgccagcgucuacgccuggaaccgcaagcggaucuccaacugcguggcggacuacagcgugcuguacaacuccgccagcuucuccacguucaagugcuacggcgucagccccaccaagcucaacgaccugugcuucaccaacguguacgccgacuccuucgugauccgcggggacgagguccggcagaucgcccccggccagaccgggaagaucgccgacuacaacuacaagcugccggacgacuucacgggcugcgugaucgcguggaacagcaacaaccucgacuccaaggucgggggcaacuacaacuaccuguuccgccuguuccgcaagagcaaccucaagcccuucgagcgggacaucuccaccgagaucuaccaggccggcagcacccccugcaacgggguggagggcuucaacugcuacuucccccugcaguccuacggguuccagccgaccaacggcgugggguaccagcccuaccggguggucgugcugagcuucgagcuccugcacgcccccgccacggugugcggccccaagaaguccaccaaccuggucaagaacaagugcgugaacuucaacuucaacggccucaccgggaccggcgugcugaccgagagcaacaagaaguuccugccguuccagcaguucgggcgcgacaucgccgacacgaccgacgcgguccgcgacccccagacccuggagauccucgacaucacccccugcagcuucggcgggguguccgugaucacgccgggcaccaacaccagcaaccaggucgccgugcuguaccagggcgugaacugcaccgagguccccguggccauccacgccgaccagcugacgcccaccuggcggguguacuccaccggcagcaacgucuuccagacccgcgccgggugccucaucggcgcggagcacgugaacaacuccuacgagugcgacauccccaucggggccggcaucugcgccagcuaccagacgcagaccaacuccccgcggcgcgcccggagcguggcgucccagagcgugaucgccuacaccaugucccugggcgccgagaacagcgucgccuacuccaacaacagcaucgccauccccaccaacuucacgaucuccgugaccaccgagauccugcccgugagcaugaccaagacgagcgucgacugcaccauguacaucugcggggacuccaccgagugcagcaaccuccugcugcaguacggcuccuucugcacccagcucaaccgcgcgcugacggggaucgccguggagcaggacaagaacacccaggagguguucgcccaggucaagcagaucuacaagacgcccccgaucaaggacuucggcggguucaacuucagccagauccugcccgaccccuccaagcccagcaagcgguccuucaucgaggaccuccuguucaacaaggugacccuggccgacgccggcuucaucaagcaguacggcgacugccucggggacaucgcggcccgcgaccugaucugcgcccagaaguucaacggccugaccgugcucccgccccugcugaccgacgagaugaucgcccaguacaccagcgcccuccuggcggggaccaucacguccggcuggaccuucggggccggcgccgcccugcagauccccuucgcgaugcagauggccuaccgguucaacggcaucggggucacccagaacgugcucuacgagaaccagaagcugaucgccaaccaguucaacagcgccaucggcaagauccaggacucccugagcuccaccgccagcgcgcucgggaagcugcaggacguggucaaccagaacgcccaggcccugaacacgcucgugaagcagcuguccagcaacuucggcgccaucuccagcgugcugaacgacauccucucccgccuggacccgcccgaggccgaggugcagaucgaccggcugaucaccgggcgccuccagagccugcagaccuacgugacccagcagcugauccgggcggccgagauccgcgccagcgccaaccucgccgcgaccaagauguccgagugcguccugggccagagcaagcggguggacuucugcggcaagggguaccaccugauguccuucccccagagcgccccgcacggcguggucuuccuccacgugacguacguccccgcccaggagaagaacuucaccaccgcccccgcgaucugccacgacgggaaggcccacuucccccgcgagggcguguucguguccaacgggacccacugguucgucacgcagcggaacuucuacgagccgcagaucaucaccaccgacaacaccuucgugagcggcaacugcgacguggucaucggcaucgugaacaacacgguguacgacccccugcagcccgagcuggacuccuucaaggaggagcucgacaaguacuucaagaaccacaccagccccgacgucgaccugggggacaucuccggcaucaacgccagcguggugaacauccagaaggagaucgaccgccugaacgaggucgccaagaaccucaacgagucccugaucgaccugcaggagcucgggaaguacgagcaguacaucaaguggccgugguacaucuggcugggcuucaucgccggccugaucgcgaucgugaucgugaccaucaugcucugcugcaugaccagcugcugcuccugccugaaggggugcugcagcugcggcuccugcugcaaguucgacgaggacgacagcgagcccguccugaagggggugaagcuccacuacacgugaugacucgagcugguacugcaugcacgcaaugcuagcugccccuuucccguccuggguaccccgagucucccccgaccucgggucccagguaugcucccaccuccaccugccccacucaccaccucugcuaguuccagacaccucccaagcacgcagcaaugcagcucaaaacgcuuagccuagccacacccccacgggaaacagcagugauuaaccuuuagcaauaaacgaaaguuuaacuaagcuauacuaaccccaggguuggucaauuucgugccagccacacccuggagcuagcaaaaaaaaaaaaaaaaaaaaaaaaaaaaaaaaaaaaaaaaaaaaaaaaaaaaaaaaaaaaaaaaaaaaaaaaaaaaaaaaaaaaaaaaaaaaaaaaaaaa

SEQ ID NO: 26389 - RNA, 4264 nt, Artificial Sequence
  SARS-CoV-2/Wuhan/WIV05/2019__EPI_ISL_402128 spike protein mRNA gc (1-1273)(K986P_V987P_K986P_V987P_H69del_V70del_Y144del_N501Y_A570 D_D614G_P681H_T716I_S982A_D1118H)
agaauaaacuaguauucuucugguccccacagacucagagagaacccgccaccauguucguguuccugguccuccugccccuggugagcucccagugcgugaaccucaccacccgcacgcagcugccgcccgccuacaccaacagcuucacccggggcgucuacuaccccgacaagguguuccgcuccagcgugcugcacuccacccaggaccucuuccugcccuucuucagcaacgucacgugguuccacgccaucuccgggaccaacggcaccaagcgguucgacaacccggugcugcccuucaacgacggggucuacuucgcgagcaccgagaaguccaacaucauccgcggcuggaucuucgggacgacccucgacagcaagacccagucccugcugaucgugaacaacgccaccaacguggucaucaaggugugcgaguuccaguucugcaacgaccccuuccucggcguguaccacaagaacaacaagagcuggauggaguccgaguuccgggucuacagcuccgccaacaacugcacguucgaguacgugagccagcccuuccugauggaccuggagggcaagcaggggaacuucaagaaccuccgcgaguucguguucaagaacaucgacggcuacuucaagaucuacuccaagcacaccccgaucaaccugguccgggaccugccccagggguucagcgcccucgagccccugguggaccugcccaucggcaucaacaucacccgcuuccagacccuccuggcccugcaccgguccuaccucacgccgggggacagcagcuccggcuggaccgcgggcgccgccgccuacuacgugggguaccugcagccccgcaccuuccugcucaaguacaacgagaacggcaccaucacggacgcggucgacugcgcccuggacccccugagcgagaccaagugcacccucaaguccuucaccguggagaaggggaucuaccagacgagcaacuuccgggugcagcccaccgaguccaucguccgcuucccgaacaucaccaaccugugccccuucggcgagguguucaacgccacccgguucgccagcgucuacgccuggaaccgcaagcggaucuccaacugcguggcggacuacagcgugcuguacaacuccgccagcuucuccacguucaagugcuacggcgucagccccaccaagcucaacgaccugugcuucaccaacguguacgccgacuccuucgugauccgcggggacgagguccggcagaucgcccccggccagaccgggaagaucgccgacuacaacuacaagcugccggacgacuucacgggcugcgugaucgcguggaacagcaacaaccucgacuccaaggucgggggcaacuacaacuaccuguaccgccuguuccgcaagagcaaccucaagcccuucgagcgggacaucuccaccgagaucuaccaggccggcagcacccccugcaacgggguggagggcuucaacugcuacuucccccugcaguccuacggguuccagccgaccuacggcgugggguaccagcccuaccggguggucgugcugagcuucgagcuccugcacgcccccgccacggugugcggccccaagaaguccaccaaccuggucaagaacaagugcgugaacuucaacuucaacggccucaccgggaccggcgugcugaccgagagcaacaagaaguuccugccguuccagcaguucgggcgcgacaucgacgacacgaccgacgcgguccgcgacccccagacccuggagauccucgacaucacccccugcagcuucggcgggguguccgugaucacgccgggcaccaacaccagcaaccaggucgccgugcuguaccagggcgugaacugcaccgagguccccguggccauccacgccgaccagcugacgcccaccuggcggguguacuccaccggcagcaacgucuuccagacccgcgccgggugccucaucggcgcggagcacgugaacaacuccuacgagugcgacauccccaucggggccggcaucugcgccagcuaccagacgcagaccaacucccaccggcgcgcccggagcguggcgucccagagcaucaucgccuacaccaugucccugggcgccgagaacagcgucgccuacuccaacaacagcaucgccauccccaucaacuucacgaucuccgugaccaccgagauccugcccgugagcaugaccaagacgagcgucgacugcaccauguacaucugcggggacuccaccgagugcagcaaccuccugcugcaguacggcuccuucugcacccagcucaaccgcgcgcugacggggaucgccguggagcaggacaagaacacccaggagguguucgcccaggucaagcagaucuacaagacgcccccgaucaaggacuucggcggguucaacuucagccagauccugcccgaccccuccaagcccagcaagcgguccuucaucgaggaccuccuguucaacaaggugacccuggccgacgccggcuucaucaagcaguacggcgacugccucggggacaucgcggcccgcgaccugaucugcgcccagaaguucaacggccugaccgugcucccgccccugcugaccgacgagaugaucgcccaguacaccagcgcccuccuggcggggaccaucacguccggcuggaccuucggggccggcgccgcccugcagauccccuucgcgaugcagauggccuaccgguucaacggcaucggggucacccagaacgugcucuacgagaaccagaagcugaucgccaaccaguucaacagcgccaucggcaagauccaggacucccugagcuccaccgccagcgcgcucgggaagcugcaggacguggucaaccagaacgcccaggcccugaacacgcucgugaagcagcuguccagcaacuucggcgccaucuccagcgugcugaacgacauccucgcccgccuggacccgcccgaggccgaggugcagaucgaccggcugaucaccgggcgccuccagagccugcagaccuacgugacccagcagcugauccgggcggccgagauccgcgccagcgccaaccucgccgcgaccaagauguccgagugcguccugggccagagcaagcggguggacuucugcggcaagggguaccaccugauguccuucccccagagcgccccgcacggcguggucuuccuccacgugacguacguccccgcccaggagaagaacuucaccaccgcccccgcgaucugccacgacgggaaggcccacuucccccgcgagggcguguucguguccaacgggacccacugguucgucacgcagcggaacuucuacgagccgcagaucaucaccacccacaacaccuucgugagcggcaacugcgacguggucaucggcaucgugaacaacacgguguacgacccccugcagcccgagcuggacuccuucaaggaggagcucgacaaguacuucaagaaccacaccagccccgacgucgaccugggggacaucuccggcaucaacgccagcguggugaacauccagaaggagaucgaccgccugaacgaggucgccaagaaccucaacgagucccugaucgaccugcaggagcucgggaaguacgagcaguacaucaaguggccgugguacaucuggcugggcuucaucgccggccugaucgcgaucgugauggugaccaucaugcucugcugcaugaccagcugcugcuccugccugaaggggugcugcagcugcggcuccugcugcaaguucgacgaggacgacagcgagcccguccugaagggggugaagcuccacuacacgugaugacucgagcugguacugcaugcacgcaaugcuagcugccccuuucccguccuggguaccccgagucucccccgaccucgggucccagguaugcucccaccuccaccugccccacucaccaccucugcuaguuccagacaccucccaagcacgcagcaaugcagcucaaaacgcuuagccuagccacacccccacgggaaacagcagugauuaaccuuuagcaauaaacgaaaguuuaacuaagcuauacuaaccccaggguuggucaauuucgugccagccacacccuggagcuagcaaaaaaaaaaaaaaaaaaaaaaaaaaaaaaaaaaaaaaaaaaaaaaaaaaaaaaaaaaaaaaaaaaaaaaaaaaaaaaaaaaaaaaaaaaaaaaaaaaaa

SEQ ID NO: 26390 - RNA, 4273 nt, Artificial Sequence
  SARS-CoV-2/Wuhan/WIV05/2019__EPI_ISL_402128 spike protein mRNA gc (1-1273)(K986P_V987P_K986P_V987P_K417N_E484K_N501Y_D614G)
agaauaaacuaguauucuucugguccccacagacucagagagaacccgccaccauguucguguuccugguccuccugccccuggugagcucccagugcgugaaccucaccacccgcacgcagcugccgcccgccuacaccaacagcuucacccggggcgucuacuaccccgacaagguguuccgcuccagcgugcugcacuccacccaggaccucuuccugcccuucuucagcaacgucacgugguuccacgccauccacguguccgggaccaacggcaccaagcgguucgacaacccggugcugcccuucaacgacggggucuacuucgcgagcaccgagaaguccaacaucauccgcggcuggaucuucgggacgacccucgacagcaagacccagucccugcugaucgugaacaacgccaccaacguggucaucaaggugugcgaguuccaguucugcaacgaccccuuccucggcguguacuaccacaagaacaacaagagcuggauggaguccgaguuccgggucuacagcuccgccaacaacugcacguucgaguacgugagccagcccuuccugauggaccuggagggcaagcaggggaacuucaagaaccuccgcgaguucguguucaagaacaucgacggcuacuucaagaucuacuccaagcacaccccgaucaaccugguccgggaccugccccagggguucagcgcccucgagccccugguggaccugcccaucggcaucaacaucacccgcuuccagacccuccuggcccugcaccgguccuaccucacgccgggggacagcagcuccggcuggaccgcgggcgccgccgccuacuacgugggguaccugcagccccgcaccuuccugcucaaguacaacgagaacggcaccaucacggacgcggucgacugcgcccuggacccccugagcgagaccaagugcacccucaaguccuucaccguggagaaggggaucuaccagacgagcaacuuccgggugcagcccaccgaguccaucguccgcuucccgaacaucaccaaccugugccccuucggcgagguguucaacgccacccgguucgccagcgucuacgccuggaaccgcaagcggaucuccaacugcguggcggacuacagcgugcuguacaacuccgccagcuucuccacguucaagugcuacggcgucagccccaccaagcucaacgaccugugcuucaccaacguguacgccgacuccuucgugauccgcggggacgagguccggcagaucgcccccggccagaccgggaacaucgccgacuacaacuacaagcugccggacgacuucacgggcugcgugaucgcguggaacagcaacaaccucgacuccaaggucgggggcaacuacaacuaccuguaccgccuguuccgcaagagcaaccucaagcccuucgagcgggacaucuccaccgagaucuaccaggccggcagcacccccugcaacggggugaagggcuucaacugcuacuucccccugcaguccuacggguuccagccgaccuacggcgugggguaccagcccuaccggguggucgugcugagcuucgagcuccugcacgcccccgccacggugugcggccccaagaaguccaccaaccuggucaagaacaagugcgugaacuucaacuucaacggccucaccgggaccggcgugcugaccgagagcaacaagaaguuccugccguuccagcaguucgggcgcgacaucgccgacacgaccgacgcgguccgcgacccccagacccuggagauccucgacaucacccccugcagcuucggcgggguguccgugaucacgccgggcaccaacaccagcaaccaggucgccgugcuguaccagggcgugaacugcaccgagguccccguggccauccacgccgaccagcugacgcccaccuggcggguguacuccaccggcagcaacgucuuccagacccgcgccgggugccucaucggcgcggagcacgugaacaacuccuacgagugcgacauccccaucggggccggcaucugcgccagcuaccagacgcagaccaacuccccgcggcgcgcccggagcguggcgucccagagcaucaucgccuacaccaugucccugggcgccgagaacagcgucgccuacuccaacaacagcaucgccauccccaccaacuucacgaucuccgugaccaccgagauccugcccgugagcaugaccaagacgagcgucgacugcaccauguacaucugcggggacuccaccgagugcagcaaccuccugcugcaguacggcuccuucugcacccagcucaaccgcgcgcugacggggaucgccguggagcaggacaagaacacccaggagguguucgcccaggucaagcagaucuacaagacgcccccgaucaaggacuucggcggguucaacuucagccagauccugcccgaccccuccaagcccagcaagcgguccuucaucgaggaccuccuguucaacaaggugacccuggccgacgccggcuucaucaagcaguacggcgacugccucggggacaucgcggcccgcgaccugaucugcgcccagaaguucaacggccugaccgugcucccgccccugcugaccgacgagaugaucgcccaguacaccagcgcccuccuggcggggaccaucacguccggcuggaccuucggggccggcgccgcccugcagauccccuucgcgaugcagauggccuaccgguucaacggcaucggggucacccagaacgugcucuacgagaaccagaagcugaucgccaaccaguucaacagcgccaucggcaagauccaggacucccugagcuccaccgccagcgcgcucgggaagcugcaggacguggucaaccagaacgcccaggcccugaacacgcucgugaagcagcuguccagcaacuucggcgccaucuccagcgugcugaacgacauccucucccgccuggacccgcccgaggccgaggugcagaucgaccggcugaucaccgggcgccuccagagccugcagaccuacgugacccagcagcugauccgggcggccgagauccgcgccagcgccaaccucgccgcgaccaagauguccgagugcguccugggccagagcaagcggguggacuucugcggcaagggguaccaccugauguccuucccccagagcgccccgcacggcguggucuuccuccacgugacguacguccccgcccaggagaagaacuucaccaccgcccccgcgaucugccacgacgggaaggcccacuucccccgcgagggcguguucguguccaacgggacccacugguucgucacgcagcggaacuucuacgagccgcagaucaucaccaccgacaacaccuucgugagcggcaacugcgacguggucaucggcaucgugaacaacacgguguacgacccccugcagcccgagcuggacuccuucaaggaggagcucgacaaguacuucaagaaccacaccagccccgacgucgaccugggggacaucuccggcaucaacgccagcguggugaacauccagaaggagaucgaccgccugaacgaggucgccaagaaccucaacgagucccugaucgaccugcaggagcucgggaaguacgagcaguacaucaaguggccgugguacaucuggcugggcuucaucgccggccugaucgcgaucgugauggugaccaucaugcucugcugcaugaccagcugcugcuccugccugaaggggugcugcagcugcggcuccugcugcaaguucgacgaggacgacagcgagcccguccugaagggggugaagcuccacuacacgugaugacucgagcugguacugcaugcacgcaaugcuagcugccccuuucccguccuggguaccccgagucucccccgaccucgggucccagguaugcucccaccuccaccugccccacucaccaccucugcuaguuccagacaccucccaagcacgcagcaaugcagcucaaaacgcuuagccuagccacacccccacgggaaacagcagugauuaaccuuuagcaauaaacgaaaguuuaacuaagcuauacuaaccccaggguuggucaauuucgugccagccacacccuggagcuagcaaaaaaaaaaaaaaaaaaaaaaaaaaaaaaaaaaaaaaaaaaaaaaaaaaaaaaaaaaaaaaaaaaaaaaaaaaaaaaaaaaaaaaaaaaaaaaaaaaaa

SEQ ID NO: 26391 - RNA, 4264 nt, Artificial Sequence
  SARS-CoV-2/Wuhan/WIV05/2019__EPI_ISL_402128 spike protein mRNA gc (1-1273)(K986P_V987P_K986P_V987P_L18F_D80A_D215G_L242del_A243del_ L244del_R246I_K417N_E484K_N501Y_D614G_A701V)
agaauaaacuaguauucuucugguccccacagacucagagagaacccgccaccauguucguguuccugguccuccugccccuggugagcucccagugcgugaacuucaccacccgcacgcagcugccgcccgccuacaccaacagcuucacccggggcgucuacuaccccgacaagguguuccgcuccagcgugcugcacuccacccaggaccucuuccugcccuucuucagcaacgucacgugguuccacgccauccacguguccgggaccaacggcaccaagcgguucgccaacccggugcugcccuucaacgacggggucuacuucgcgagcaccgagaaguccaacaucauccgcggcuggaucuucgggacgacccucgacagcaagacccagucccugcugaucgugaacaacgccaccaacguggucaucaaggugugcgaguuccaguucugcaacgaccccuuccucggcguguacuaccacaagaacaacaagagcuggauggaguccgaguuccgggucuacagcuccgccaacaacugcacguucgaguacgugagccagcccuuccugauggaccuggagggcaagcaggggaacuucaagaaccuccgcgaguucguguucaagaacaucgacggcuacuucaagaucuacuccaagcacaccccgaucaaccugguccggggccugccccagggguucagcgcccucgagccccugguggaccugcccaucggcaucaacaucacccgcuuccagacccuccacaucuccuaccucacgccgggggacagcagcuccggcuggaccgcgggcgccgccgccuacuacgugggguaccugcagccccgcaccuuccugcucaaguacaacgagaacggcaccaucacggacgcggucgacugcgcccuggacccccugagcgagaccaagugcacccucaaguccuucaccguggagaaggggaucuaccagacgagcaacuuccgggugcagcccaccgaguccaucguccgcuucccgaacaucaccaaccugugccccuucggcgagguguucaacgccacccgguucgccagcgucuacgccuggaaccgcaagcggaucuccaacugcguggcggacuacagcgugcuguacaacuccgccagcuucuccacguucaagugcuacggcgucagccccaccaagcucaacgaccugugcuucaccaacguguacgccgacuccuucgugauccgcggggacgagguccggcagaucgcccccggccagaccgggaacaucgccgacuacaacuacaagcugccggacgacuucacgggcugcgugaucgcguggaacagcaacaaccucgacuccaaggucgggggcaacuacaacuaccuguaccgccuguuccgcaagagcaaccucaagcccuucgagcgggacaucuccaccgagaucuaccaggccggcagcacccccugcaacggggugaagggcuucaacugcuacuucccccugcaguccuacggguuccagccgaccuacggcgugggguaccagcccuaccggguggucgugcugagcuucgagcuccugcacgcccccgccacggugugcggccccaagaaguccaccaaccuggucaagaacaagugcgugaacuucaacuucaacggccucaccgggaccggcgugcugaccgagagcaacaagaaguuccugccguuccagcaguucgggcgcgacaucgccgacacgaccgacgcgguccgcgacccccagacccuggagauccucgacaucacccccugcagcuucggcgggguguccgugaucacgccgggcaccaacaccagcaaccaggucgccgugcuguaccagggcgugaacugcaccgagguccccguggccauccacgccgaccagcugacgcccaccuggcggguguacuccaccggcagcaacgucuuccagacccgcgccgggugccucaucggcgcggagcacgugaacaacuccuacgagugcgacauccccaucggggccggcaucugcgccagcuaccagacgcagaccaacuccccgcggcgcgcccggagcguggcgucccagagcaucaucgccuacaccaugucccugggcguggagaacagcgucgccuacuccaacaacagcaucgccauccccaccaacuucacgaucuccgugaccaccgagauccugcccgugagcaugaccaagacgagcgucgacugcaccauguacaucugcggggacuccaccgagugcagcaaccuccugcugcaguacggcuccuucugcacccagcucaaccgcgcgcugacggggaucgccguggagcaggacaagaacacccaggagguguucgcccaggucaagcagaucuacaagacgcccccgaucaaggacuucggcggguucaacuucagccagauccugcccgaccccuccaagcccagcaagcgguccuucaucgaggaccuccuguucaacaaggugacccuggccgacgccggcuucaucaagcaguacggcgacugccucggggacaucgcggcccgcgaccugaucugcgcccagaaguucaacggccugaccgugcucccgccccugcugaccgacgagaugaucgcccaguacaccagcgcccuccuggcggggaccaucacguccggcuggaccuucggggccggcgccgcccugcagauccccuucgcgaugcagauggccuaccgguucaacggcaucggggucacccagaacgugcucuacgagaaccagaagcugaucgccaaccaguucaacagcgccaucggcaagauccaggacucccugagcuccaccgccagcgcgcucgggaagcugcaggacguggucaaccagaacgcccaggcccugaacacgcucgugaagcagcuguccagcaacuucggcgccaucuccagcgugcugaacgacauccucucccgccuggacccgcccgaggccgaggugcagaucgaccggcugaucaccgggcgccuccagagccugcagaccuacgugacccagcagcugauccgggcggccgagauccgcgccagcgccaaccucgccgcgaccaagauguccgagugcguccugggccagagcaagcggguggacuucugcggcaagggguaccaccugauguccuucccccagagcgccccgcacggcguggucuuccuccacgugacguacguccccgcccaggagaagaacuucaccaccgcccccgcgaucugccacgacgggaaggcccacuucccccgcgagggcguguucguguccaacgggacccacugguucgucacgcagcggaacuucuacgagccgcagaucaucaccaccgacaacaccuucgugagcggcaacugcgacguggucaucggcaucgugaacaacacgguguacgacccccugcagcccgagcuggacuccuucaaggaggagcucgacaaguacuucaagaaccacaccagccccgacgucgaccugggggacaucuccggcaucaacgccagcguggugaacauccagaaggagaucgaccgccugaacgaggucgccaagaaccucaacgagucccugaucgaccugcaggagcucgggaaguacgagcaguacaucaaguggccgugguacaucuggcugggcuucaucgccggccugaucgcgaucgugauggugaccaucaugcucugcugcaugaccagcugcugcuccugccugaaggggugcugcagcugcggcuccugcugcaaguucgacgaggacgacagcgagcccguccugaagggggugaagcuccacuacacgugaugacucgagcugguacugcaugcacgcaaugcuagcugccccuuucccguccuggguaccccgagucucccccgaccucgggucccagguaugcucccaccuccaccugccccacucaccaccucugcuaguuccagacaccucccaagcacgcagcaaugcagcucaaaacgcuuagccuagccacacccccacgggaaacagcagugauuaaccuuuagcaauaaacgaaaguuuaacuaagcuauacuaaccccaggguuggucaauuucgugccagccacacccuggagcuagcaaaaaaaaaaaaaaaaaaaaaaaaaaaaaaaaaaaaaaaaaaaaaaaaaaaaaaaaaaaaaaaaaaaaaaaaaaaaaaaaaaaaaaaaaaaaaaaaaaaa

SEQ ID NO: 26392 - RNA, 4273 nt, Artificial Sequence
  SARS-CoV-2/Wuhan/WIV05/2019__EPI_ISL_402128 spike protein mRNA gc (1-1273)(K986P_V987P_K986P_V987P_E484K_D614G)
agaauaaacuaguauucuucugguccccacagacucagagagaacccgccaccauguucguguuccugguccuccugccccuggugagcucccagugcgugaaccucaccacccgcacgcagcugccgcccgccuacaccaacagcuucacccggggcgucuacuaccccgacaagguguuccgcuccagcgugcugcacuccacccaggaccucuuccugcccuucuucagcaacgucacgugguuccacgccauccacguguccgggaccaacggcaccaagcgguucgacaacccggugcugcccuucaacgacggggucuacuucgcgagcaccgagaaguccaacaucauccgcggcuggaucuucgggacgacccucgacagcaagacccagucccugcugaucgugaacaacgccaccaacguggucaucaaggugugcgaguuccaguucugcaacgaccccuuccucggcguguacuaccacaagaacaacaagagcuggauggaguccgaguuccgggucuacagcuccgccaacaacugcacguucgaguacgugagccagcccuuccugauggaccuggagggcaagcaggggaacuucaagaaccuccgcgaguucguguucaagaacaucgacggcuacuucaagaucuacuccaagcacaccccgaucaaccugguccgggaccugccccagggguucagcgcccucgagccccugguggaccugcccaucggcaucaacaucacccgcuuccagacccuccuggcccugcaccgguccuaccucacgccgggggacagcagcuccggcuggaccgcgggcgccgccgccuacuacgugggguaccugcagccccgcaccuuccugcucaaguacaacgagaacggcaccaucacggacgcggucgacugcgcccuggacccccugagcgagaccaagugcacccucaaguccuucaccguggagaaggggaucuaccagacgagcaacuuccgggugcagcccaccgaguccaucguccgcuucccgaacaucaccaaccugugccccuucggcgagguguucaacgccacccgguucgccagcgucuacgccuggaaccgcaagcggaucuccaacugcguggcggacuacagcgugcuguacaacuccgccagcuucuccacguucaagugcuacggcgucagccccaccaagcucaacgaccugugcuucaccaacguguacgccgacuccuucgugauccgcggggacgagguccggcagaucgcccccggccagaccgggaagaucgccgacuacaacuacaagcugccggacgacuucacgggcugcgugaucgcguggaacagcaacaaccucgacuccaaggucgggggcaacuacaacuaccuguaccgccuguuccgcaagagcaaccucaagcccuucgagcgggacaucuccaccgagaucuaccaggccggcagcacccccugcaacggggugaagggcuucaacugcuacuucccccugcaguccuacggguuccagccgaccaacggcgugggguaccagcccuaccggguggucgugcugagcuucgagcuccugcacgcccccgccacggugugcggccccaagaaguccaccaaccuggucaagaacaagugcgugaacuucaacuucaacggccucaccgggaccggcgugcugaccgagagcaacaagaaguuccugccguuccagcaguucgggcgcgacaucgccgacacgaccgacgcgguccgcgacccccagacccuggagauccucgacaucacccccugcagcuucggcgggguguccgugaucacgccgggcaccaacaccagcaaccaggucgccgugcuguaccagggcgugaacugcaccgagguccccguggccauccacgccgaccagcugacgcccaccuggcggguguacuccaccggcagcaacgucuuccagacccgcgccgggugccucaucggcgcggagcacgugaacaacuccuacgagugcgacauccccaucggggccggcaucugcgccagcuaccagacgcagaccaacuccccgcggcgcgcccggagcguggcgucccagagcaucaucgccuacaccaugucccugggcgccgagaacagcgucgccuacuccaacaacagcaucgccauccccaccaacuucacgaucuccgugaccaccgagauccugcccgugagcaugaccaagacgagcgucgacugcaccauguacaucugcggggacuccaccgagugcagcaaccuccugcugcaguacggcuccuucugcacccagcucaaccgcgcgcugacggggaucgccguggagcaggacaagaacacccaggagguguucgcccaggucaagcagaucuacaagacgcccccgaucaaggacuucggcggguucaacuucagccagauccugcccgaccccuccaagcccagcaagcgguccuucaucgaggaccuccuguucaacaaggugacccuggccgacgccggcuucaucaagcaguacggcgacugccucggggacaucgcggcccgcgaccugaucugcgcccagaaguucaacggccugaccgugcucccgccccugcugaccgacgagaugaucgcccaguacaccagcgcccuccuggcggggaccaucacguccggcuggaccuucggggccggcgccgcccugcagauccccuucgcgaugcagauggccuaccgguucaacggcaucggggucacccagaacgugcucuacgagaaccagaagcugaucgccaaccaguucaacagcgccaucggcaagauccaggacucccugagcuccaccgccagcgcgcucgggaagcugcaggacguggucaaccagaacgcccaggcccugaacacgcucgugaagcagcuguccagcaacuucggcgccaucuccagcgugcugaacgacauccucucccgccuggacccgcccgaggccgaggugcagaucgaccggcugaucaccgggcgccuccagagccugcagaccuacgugacccagcagcugauccgggcggccgagauccgcgccagcgccaaccucgccgcgaccaagauguccgagugcguccugggccagagcaagcggguggacuucugcggcaagggguaccaccugauguccuucccccagagcgccccgcacggcguggucuuccuccacgugacguacguccccgcccaggagaagaacuucaccaccgcccccgcgaucugccacgacgggaaggcccacuucccccgcgagggcguguucguguccaacgggacccacugguucgucacgcagcggaacuucuacgagccgcagaucaucaccaccgacaacaccuucgugagcggcaacugcgacguggucaucggcaucgugaacaacacgguguacgacccccugcagcccgagcuggacuccuucaaggaggagcucgacaaguacuucaagaaccacaccagccccgacgucgaccugggggacaucuccggcaucaacgccagcguggugaacauccagaaggagaucgaccgccugaacgaggucgccaagaaccucaacgagucccugaucgaccugcaggagcucgggaaguacgagcaguacaucaaguggccgugguacaucuggcugggcuucaucgccggccugaucgcgaucgugauggugaccaucaugcucugcugcaugaccagcugcugcuccugccugaaggggugcugcagcugcggcuccugcugcaaguucgacgaggacgacagcgagcccguccugaagggggugaagcuccacuacacgugaugacucgagcugguacugcaugcacgcaaugcuagcugccccuuucccguccuggguaccccgagucucccccgaccucgggucccagguaugcucccaccuccaccugccccacucaccaccucugcuaguuccagacaccucccaagcacgcagcaaugcagcucaaaacgcuuagccuagccacacccccacgggaaacagcagugauuaaccuuuagcaauaaacgaaaguuuaacuaagcuauacuaaccccaggguuggucaauuucgugccagccacacccuggagcuagcaaaaaaaaaaaaaaaaaaaaaaaaaaaaaaaaaaaaaaaaaaaaaaaaaaaaaaaaaaaaaaaaaaaaaaaaaaaaaaaaaaaaaaaaaaaaaaaaaaaa

SEQ ID NO: 26393 - RNA, 4273 nt, Artificial Sequence
  SARS-CoV-2/Wuhan/WIV05/2019__EPI_ISL_402128 spike protein mRNA gc (1-1273)(K986P_V987P_K986P_V987P_L18F_T20N_P26S_D138Y_R190S_K417T _E484K_N501Y_D614G_H655Y_T1027I)
agaauaaacuaguauucuucugguccccacagacucagagagaacccgccaccauguucguguuccugguccuccugccccuggugagcucccagugcgugaacuucaccaaccgcacgcagcugccgagcgccuacaccaacagcuucacccggggcgucuacuaccccgacaagguguuccgcuccagcgugcugcacuccacccaggaccucuuccugcccuucuucagcaacgucacgugguuccacgccauccacguguccgggaccaacggcaccaagcgguucgacaacccggugcugcccuucaacgacggggucuacuucgcgagcaccgagaaguccaacaucauccgcggcuggaucuucgggacgacccucgacagcaagacccagucccugcugaucgugaacaacgccaccaacguggucaucaaggugugcgaguuccaguucugcaacuaccccuuccucggcguguacuaccacaagaacaacaagagcuggauggaguccgaguuccgggucuacagcuccgccaacaacugcacguucgaguacgugagccagcccuuccugauggaccuggagggcaagcaggggaacuucaagaaccucagcgaguucguguucaagaacaucgacggcuacuucaagaucuacuccaagcacaccccgaucaaccugguccgggaccugccccagggguucagcgcccucgagccccugguggaccugcccaucggcaucaacaucacccgcuuccagacccuccuggcccugcaccgguccuaccucacgccgggggacagcagcuccggcuggaccgcgggcgccgccgccuacuacgugggguaccugcagccccgcaccuuccugcucaaguacaacgagaacggcaccaucacggacgcggucgacugcgcccuggacccccugagcgagaccaagugcacccucaaguccuucaccguggagaaggggaucuaccagacgagcaacuuccgggugcagcccaccgaguccaucguccgcuucccgaacaucaccaaccugugccccuucggcgagguguucaacgccacccgguucgccagcgucuacgccuggaaccgcaagcggaucuccaacugcguggcggacuacagcgugcuguacaacuccgccagcuucuccacguucaagugcuacggcgucagccccaccaagcucaacgaccugugcuucaccaacguguacgccgacuccuucgugauccgcggggacgagguccggcagaucgcccccggccagaccgggaccaucgccgacuacaacuacaagcugccggacgacuucacgggcugcgugaucgcguggaacagcaacaaccucgacuccaaggucgggggcaacuacaacuaccuguaccgccuguuccgcaagagcaaccucaagcccuucgagcgggacaucuccaccgagaucuaccaggccggcagcacccccugcaacggggugaagggcuucaacugcuacuucccccugcaguccuacggguuccagccgaccuacggcgugggguaccagcccuaccggguggucgugcugagcuucgagcuccugcacgcccccgccacggugugcggccccaagaaguccaccaaccuggucaagaacaagugcgugaacuucaacuucaacggccucaccgggaccggcgugcugaccgagagcaacaagaaguuccugccguuccagcaguucgggcgcgacaucgccgacacgaccgacgcgguccgcgacccccagacccuggagauccucgacaucacccccugcagcuucggcgggguguccgugaucacgccgggcaccaacaccagcaaccaggucgccgugcuguaccagggcgugaacugcaccgagguccccguggccauccacgccgaccagcugacgcccaccuggcggguguacuccaccggcagcaacgucuuccagacccgcgccgggugccucaucggcgcggaguacgugaacaacuccuacgagugcgacauccccaucggggccggcaucugcgccagcuaccagacgcagaccaacuccccgcggcgcgcccggagcguggcgucccagagcaucaucgccuacaccaugucccugggcgccgagaacagcgucgccuacuccaacaacagcaucgccauccccaccaacuucacgaucuccgugaccaccgagauccugcccgugagcaugaccaagacgagcgucgacugcaccauguacaucugcggggacuccaccgagugcagcaaccuccugcugcaguacggcuccuucugcacccagcucaaccgcgcgcugacggggaucgccguggagcaggacaagaacacccaggagguguucgcccaggucaagcagaucuacaagacgcccccgaucaaggacuucggcggguucaacuucagccagauccugcccgaccccuccaagcccagcaagcgguccuucaucgaggaccuccuguucaacaaggugacccuggccgacgccggcuucaucaagcaguacggcgacugccucggggacaucgcggcccgcgaccugaucugcgcccagaaguucaacggccugaccgugcucccgccccugcugaccgacgagaugaucgcccaguacaccagcgcccuccuggcggggaccaucacguccggcuggaccuucggggccggcgccgcccugcagauccccuucgcgaugcagauggccuaccgguucaacggcaucggggucacccagaacgugcucuacgagaaccagaagcugaucgccaaccaguucaacagcgccaucggcaagauccaggacucccugagcuccaccgccagcgcgcucgggaagcugcaggacguggucaaccagaacgcccaggcccugaacacgcucgugaagcagcuguccagcaacuucggcgccaucuccagcgugcugaacgacauccucucccgccuggacccgcccgaggccgaggugcagaucgaccggcugaucaccgggcgccuccagagccugcagaccuacgugacccagcagcugauccgggcggccgagauccgcgccagcgccaaccucgccgcgaucaagauguccgagugcguccugggccagagcaagcggguggacuucugcggcaagggguaccaccugauguccuucccccagagcgccccgcacggcguggucuuccuccacgugacguacguccccgcccaggagaagaacuucaccaccgcccccgcgaucugccacgacgggaaggcccacuucccccgcgagggcguguucguguccaacgggacccacugguucgucacgcagcggaacuucuacgagccgcagaucaucaccaccgacaacaccuucgugagcggcaacugcgacguggucaucggcaucgugaacaacacgguguacgacccccugcagcccgagcuggacuccuucaaggaggagcucgacaaguacuucaagaaccacaccagccccgacgucgaccugggggacaucuccggcaucaacgccagcguggugaacauccagaaggagaucgaccgccugaacgaggucgccaagaaccucaacgagucccugaucgaccugcaggagcucgggaaguacgagcaguacaucaaguggccgugguacaucuggcugggcuucaucgccggccugaucgcgaucgugauggugaccaucaugcucugcugcaugaccagcugcugcuccugccugaaggggugcugcagcugcggcuccugcugcaaguucgacgaggacgacagcgagcccguccugaagggggugaagcuccacuacacgugaugacucgagcugguacugcaugcacgcaaugcuagcugccccuuucccguccuggguaccccgagucucccccgaccucgggucccagguaugcucccaccuccaccugccccacucaccaccucugcuaguuccagacaccucccaagcacgcagcaaugcagcucaaaacgcuuagccuagccacacccccacgggaaacagcagugauuaaccuuuagcaauaaacgaaaguuuaacuaagcuauacuaaccccaggguuggucaauuucgugccagccacacccuggagcuagcaaaaaaaaaaaaaaaaaaaaaaaaaaaaaaaaaaaaaaaaaaaaaaaaaaaaaaaaaaaaaaaaaaaaaaaaaaaaaaaaaaaaaaaaaaaaaaaaaaaa

SEQ ID NO: 26394 - RNA, 4273 nt, Artificial Sequence
  SARS-CoV-2/Wuhan/WIV05/2019__EPI_ISL_402128 spike protein mRNA gc (1-1273)(K986P_V987P_K986P_V987P_S13I_W152C_L452R_D614G)
agaauaaacuaguauucuucugguccccacagacucagagagaacccgccaccauguucguguuccugguccuccugccccuggugagcauccagugcgugaaccucaccacccgcacgcagcugccgcccgccuacaccaacagcuucacccggggcgucuacuaccccgacaagguguuccgcuccagcgugcugcacuccacccaggaccucuuccugcccuucuucagcaacgucacgugguuccacgccauccacguguccgggaccaacggcaccaagcgguucgacaacccggugcugcccuucaacgacggggucuacuucgcgagcaccgagaaguccaacaucauccgcggcuggaucuucgggacgacccucgacagcaagacccagucccugcugaucgugaacaacgccaccaacguggucaucaaggugugcgaguuccaguucugcaacgaccccuuccucggcguguacuaccacaagaacaacaagagcugcauggaguccgaguuccgggucuacagcuccgccaacaacugcacguucgaguacgugagccagcccuuccugauggaccuggagggcaagcaggggaacuucaagaaccuccgcgaguucguguucaagaacaucgacggcuacuucaagaucuacuccaagcacaccccgaucaaccugguccgggaccugccccagggguucagcgcccucgagccccugguggaccugcccaucggcaucaacaucacccgcuuccagacccuccuggcccugcaccgguccuaccucacgccgggggacagcagcuccggcuggaccgcgggcgccgccgccuacuacgugggguaccugcagccccgcaccuuccugcucaaguacaacgagaacggcaccaucacggacgcggucgacugcgcccuggacccccugagcgagaccaagugcacccucaaguccuucaccguggagaaggggaucuaccagacgagcaacuuccgggugcagcccaccgaguccaucguccgcuucccgaacaucaccaaccugugccccuucggcgagguguucaacgccacccgguucgccagcgucuacgccuggaaccgcaagcggaucuccaacugcguggcggacuacagcgugcuguacaacuccgccagcuucuccacguucaagugcuacggcgucagccccaccaagcucaacgaccugugcuucaccaacguguacgccgacuccuucgugauccgcggggacgagguccggcagaucgcccccggccagaccgggaagaucgccgacuacaacuacaagcugccggacgacuucacgggcugcgugaucgcguggaacagcaacaaccucgacuccaaggucgggggcaacuacaacuaccgcuaccgccuguuccgcaagagcaaccucaagcccuucgagcgggacaucuccaccgagaucuaccaggccggcagcacccccugcaacgggguggagggcuucaacugcuacuucccccugcaguccuacggguuccagccgaccaacggcgugggguaccagcccuaccggguggucgugcugagcuucgagcuccugcacgcccccgccacggugugcggccccaagaaguccaccaaccuggucaagaacaagugcgugaacuucaacuucaacggccucaccgggaccggcgugcugaccgagagcaacaagaaguuccugccguuccagcaguucgggcgcgacaucgccgacacgaccgacgcgguccgcgacccccagacccuggagauccucgacaucacccccugcagcuucggcgggguguccgugaucacgccgggcaccaacaccagcaaccaggucgccgugcuguaccagggcgugaacugcaccgagguccccguggccauccacgccgaccagcugacgcccaccuggcggguguacuccaccggcagcaacgucuuccagacccgcgccgggugccucaucggcgcggagcacgugaacaacuccuacgagugcgacauccccaucggggccggcaucugcgccagcuaccagacgcagaccaacuccccgcggcgcgcccggagcguggcgucccagagcaucaucgccuacaccaugucccugggcgccgagaacagcgucgccuacuccaacaacagcaucgccauccccaccaacuucacgaucuccgugaccaccgagauccugcccgugagcaugaccaagacgagcgucgacugcaccauguacaucugcggggacuccaccgagugcagcaaccuccugcugcaguacggcuccuucugcacccagcucaaccgcgcgcugacggggaucgccguggagcaggacaagaacacccaggagguguucgcccaggucaagcagaucuacaagacgcccccgaucaaggacuucggcggguucaacuucagccagauccugcccgaccccuccaagcccagcaagcgguccuucaucgaggaccuccuguucaacaaggugacccuggccgacgccggcuucaucaagcaguacggcgacugccucggggacaucgcggcccgcgaccugaucugcgcccagaaguucaacggccugaccgugcucccgccccugcugaccgacgagaugaucgcccaguacaccagcgcccuccuggcggggaccaucacguccggcuggaccuucggggccggcgccgcccugcagauccccuucgcgaugcagauggccuaccgguucaacggcaucggggucacccagaacgugcucuacgagaaccagaagcugaucgccaaccaguucaacagcgccaucggcaagauccaggacucccugagcuccaccgccagcgcgcucgggaagcugcaggacguggucaaccagaacgcccaggcccugaacacgcucgugaagcagcuguccagcaacuucggcgccaucuccagcgugcugaacgacauccucucccgccuggacccgcccgaggccgaggugcagaucgaccggcugaucaccgggcgccuccagagccugcagaccuacgugacccagcagcugauccgggcggccgagauccgcgccagcgccaaccucgccgcgaccaagauguccgagugcguccugggccagagcaagcggguggacuucugcggcaagggguaccaccugauguccuucccccagagcgccccgcacggcguggucuuccuccacgugacguacguccccgcccaggagaagaacuucaccaccgcccccgcgaucugccacgacgggaaggcccacuucccccgcgagggcguguucguguccaacgggacccacugguucgucacgcagcggaacuucuacgagccgcagaucaucaccaccgacaacaccuucgugagcggcaacugcgacguggucaucggcaucgugaacaacacgguguacgacccccugcagcccgagcuggacuccuucaaggaggagcucgacaaguacuucaagaaccacaccagccccgacgucgaccugggggacaucuccggcaucaacgccagcguggugaacauccagaaggagaucgaccgccugaacgaggucgccaagaaccucaacgagucccugaucgaccugcaggagcucgggaaguacgagcaguacaucaaguggccgugguacaucuggcugggcuucaucgccggccugaucgcgaucgugauggugaccaucaugcucugcugcaugaccagcugcugcuccugccugaaggggugcugcagcugcggcuccugcugcaaguucgacgaggacgacagcgagcccguccugaagggggugaagcuccacuacacgugaugacucgagcugguacugcaugcacgcaaugcuagcugccccuuucccguccuggguaccccgagucucccccgaccucgggucccagguaugcucccaccuccaccugccccacucaccaccucugcuaguuccagacaccucccaagcacgcagcaaugcagcucaaaacgcuuagccuagccacacccccacgggaaacagcagugauuaaccuuuagcaauaaacgaaaguuuaacuaagcuauacuaaccccaggguuggucaauuucgugccagccacacccuggagcuagcaaaaaaaaaaaaaaaaaaaaaaaaaaaaaaaaaaaaaaaaaaaaaaaaaaaaaaaaaaaaaaaaaaaaaaaaaaaaaaaaaaaaaaaaaaaaaaaaaaaa

SEQ ID NO: 26395 - RNA, 4273 nt, Artificial Sequence
  SARS-CoV-2/Wuhan/WIV05/2019__EPI_ISL_402128 spike protein mRNA gc (1-1273)(K986P_V987P)
agaauaaacuaguauucuucugguccccacagacucagagagaacccgccaccauguucguguuccugguccuccugccccuggugagcucccagugcgugaaccucaccacccgcacgcagcugccgcccgccuacaccaacagcuucacccggggcgucuacuaccccgacaagguguuccgcuccagcgugcugcacuccacccaggaccucuuccugcccuucuucagcaacgucacgugguuccacgccauccacguguccgggaccaacggcaccaagcgguucgacaacccggugcugcccuucaacgacggggucuacuucgcgagcaccgagaaguccaacaucauccgcggcuggaucuucgggacgacccucgacagcaagacccagucccugcugaucgugaacaacgccaccaacguggucaucaaggugugcgaguuccaguucugcaacgaccccuuccucggcguguacuaccacaagaacaacaagagcuggauggaguccgaguuccgggucuacagcuccgccaacaacugcacguucgaguacgugagccagcccuuccugauggaccuggagggcaagcaggggaacuucaagaaccuccgcgaguucguguucaagaacaucgacggcuacuucaagaucuacuccaagcacaccccgaucaaccugguccgggaccugccccagggguucagcgcccucgagccccugguggaccugcccaucggcaucaacaucacccgcuuccagacccuccuggcccugcaccgguccuaccucacgccgggggacagcagcuccggcuggaccgcgggcgccgccgccuacuacgugggguaccugcagccccgcaccuuccugcucaaguacaacgagaacggcaccaucacggacgcggucgacugcgcccuggacccccugagcgagaccaagugcacccucaaguccuucaccguggagaaggggaucuaccagacgagcaacuuccgggugcagcccaccgaguccaucguccgcuucccgaacaucaccaaccugugccccuucggcgagguguucaacgccacccgguucgccagcgucuacgccuggaaccgcaagcggaucuccaacugcguggcggacuacagcgugcuguacaacuccgccagcuucuccacguucaagugcuacggcgucagccccaccaagcucaacgaccugugcuucaccaacguguacgccgacuccuucgugauccgcggggacgagguccggcagaucgcccccggccagaccgggaagaucgccgacuacaacuacaagcugccggacgacuucacgggcugcgugaucgcguggaacagcaacaaccucgacuccaaggucgggggcaacuacaacuaccuguaccgccuguuccgcaagagcaaccucaagcccuucgagcgggacaucuccaccgagaucuaccaggccggcagcacccccugcaacgggguggagggcuucaacugcuacuucccccugcaguccuacggguuccagccgaccaacggcgugggguaccagcccuaccggguggucgugcugagcuucgagcuccugcacgcccccgccacggugugcggccccaagaaguccaccaaccuggucaagaacaagugcgugaacuucaacuucaacggccucaccgggaccggcgugcugaccgagagcaacaagaaguuccugccguuccagcaguucgggcgcgacaucgccgacacgaccgacgcgguccgcgacccccagacccuggagauccucgacaucacccccugcagcuucggcgggguguccgugaucacgccgggcaccaacaccagcaaccaggucgccgugcuguaccaggacgugaacugcaccgagguccccguggccauccacgccgaccagcugacgcccaccuggcggguguacuccaccggcagcaacgucuuccagacccgcgccgggugccucaucggcgcggagcacgugaacaacuccuacgagugcgacauccccaucggggccggcaucugcgccagcuaccagacgcagaccaacuccccgcggcgcgcccggagcguggcgucccagagcaucaucgccuacaccaugucccugggcgccgagaacagcgucgccuacuccaacaacagcaucgccauccccaccaacuucacgaucuccgugaccaccgagauccugcccgugagcaugaccaagacgagcgucgacugcaccauguacaucugcggggacuccaccgagugcagcaaccuccugcugcaguacggcuccuucugcacccagcucaaccgcgcgcugacggggaucgccguggagcaggacaagaacacccaggagguguucgcccaggucaagcagaucuacaagacgcccccgaucaaggacuucggcggguucaacuucagccagauccugcccgaccccuccaagcccagcaagcgguccuucaucgaggaccuccuguucaacaaggugacccuggccgacgccggcuucaucaagcaguacggcgacugccucggggacaucgcggcccgcgaccugaucugcgcccagaaguucaacggccugaccgugcucccgccccugcugaccgacgagaugaucgcccaguacaccagcgcccuccuggcggggaccaucacguccggcuggaccuucggggccggcgccgcccugcagauccccuucgcgaugcagauggccuaccgguucaacggcaucggggucacccagaacgugcucuacgagaaccagaagcugaucgccaaccaguucaacagcgccaucggcaagauccaggacucccugagcuccaccgccagcgcgcucgggaagcugcaggacguggucaaccagaacgcccaggcccugaacacgcucgugaagcagcuguccagcaacuucggcgccaucuccagcgugcugaacgacauccucucccgccuggacccgcccgaggccgagguccagaucgaccggcugaucaccgggcgccuccagagccugcagaccuacgugacccagcagcugauccgggcggccgagauccgcgccagcgccaaccucgccgcgaccaagauguccgagugcgugcugggccagagcaagcgggucgacuucugcggcaagggguaccaccugauguccuucccccagagcgcgccccacggcgugguguuccuccacgucacguacgugcccgcccaggagaagaacuucaccaccgccccggccaucugccacgacgggaaggcccacuucccccgcgagggcgucuucguguccaacgggacccacugguucgugacgcagcggaacuucuacgagccccagaucaucaccaccgacaacaccuucgucagcggcaacugcgacguggugaucggcaucgucaacaacacgguguacgacccccugcagccggagcuggacuccuucaaggaggagcucgacaaguacuucaagaaccacaccagccccgacguggaccugggggacaucuccggcaucaacgccagcgucgugaacauccagaaggagaucgaccgccugaacgagguggccaagaaccucaacgagucccugaucgaccugcaggagcucgggaaguacgagcaguacaucaaguggcccugguacaucuggcugggcuucaucgccggccugaucgcgaucgucauggugaccaucaugcucugcugcaugaccagcugcugcuccugccugaaggggugcugcagcugcggcuccugcugcaaguucgacgaggacgacagcgagccggugcugaagggggucaagcuccacuacacgugaugacucgagcugguacugcaugcacgcaaugcuagcugccccuuucccguccuggguaccccgagucucccccgaccucgggucccagguaugcucccaccuccaccugccccacucaccaccucugcuaguuccagacaccucccaagcacgcagcaaugcagcucaaaacgcuuagccuagccacacccccacgggaaacagcagugauuaaccuuuagcaauaaacgaaaguuuaacuaagcuauacuaaccccaggguuggucaauuucgugccagccacacccuggagcuagcaaaaaaaaaaaaaaaaaaaaaaaaaaaaaaaaaaaaaaaaaaaaaaaaaaaaaaaaaaaaaaaaaaaaaaaaaaaaaaaaaaaaaaaaaaaaaaaaaaaa

SEQ ID NO: 26396 - RNA, 4273 nt, Artificial Sequence
  SARS-CoV-2/Wuhan/WIV05/2019__EPI_ISL_402128 spike protein mRNA gc (1-1273)(K986P_V987P_ D614G)
agaauaaacuaguauucuucugguccccacagacucagagagaacccgccaccauguucguguuccugguccuccugccccuggugagcucccagugcgugaaccucaccacccgcacgcagcugccgcccgccuacaccaacagcuucacccggggcgucuacuaccccgacaagguguuccgcuccagcgugcugcacuccacccaggaccucuuccugcccuucuucagcaacgucacgugguuccacgccauccacguguccgggaccaacggcaccaagcgguucgacaacccggugcugcccuucaacgacggggucuacuucgcgagcaccgagaaguccaacaucauccgcggcuggaucuucgggacgacccucgacagcaagacccagucccugcugaucgugaacaacgccaccaacguggucaucaaggugugcgaguuccaguucugcaacgaccccuuccucggcguguacuaccacaagaacaacaagagcuggauggaguccgaguuccgggucuacagcuccgccaacaacugcacguucgaguacgugagccagcccuuccugauggaccuggagggcaagcaggggaacuucaagaaccuccgcgaguucguguucaagaacaucgacggcuacuucaagaucuacuccaagcacaccccgaucaaccugguccgggaccugccccagggguucagcgcccucgagccccugguggaccugcccaucggcaucaacaucacccgcuuccagacccuccuggcccugcaccgguccuaccucacgccgggggacagcagcuccggcuggaccgcgggcgccgccgccuacuacgugggguaccugcagccccgcaccuuccugcucaaguacaacgagaacggcaccaucacggacgcggucgacugcgcccuggacccccugagcgagaccaagugcacccucaaguccuucaccguggagaaggggaucuaccagacgagcaacuuccgggugcagcccaccgaguccaucguccgcuucccgaacaucaccaaccugugccccuucggcgagguguucaacgccacccgguucgccagcgucuacgccuggaaccgcaagcggaucuccaacugcguggcggacuacagcgugcuguacaacuccgccagcuucuccacguucaagugcuacggcgucagccccaccaagcucaacgaccugugcuucaccaacguguacgccgacuccuucgugauccgcggggacgagguccggcagaucgcccccggccagaccgggaagaucgccgacuacaacuacaagcugccggacgacuucacgggcugcgugaucgcguggaacagcaacaaccucgacuccaaggucgggggcaacuacaacuaccuguaccgccuguuccgcaagagcaaccucaagcccuucgagcgggacaucuccaccgagaucuaccaggccggcagcacccccugcaacgggguggagggcuucaacugcuacuucccccugcaguccuacggguuccagccgaccaacggcgugggguaccagcccuaccggguggucgugcugagcuucgagcuccugcacgcccccgccacggugugcggccccaagaaguccaccaaccuggucaagaacaagugcgugaacuucaacuucaacggccucaccgggaccggcgugcugaccgagagcaacaagaaguuccugccguuccagcaguucgggcgcgacaucgccgacacgaccgacgcgguccgcgacccccagacccuggagauccucgacaucacccccugcagcuucggcgggguguccgugaucacgccgggcaccaacaccagcaaccaggucgccgugcuguaccagggcgugaacugcaccgagguccccguggccauccacgccgaccagcugacgcccaccuggcggguguacuccaccgggagcaacgucuuccagacccgcgccggcugccucaucggggcggagcacgugaacaacuccuacgagugcgacauccccaucggcgccggcaucugcgccagcuaccagacgcagaccaacuccccgcggcgcgcccggagcguggcgucccagagcaucaucgccuacaccaugucccugggggccgagaacagcgucgccuacuccaacaacagcaucgccauccccaccaacuucacgaucuccgugaccaccgagauccugcccgugagcaugaccaagacgagcgucgacugcaccauguacaucugcggcgacuccaccgagugcagcaaccuccugcugcaguacggguccuucugcacccagcucaaccgcgcgcugacgggcaucgccguggagcaggacaagaacacccaggagguguucgcccaggucaagcagaucuacaagacgcccccgaucaaggacuucgggggcuucaacuucagccagauccugcccgaccccuccaagcccagcaagcgguccuucaucgaggaccuccuguucaacaaggugacccuggccgacgccggcuucaucaagcaguacggggacugccucggcgacaucgcggcccgcgaccugaucugcgcccagaaguucaacgggcugaccgugcucccgccccugcugaccgacgagaugaucgcccaguacaccagcgcccuccuggcgggcaccaucacguccggguggaccuucggcgccggcgccgcccugcagauccccuucgcgaugcagauggccuaccgguucaacgggaucggcgucacccagaacgugcucuacgagaaccagaagcugaucgccaaccaguucaacagcgccaucgggaagauccaggacucccugagcuccaccgccagcgcgcucggcaagcugcaggacguggucaaccagaacgcccaggcccugaacacgcucgugaagcagcuguccagcaacuucggggccaucuccagcgugcugaacgacauccucucccgccuggacccgcccgaggccgagguccagaucgaccggcugaucaccggccgccuccagagccugcagaccuacgugacccagcagcugauccgggcggccgagauccgcgccagcgccaaccucgccgcgaccaagauguccgagugcgugcugggccagagcaagcgggucgacuucugcgggaagggcuaccaccugauguccuucccccagagcgcgccccacggggugguguuccuccacgucacguacgugcccgcccaggagaagaacuucaccaccgccccggccaucugccacgacggcaaggcccacuucccccgcgagggggucuucguguccaacggcacccacugguucgugacgcagcggaacuucuacgagccccagaucaucaccaccgacaacaccuucgucagcggcaacugcgacguggugaucgggaucgucaacaacacgguguacgacccccugcagccggagcuggacuccuucaaggaggagcucgacaaguacuucaagaaccacaccagccccgacguggaccugggcgacaucuccgggaucaacgccagcgucgugaacauccagaaggagaucgaccgccugaacgagguggccaagaaccucaacgagucccugaucgaccugcaggagcucggcaaguacgagcaguacaucaaguggcccugguacaucuggcugggcuucaucgccgggcugaucgcgaucgucauggugaccaucaugcucugcugcaugaccagcugcugcuccugccugaagggcugcugcagcugcggguccugcugcaaguucgacgaggacgacagcgagccggugcugaagggcgucaagcuccacuacacgugaugacucgagcugguacugcaugcacgcaaugcuagcugccccuuucccguccuggguaccccgagucucccccgaccucgggucccagguaugcucccaccuccaccugccccacucaccaccucugcuaguuccagacaccucccaagcacgcagcaaugcagcucaaaacgcuuagccuagccacacccccacgggaaacagcagugauuaaccuuuagcaauaaacgaaaguuuaacuaagcuauacuaaccccaggguuggucaauuucgugccagccacacccuggagcuagcaaaaaaaaaaaaaaaaaaaaaaaaaaaaaaaaaaaaaaaaaaaaaaaaaaaaaaaaaaaaaaaaaaaaaaaaaaaaaaaaaaaaaaaaaaaaaaaaaaaa

SEQ ID NO: 26397 - RNA, 4273 nt, Artificial Sequence
  SARS-CoV-2/Wuhan/WIV05/2019__EPI_ISL_402128 spike protein mRNA gc (1-1273)(K986P_V987P_A222V_D614G)
agaauaaacuaguauucuucugguccccacagacucagagagaacccgccaccauguucguguuccugguccuccugccccuggugagcucccagugcgugaaccucaccacccgcacgcagcugccgcccgccuacaccaacagcuucacccggggcgucuacuaccccgacaagguguuccgcuccagcgugcugcacuccacccaggaccucuuccugcccuucuucagcaacgucacgugguuccacgccauccacguguccgggaccaacggcaccaagcgguucgacaacccggugcugcccuucaacgacggggucuacuucgcgagcaccgagaaguccaacaucauccgcggcuggaucuucgggacgacccucgacagcaagacccagucccugcugaucgugaacaacgccaccaacguggucaucaaggugugcgaguuccaguucugcaacgaccccuuccucggcguguacuaccacaagaacaacaagagcuggauggaguccgaguuccgggucuacagcuccgccaacaacugcacguucgaguacgugagccagcccuuccugauggaccuggagggcaagcaggggaacuucaagaaccuccgcgaguucguguucaagaacaucgacggcuacuucaagaucuacuccaagcacaccccgaucaaccugguccgggaccugccccagggguucagcgugcucgagccccugguggaccugcccaucggcaucaacaucacccgcuuccagacccuccuggcccugcaccgguccuaccucacgccgggggacagcagcuccggcuggaccgccggcgcggccgccuacuacgucggguaccugcagccccgcaccuuccugcucaaguacaacgagaacggcaccaucacggacgccguggacugcgcgcuggacccccugagcgagaccaagugcacccucaaguccuucaccguggagaaggggaucuaccagacgagcaacuuccggguccagcccaccgaguccaucgugcgcuucccgaacaucaccaaccugugccccuucggcgaggucuucaacgccacccgguucgccagcguguacgccuggaaccgcaagcggaucuccaacugcguggccgacuacagcguccuguacaacuccgcgagcuucuccacguucaagugcuacggcgugagccccaccaagcucaacgaccugugcuucaccaacguguacgccgacuccuucgucauccgcggggacgaggugcggcagaucgcccccggccagaccgggaagaucgccgacuacaacuacaagcugccggacgacuucacgggcugcgugaucgccuggaacagcaacaaccucgacuccaaggucgggggcaacuacaacuaccuguaccgccuguuccgcaagagcaaccucaagcccuucgagcgggacaucuccaccgagaucuaccaggcgggcagcacccccugcaacgggguggagggcuucaacugcuacuucccccugcaguccuacggguuccagccgaccaacggcgugggguaccagcccuaccgggucguggugcugagcuucgagcuccugcacgcccccgccacggucugcggccccaagaaguccaccaaccuggugaagaacaagugcgugaacuucaacuucaacggccucaccgggaccggcguccugaccgagagcaacaagaaguuccugccguuccagcaguucgggcgcgacaucgccgacacgaccgacgccgugcgcgacccccagacccuggagauccucgacaucacccccugcagcuucggcgggguguccgucaucacgccgggcaccaacaccagcaaccagguggcggugcuguaccagggcgucaacugcaccgaggugcccguggccauccacgccgaccagcugacgcccaccuggcgggucuacuccaccgggagcaacguguuccagacccgcgccggcugccucaucggggccgagcacgugaacaacuccuacgagugcgacauccccaucggcgcgggcaucugcgccagcuaccagacgcagaccaacuccccgcggcgcgcccggagcgucgccucccagagcaucaucgcguacaccaugucccugggggccgagaacagcguggccuacuccaacaacagcaucgccauccccaccaacuucacgaucuccgugaccaccgagauccugcccgucagcaugaccaagacgagcguggacugcaccauguacaucugcggcgacuccaccgagugcagcaaccuccugcugcaguacggguccuucugcacccagcucaaccgcgcccugacgggcaucgcgguggagcaggacaagaacacccaggaggucuucgcccaggugaagcagaucuacaagacgcccccgaucaaggacuucgggggcuucaacuucagccagauccugcccgaccccuccaagcccagcaagcgguccuucaucgaggaccuccuguucaacaaggugacccuggccgacgccggcuucaucaagcaguacggggacugccucggcgacaucgccgcgcgcgaccugaucugcgcccagaaguucaacgggcugaccguccucccgccccugcugaccgacgagaugaucgcccaguacaccagcgcccuccuggccggcaccaucacguccggguggaccuucggcgcgggcgccgcccugcagauccccuucgccaugcagauggcguaccgguucaacgggaucggcgugacccagaacgugcucuacgagaaccagaagcugaucgccaaccaguucaacagcgccaucgggaagauccaggacucccugagcuccaccgccagcgcccucggcaagcugcaggacgucgugaaccagaacgcgcaggcccugaacacgcucgugaagcagcuguccagcaacuucggggccaucuccagcguccugaacgacauccucucccgccuggacccgcccgaggccgaggugcagaucgaccggcugaucaccggccgccuccagagccugcagaccuacgugacccagcagcugauccgggccgcggagauccgcgccagcgccaaccucgccgccaccaagauguccgagugcguccugggccagagcaagcggguggacuucugcgggaagggcuaccaccugauguccuucccccagagcgcgccccacgggguggucuuccuccacgugacguacguccccgcccaggagaagaacuucaccaccgccccggccaucugccacgacggcaaggcgcacuucccccgcgaggggguguucguguccaacggcacccacugguucgucacgcagcggaacuucuacgagccccagaucaucaccaccgacaacaccuucgugagcggcaacugcgacguggucaucgggaucgugaacaacacgguguacgacccccugcagccggagcuggacuccuucaaggaggagcucgacaaguacuucaagaaccacaccagccccgacgucgaccugggcgacaucuccgggaucaacgccagcguggugaacauccagaaggagaucgaccgccugaacgaggucgccaagaaccucaacgagucccugaucgaccugcaggagcucggcaaguacgagcaguacaucaaguggcccugguacaucuggcugggcuucaucgccgggcugaucgccaucgugauggugaccaucaugcucugcugcaugaccagcugcugcuccugccugaagggcugcugcagcugcggguccugcugcaaguucgacgaggacgacagcgagccgguccugaagggcgugaagcuccacuacacgugaugacucgagcugguacugcaugcacgcaaugcuagcugccccuuucccguccuggguaccccgagucucccccgaccucgggucccagguaugcucccaccuccaccugccccacucaccaccucugcuaguuccagacaccucccaagcacgcagcaaugcagcucaaaacgcuuagccuagccacacccccacgggaaacagcagugauuaaccuuuagcaauaaacgaaaguuuaacuaagcuauacuaaccccaggguuggucaauuucgugccagccacacccuggagcuagcaaaaaaaaaaaaaaaaaaaaaaaaaaaaaaaaaaaaaaaaaaaaaaaaaaaaaaaaaaaaaaaaaaaaaaaaaaaaaaaaaaaaaaaaaaaaaaaaaaaa

SEQ ID NO: 26398 - RNA, 4273 nt, Artificial Sequence
  SARS-CoV-2/Wuhan/WIV05/2019__EPI_ISL_402128 spike protein mRNA gc (1-1273)(K986P_V987P_N439K_D614G)
agaauaaacuaguauucuucugguccccacagacucagagagaacccgccaccauguucguguuccugguccuccugccccuggugagcucccagugcgugaaccucaccacccgcacgcagcugccgcccgccuacaccaacagcuucacccggggcgucuacuaccccgacaagguguuccgcuccagcgugcugcacuccacccaggaccucuuccugcccuucuucagcaacgucacgugguuccacgccauccacguguccgggaccaacggcaccaagcgguucgacaacccggugcugcccuucaacgacggggucuacuucgcgagcaccgagaaguccaacaucauccgcggcuggaucuucgggacgacccucgacagcaagacccagucccugcugaucgugaacaacgccaccaacguggucaucaaggugugcgaguuccaguucugcaacgaccccuuccucggcguguacuaccacaagaacaacaagagcuggauggaguccgaguuccgggucuacagcuccgccaacaacugcacguucgaguacgugagccagcccuuccugauggaccuggagggcaagcaggggaacuucaagaaccuccgcgaguucguguucaagaacaucgacggcuacuucaagaucuacuccaagcacaccccgaucaaccugguccgggaccugccccagggguucagcgcccucgagccccugguggaccugcccaucggcaucaacaucacccgcuuccagacccuccuggcccugcaccgguccuaccucacgccgggggacagcagcuccggcuggaccgcgggcgccgccgccuacuacgugggguaccugcagccccgcaccuuccugcucaaguacaacgagaacggcaccaucacggacgcggucgacugcgcccuggacccccugagcgagaccaagugcacccucaaguccuucaccguggagaaggggaucuaccagacgagcaacuuccgggugcagcccaccgaguccaucguccgcuucccgaacaucaccaaccugugccccuucggcgagguguucaacgccacccgguucgccagcgucuacgccuggaaccgcaagcggaucuccaacugcguggcggacuacagcgugcuguacaacuccgccagcuucuccacguucaagugcuacggcgucagccccaccaagcucaacgaccugugcuucaccaacguguacgccgacuccuucgugauccgcggggacgagguccggcagaucgcccccggccagaccgggaagaucgccgacuacaacuacaagcugccggacgacuucacgggcugcgugaucgcguggaacagcaagaaccucgacuccaaggucgggggcaacuacaacuaccuguaccgccuguuccgcaagagcaaccucaagcccuucgagcgggacaucuccaccgagaucuaccaggccggcagcacccccugcaacgggguggagggcuucaacugcuacuucccccugcaguccuacggguuccagccgaccaacggcgugggguaccagcccuaccggguggucgugcugagcuucgagcuccugcacgcccccgccacggugugcggccccaagaaguccaccaaccuggucaagaacaagugcgugaacuucaacuucaacggccucaccgggaccggcgugcugaccgagagcaacaagaaguuccugccguuccagcaguucgggcgcgacaucgccgacacgaccgacgcgguccgcgacccccagacccuggagauccucgacaucacccccugcagcuucggcgggguguccgugaucacgccgggcaccaacaccagcaaccaggucgccgugcuguaccagggcgugaacugcaccgagguccccguggccauccacgccgaccagcugacgcccaccuggcggguguacuccaccgggagcaacgucuuccagacccgcgccggcugccucaucggggcggagcacgugaacaacuccuacgagugcgacauccccaucggcgccggcaucugcgccagcuaccagacgcagaccaacuccccgcggcgcgcccggagcguggcgucccagagcaucaucgccuacaccaugucccugggggccgagaacagcgucgccuacuccaacaacagcaucgccauccccaccaacuucacgaucuccgugaccaccgagauccugcccgugagcaugaccaagacgagcgucgacugcaccauguacaucugcggcgacuccaccgagugcagcaaccuccugcugcaguacggguccuucugcacccagcucaaccgcgcgcugacgggcaucgccguggagcaggacaagaacacccaggagguguucgcccaggucaagcagaucuacaagacgcccccgaucaaggacuucgggggcuucaacuucagccagauccugcccgaccccuccaagcccagcaagcgguccuucaucgaggaccuccuguucaacaaggugacccuggccgacgccggcuucaucaagcaguacggggacugccucggcgacaucgcggcccgcgaccugaucugcgcccagaaguucaacgggcugaccgugcucccgccccugcugaccgacgagaugaucgcccaguacaccagcgcccuccuggcgggcaccaucacguccggguggaccuucggcgccggcgccgcccugcagauccccuucgcgaugcagauggccuaccgguucaacgggaucggcgucacccagaacgugcucuacgagaaccagaagcugaucgccaaccaguucaacagcgccaucgggaagauccaggacucccugagcuccaccgccagcgcgcucggcaagcugcaggacguggucaaccagaacgcccaggcccugaacacgcucgugaagcagcuguccagcaacuucggggccaucuccagcgugcugaacgacauccucucccgccuggacccgcccgaggccgagguccagaucgaccggcugaucaccggccgccuccagagccugcagaccuacgugacccagcagcugauccgggcggccgagauccgcgccagcgccaaccucgccgcgaccaagauguccgagugcgugcugggccagagcaagcgggucgacuucugcgggaagggcuaccaccugauguccuucccccagagcgcgccccacggggugguguuccuccacgucacguacgugcccgcccaggagaagaacuucaccaccgccccggccaucugccacgacggcaaggcccacuucccccgcgagggggucuucguguccaacggcacccacugguucgugacgcagcggaacuucuacgagccccagaucaucaccaccgacaacaccuucgucagcggcaacugcgacguggugaucgggaucgucaacaacacgguguacgacccccugcagccggagcuggacuccuucaaggaggagcucgacaaguacuucaagaaccacaccagccccgacguggaccugggcgacaucuccgggaucaacgccagcgucgugaacauccagaaggagaucgaccgccugaacgagguggccaagaaccucaacgagucccugaucgaccugcaggagcucggcaaguacgagcaguacaucaaguggcccugguacaucuggcugggcuucaucgccgggcugaucgcgaucgucauggugaccaucaugcucugcugcaugaccagcugcugcuccugccugaagggcugcugcagcugcggguccugcugcaaguucgacgaggacgacagcgagccggugcugaagggcgucaagcuccacuacacgugaugacucgagcugguacugcaugcacgcaaugcuagcugccccuuucccguccuggguaccccgagucucccccgaccucgggucccagguaugcucccaccuccaccugccccacucaccaccucugcuaguuccagacaccucccaagcacgcagcaaugcagcucaaaacgcuuagccuagccacacccccacgggaaacagcagugauuaaccuuuagcaauaaacgaaaguuuaacuaagcuauacuaaccccaggguuggucaauuucgugccagccacacccuggagcuagcaaaaaaaaaaaaaaaaaaaaaaaaaaaaaaaaaaaaaaaaaaaaaaaaaaaaaaaaaaaaaaaaaaaaaaaaaaaaaaaaaaaaaaaaaaaaaaaaaaaa

SEQ ID NO: 26399 - RNA, 4273 nt, Artificial Sequence
  SARS-CoV-2/Wuhan/WIV05/2019__EPI_ISL_402128 spike protein mRNA gc (1-1273)(K986P_V987P_S477N_D614G)
agaauaaacuaguauucuucugguccccacagacucagagagaacccgccaccauguucguguuccugguccuccugccccuggugagcucccagugcgugaaccucaccacccgcacgcagcugccgcccgccuacaccaacagcuucacccggggcgucuacuaccccgacaagguguuccgcuccagcgugcugcacuccacccaggaccucuuccugcccuucuucagcaacgucacgugguuccacgccauccacguguccgggaccaacggcaccaagcgguucgacaacccggugcugcccuucaacgacggggucuacuucgcgagcaccgagaaguccaacaucauccgcggcuggaucuucgggacgacccucgacagcaagacccagucccugcugaucgugaacaacgccaccaacguggucaucaaggugugcgaguuccaguucugcaacgaccccuuccucggcguguacuaccacaagaacaacaagagcuggauggaguccgaguuccgggucuacagcuccgccaacaacugcacguucgaguacgugagccagcccuuccugauggaccuggagggcaagcaggggaacuucaagaaccuccgcgaguucguguucaagaacaucgacggcuacuucaagaucuacuccaagcacaccccgaucaaccugguccgggaccugccccagggguucagcgcccucgagccccugguggaccugcccaucggcaucaacaucacccgcuuccagacccuccuggcccugcaccgguccuaccucacgccgggggacagcagcuccggcuggaccgcgggcgccgccgccuacuacgugggguaccugcagccccgcaccuuccugcucaaguacaacgagaacggcaccaucacggacgcggucgacugcgcccuggacccccugagcgagaccaagugcacccucaaguccuucaccguggagaaggggaucuaccagacgagcaacuuccgggugcagcccaccgaguccaucguccgcuucccgaacaucaccaaccugugccccuucggcgagguguucaacgccacccgguucgccagcgucuacgccuggaaccgcaagcggaucuccaacugcguggcggacuacagcgugcuguacaacuccgccagcuucuccacguucaagugcuacggcgucagccccaccaagcucaacgaccugugcuucaccaacguguacgccgacuccuucgugauccgcggggacgagguccggcagaucgcccccggccagaccgggaagaucgccgacuacaacuacaagcugccggacgacuucacgggcugcgugaucgcguggaacagcaacaaccucgacuccaaggucgggggcaacuacaacuaccuguaccgccuguuccgcaagagcaaccucaagcccuucgagcgggacaucuccaccgagaucuaccaggccggcaacacccccugcaacgggguggagggcuucaacugcuacuucccccugcagagcuacggguuccagccgaccaacggcgugggguaccagcccuaccggguggucgugcuguccuucgagcuccugcacgcccccgccacggugugcggccccaagaaguccaccaaccuggucaagaacaagugcgugaacuucaacuucaacggccucaccgggaccggcgugcugaccgagagcaacaagaaguuccugccguuccagcaguucgggcgcgacaucgccgacacgaccgacgcgguccgcgacccccagacccuggagauccucgacaucacccccugcagcuucggcggggugagcgugaucacgccgggcaccaacaccuccaaccaggucgccgugcuguaccagggcgugaacugcaccgagguccccguggccauccacgccgaccagcugacgcccaccuggcggguguacagcaccggguccaacgucuuccagacccgcgccggcugccucaucggggcggagcacgugaacaacagcuacgagugcgacauccccaucggcgccggcaucugcgccuccuaccagacgcagaccaacagcccgcggcgcgcccgguccguggcgagccaguccaucaucgccuacaccaugagccugggggccgagaacuccgucgccuacagcaacaacuccaucgccauccccaccaacuucacgaucagcgugaccaccgagauccugcccguguccaugaccaagacgagcgucgacugcaccauguacaucugcggcgacagcaccgagugcuccaaccuccugcugcaguacgggagcuucugcacccagcucaaccgcgcgcugacgggcaucgccguggagcaggacaagaacacccaggagguguucgcccaggucaagcagaucuacaagacgcccccgaucaaggacuucgggggcuucaacuucucccagauccugcccgaccccagcaagcccuccaagcggagcuucaucgaggaccuccuguucaacaaggugacccuggccgacgccggcuucaucaagcaguacggggacugccucggcgacaucgcggcccgcgaccugaucugcgcccagaaguucaacgggcugaccgugcucccgccccugcugaccgacgagaugaucgcccaguacaccuccgcccuccuggcgggcaccaucacgagcggguggaccuucggcgccggcgccgcccugcagauccccuucgcgaugcagauggccuaccgguucaacgggaucggcgucacccagaacgugcucuacgagaaccagaagcugaucgccaaccaguucaacuccgccaucgggaagauccaggacagccuguccagcaccgccuccgcgcucggcaagcugcaggacguggucaaccagaacgcccaggcccugaacacgcucgugaagcagcugagcuccaacuucggggccaucagcuccgugcugaacgacauccucagccgccuggacccgcccgaggccgagguccagaucgaccggcugaucaccggccgccuccagucccugcagaccuacgugacccagcagcugauccgggcggccgagauccgcgccagcgccaaccucgccgcgaccaagaugagcgagugcgugcugggccaguccaagcgggucgacuucugcgggaagggcuaccaccugaugagcuucccccaguccgcgccccacggggugguguuccuccacgucacguacgugcccgcccaggagaagaacuucaccaccgccccggccaucugccacgacggcaaggcccacuucccccgcgagggggucuucgugagcaacggcacccacugguucgugacgcagcggaacuucuacgagccccagaucaucaccaccgacaacaccuucgucuccggcaacugcgacguggugaucgggaucgucaacaacacgguguacgacccccugcagccggagcuggacagcuucaaggaggagcucgacaaguacuucaagaaccacaccucccccgacguggaccugggcgacaucagcgggaucaacgccuccgucgugaacauccagaaggagaucgaccgccugaacgagguggccaagaaccucaacgagagccugaucgaccugcaggagcucggcaaguacgagcaguacaucaaguggcccugguacaucuggcugggcuucaucgccgggcugaucgcgaucgucauggugaccaucaugcucugcugcaugaccuccugcugcagcugccugaagggcugcugcuccugcgggagcugcugcaaguucgacgaggacgacuccgagccggugcugaagggcgucaagcuccacuacacgugaugacucgagcugguacugcaugcacgcaaugcuagcugccccuuucccguccuggguaccccgagucucccccgaccucgggucccagguaugcucccaccuccaccugccccacucaccaccucugcuaguuccagacaccucccaagcacgcagcaaugcagcucaaaacgcuuagccuagccacacccccacgggaaacagcagugauuaaccuuuagcaauaaacgaaaguuuaacuaagcuauacuaaccccaggguuggucaauuucgugccagccacacccuggagcuagcaaaaaaaaaaaaaaaaaaaaaaaaaaaaaaaaaaaaaaaaaaaaaaaaaaaaaaaaaaaaaaaaaaaaaaaaaaaaaaaaaaaaaaaaaaaaaaaaaaaa

SEQ ID NO: 26400 - RNA, 4273 nt, Artificial Sequence
  SARS-CoV-2/Wuhan/WIV05/2019__EPI_ISL_402128 spike protein mRNA gc (1-1273)(K986P_V987P_N501Y_D614G)
agaauaaacuaguauucuucugguccccacagacucagagagaacccgccaccauguucguguuccugguccuccugccccuggugagcucccagugcgugaaccucaccacccgcacgcagcugccgcccgccuacaccaacagcuucacccggggcgucuacuaccccgacaagguguuccgcuccagcgugcugcacuccacccaggaccucuuccugcccuucuucagcaacgucacgugguuccacgccauccacguguccgggaccaacggcaccaagcgguucgacaacccggugcugcccuucaacgacggggucuacuucgcgagcaccgagaaguccaacaucauccgcggcuggaucuucgggacgacccucgacagcaagacccagucccugcugaucgugaacaacgccaccaacguggucaucaaggugugcgaguuccaguucugcaacgaccccuuccucggcguguacuaccacaagaacaacaagagcuggauggaguccgaguuccgggucuacagcuccgccaacaacugcacguucgaguacgugagccagcccuuccugauggaccuggagggcaagcaggggaacuucaagaaccuccgcgaguucguguucaagaacaucgacggcuacuucaagaucuacuccaagcacaccccgaucaaccugguccgggaccugccccagggguucagcgcccucgagccccugguggaccugcccaucggcaucaacaucacccgcuuccagacccuccuggcccugcaccgguccuaccucacgccgggggacagcagcuccggcuggaccgcgggcgccgccgccuacuacgugggguaccugcagccccgcaccuuccugcucaaguacaacgagaacggcaccaucacggacgcggucgacugcgcccuggacccccugagcgagaccaagugcacccucaaguccuucaccguggagaaggggaucuaccagacgagcaacuuccgggugcagcccaccgaguccaucguccgcuucccgaacaucaccaaccugugccccuucggcgagguguucaacgccacccgguucgccagcgucuacgccuggaaccgcaagcggaucuccaacugcguggcggacuacagcgugcuguacaacuccgccagcuucuccacguucaagugcuacggcgucagccccaccaagcucaacgaccugugcuucaccaacguguacgccgacuccuucgugauccgcggggacgagguccggcagaucgcccccggccagaccgggaagaucgccgacuacaacuacaagcugccggacgacuucacgggcugcgugaucgcguggaacagcaacaaccucgacuccaaggucgggggcaacuacaacuaccuguaccgccuguuccgcaagagcaaccucaagcccuucgagcgggacaucuccaccgagaucuaccaggccggcagcacccccugcaacgggguggagggcuucaacugcuacuucccccugcaguccuacggguuccagccgaccuacggcgugggguaccagcccuaccggguggucgugcugagcuucgagcuccugcacgcccccgccacggugugcggccccaagaaguccaccaaccuggucaagaacaagugcgugaacuucaacuucaacggccucaccgggaccggcgugcugaccgagagcaacaagaaguuccugccguuccagcaguucgggcgcgacaucgccgacacgaccgacgcgguccgcgacccccagacccuggagauccucgacaucacccccugcagcuucggcgggguguccgugaucacgccgggcaccaacaccagcaaccaggucgccgugcuguaccagggcgugaacugcaccgagguccccguggccauccacgccgaccagcugacgcccaccuggcggguguacuccaccgggagcaacgucuuccagacccgcgccggcugccucaucggggcggagcacgugaacaacuccuacgagugcgacauccccaucggcgccggcaucugcgccagcuaccagacgcagaccaacuccccgcggcgcgcccggagcguggcgucccagagcaucaucgccuacaccaugucccugggggccgagaacagcgucgccuacuccaacaacagcaucgccauccccaccaacuucacgaucuccgugaccaccgagauccugcccgugagcaugaccaagacgagcgucgacugcaccauguacaucugcggcgacuccaccgagugcagcaaccuccugcugcaguacggguccuucugcacccagcucaaccgcgcgcugacgggcaucgccguggagcaggacaagaacacccaggagguguucgcccaggucaagcagaucuacaagacgcccccgaucaaggacuucgggggcuucaacuucagccagauccugcccgaccccuccaagcccagcaagcgguccuucaucgaggaccuccuguucaacaaggugacccuggccgacgccggcuucaucaagcaguacggggacugccucggcgacaucgcggcccgcgaccugaucugcgcccagaaguucaacgggcugaccgugcucccgccccugcugaccgacgagaugaucgcccaguacaccagcgcccuccuggcgggcaccaucacguccggguggaccuucggcgccggcgccgcccugcagauccccuucgcgaugcagauggccuaccgguucaacgggaucggcgucacccagaacgugcucuacgagaaccagaagcugaucgccaaccaguucaacagcgccaucgggaagauccaggacucccugagcuccaccgccagcgcgcucggcaagcugcaggacguggucaaccagaacgcccaggcccugaacacgcucgugaagcagcuguccagcaacuucggggccaucuccagcgugcugaacgacauccucucccgccuggacccgcccgaggccgagguccagaucgaccggcugaucaccggccgccuccagagccugcagaccuacgugacccagcagcugauccgggcggccgagauccgcgccagcgccaaccucgccgcgaccaagauguccgagugcgugcugggccagagcaagcgggucgacuucugcgggaagggcuaccaccugauguccuucccccagagcgcgccccacggggugguguuccuccacgucacguacgugcccgcccaggagaagaacuucaccaccgccccggccaucugccacgacggcaaggcccacuucccccgcgagggggucuucguguccaacggcacccacugguucgugacgcagcggaacuucuacgagccccagaucaucaccaccgacaacaccuucgucagcggcaacugcgacguggugaucgggaucgucaacaacacgguguacgacccccugcagccggagcuggacuccuucaaggaggagcucgacaaguacuucaagaaccacaccagccccgacguggaccugggcgacaucuccgggaucaacgccagcgucgugaacauccagaaggagaucgaccgccugaacgagguggccaagaaccucaacgagucccugaucgaccugcaggagcucggcaaguacgagcaguacaucaaguggcccugguacaucuggcugggcuucaucgccgggcugaucgcgaucgucauggugaccaucaugcucugcugcaugaccagcugcugcuccugccugaagggcugcugcagcugcggguccugcugcaaguucgacgaggacgacagcgagccggugcugaagggcgucaagcuccacuacacgugaugacucgagcugguacugcaugcacgcaaugcuagcugccccuuucccguccuggguaccccgagucucccccgaccucgggucccagguaugcucccaccuccaccugccccacucaccaccucugcuaguuccagacaccucccaagcacgcagcaaugcagcucaaaacgcuuagccuagccacacccccacgggaaacagcagugauuaaccuuuagcaauaaacgaaaguuuaacuaagcuauacuaaccccaggguuggucaauuucgugccagccacacccuggagcuagcaaaaaaaaaaaaaaaaaaaaaaaaaaaaaaaaaaaaaaaaaaaaaaaaaaaaaaaaaaaaaaaaaaaaaaaaaaaaaaaaaaaaaaaaaaaaaaaaaaaa

SEQ ID NO: 26401 - RNA, 4267 nt, Artificial Sequence
  SARS-CoV-2/Wuhan/WIV05/2019__EPI_ISL_402128 spike protein mRNA gc (1-1273)(K986P_V987P_H69del_V70del_D614G)
agaauaaacuaguauucuucugguccccacagacucagagagaacccgccaccauguucguguuccugguccuccugccccuggugagcucccagugcgugaaccucaccacccgcacgcagcugccgcccgccuacaccaacagcuucacccggggcgucuacuaccccgacaagguguuccgcuccagcgugcugcacuccacccaggaccucuuccugcccuucuucagcaacgucacgugguuccacgccaucuccgggaccaacggcaccaagcgguucgacaacccggugcugcccuucaacgacgggguguacuucgcgagcaccgagaaguccaacaucauccgcggcuggaucuucgggacgacccucgacagcaagacccagucccugcugaucgucaacaacgccaccaacguggugaucaaggucugcgaguuccaguucugcaacgaccccuuccucggcguguacuaccacaagaacaacaagagcuggauggaguccgaguuccggguguacagcuccgccaacaacugcacguucgaguacgucagccagcccuuccugauggaccuggagggcaagcaggggaacuucaagaaccuccgcgaguucguguucaagaacaucgacggcuacuucaagaucuacuccaagcacaccccgaucaaccuggugcgggaccugccccagggguucagcgcccucgagccccuggucgaccugcccaucggcaucaacaucacccgcuuccagacccuccuggcccugcaccgguccuaccucacgccgggggacagcagcuccggcuggaccgcgggcgccgccgccuacuacgugggguaccugcagccccgcaccuuccugcucaaguacaacgagaacggcaccaucacggacgcgguggacugcgcccuggacccccugagcgagaccaagugcacccucaaguccuucaccgucgagaaggggaucuaccagacgagcaacuuccgggugcagcccaccgaguccaucgugcgcuucccgaacaucaccaaccugugccccuucggcgaggucuucaacgccacccgguucgccagcguguacgccuggaaccgcaagcggaucuccaacugcgucgcggacuacagcgugcuguacaacuccgccagcuucuccacguucaagugcuacggcgugagccccaccaagcucaacgaccugugcuucaccaacgucuacgccgacuccuucgugauccgcggggacgaggugcggcagaucgcccccggccagaccgggaagaucgccgacuacaacuacaagcugccggacgacuucacgggcugcgucaucgcguggaacagcaacaaccucgacuccaaggucgggggcaacuacaacuaccuguaccgccuguuccgcaagagcaaccucaagcccuucgagcgggacaucuccaccgagaucuaccaggccggcagcacccccugcaacgggguggagggcuucaacugcuacuucccccugcaguccuacggguuccagccgaccaacggcgugggguaccagcccuaccggguggugguccugagcuucgagcuccugcacgcccccgccacggugugcggccccaagaaguccaccaaccuggugaagaacaagugcgucaacuucaacuucaacggccucaccgggaccggcgugcugaccgagagcaacaagaaguuccugccguuccagcaguucgggcgcgacaucgccgacacgaccgacgcggugcgcgacccccagacccuggagauccucgacaucacccccugcagcuucggcggggucuccgugaucacgccgggcaccaacaccagcaaccagguggccguccuguaccagggcgugaacugcaccgaggugcccgucgccauccacgccgaccagcugacgcccaccuggcggguguacuccaccgggagcaacguguuccagacccgcgccggcugccucaucggggcggagcacgucaacaacuccuacgagugcgacauccccaucggcgccggcaucugcgccagcuaccagacgcagaccaacuccccgcggcgcgcccggagcguggcgucccagagcaucaucgccuacaccaugucccugggggccgagaacagcguggccuacuccaacaacagcaucgccauccccaccaacuucacgaucuccgucaccaccgagauccugcccgugagcaugaccaagacgagcguggacugcaccauguacaucugcggcgacuccaccgagugcagcaaccuccugcugcaguacggguccuucugcacccagcucaaccgcgcgcugacgggcaucgccgucgagcaggacaagaacacccaggagguguucgcccaggugaagcagaucuacaagacgcccccgaucaaggacuucgggggcuucaacuucagccagauccugcccgaccccuccaagcccagcaagcgguccuucaucgaggaccuccuguucaacaaggucacccuggccgacgccggcuucaucaagcaguacggggacugccucggcgacaucgcggcccgcgaccugaucugcgcccagaaguucaacgggcugaccgugcucccgccccugcugaccgacgagaugaucgcccaguacaccagcgcccuccuggcgggcaccaucacguccggguggaccuucggcgccggcgccgcccugcagauccccuucgcgaugcagauggccuaccgguucaacgggaucggcgugacccagaacguccucuacgagaaccagaagcugaucgccaaccaguucaacagcgccaucgggaagauccaggacucccugagcuccaccgccagcgcgcucggcaagcugcaggacguggugaaccagaacgcccaggcccugaacacgcucgucaagcagcuguccagcaacuucggggccaucuccagcgugcugaacgacauccucucccgccuggacccgcccgaggccgaggugcagaucgaccggcugaucaccggccgccuccagagccugcagaccuacgucacccagcagcugauccgggcggccgagauccgcgccagcgccaaccucgccgcgaccaagauguccgagugcgugcugggccagagcaagcggguggacuucugcgggaagggcuaccaccugauguccuucccccagagcgcgccccacggggucguguuccuccacgugacguacguccccgcccaggagaagaacuucaccaccgccccggccaucugccacgacggcaaggcccacuucccccgcgaggggguguucgucuccaacggcacccacugguucgugacgcagcggaacuucuacgagccccagaucaucaccaccgacaacaccuucgugagcggcaacugcgacgucgugaucgggaucgugaacaacacggucuacgacccccugcagccggagcuggacuccuucaaggaggagcucgacaaguacuucaagaaccacaccagccccgacguggaccugggcgacaucuccgggaucaacgccagcguggucaacauccagaaggagaucgaccgccugaacgagguggccaagaaccucaacgagucccugaucgaccugcaggagcucggcaaguacgagcaguacaucaaguggcccugguacaucuggcugggcuucaucgccgggcugaucgcgaucgugauggucaccaucaugcucugcugcaugaccagcugcugcuccugccugaagggcugcugcagcugcggguccugcugcaaguucgacgaggacgacagcgagccggugcugaagggcgugaagcuccacuacacgugaugacucgagcugguacugcaugcacgcaaugcuagcugccccuuucccguccuggguaccccgagucucccccgaccucgggucccagguaugcucccaccuccaccugccccacucaccaccucugcuaguuccagacaccucccaagcacgcagcaaugcagcucaaaacgcuuagccuagccacacccccacgggaaacagcagugauuaaccuuuagcaauaaacgaaaguuuaacuaagcuauacuaaccccaggguuggucaauuucgugccagccacacccuggagcuagcaaaaaaaaaaaaaaaaaaaaaaaaaaaaaaaaaaaaaaaaaaaaaaaaaaaaaaaaaaaaaaaaaaaaaaaaaaaaaaaaaaaaaaaaaaaaaaaaaaaa

SEQ ID NO: 26402 - RNA, 4273 nt, Artificial Sequence
  SARS-CoV-2/Wuhan/WIV05/2019__EPI_ISL_402128 spike protein mRNA gc (1-1273)(K986P_V987P_Y453F_D614G)
agaauaaacuaguauucuucugguccccacagacucagagagaacccgccaccauguucguguuccugguccuccugccccuggugagcucccagugcgugaaccucaccacccgcacgcagcugccgcccgccuacaccaacagcuucacccggggcgucuacuaccccgacaagguguuccgcuccagcgugcugcacuccacccaggaccucuuccugcccuucuucagcaacgucacgugguuccacgccauccacguguccgggaccaacggcaccaagcgguucgacaacccggugcugcccuucaacgacggggucuacuucgcgagcaccgagaaguccaacaucauccgcggcuggaucuucgggacgacccucgacagcaagacccagucccugcugaucgugaacaacgccaccaacguggucaucaaggugugcgaguuccaguucugcaacgaccccuuccucggcguguacuaccacaagaacaacaagagcuggauggaguccgaguuccgggucuacagcuccgccaacaacugcacguucgaguacgugagccagcccuuccugauggaccuggagggcaagcaggggaacuucaagaaccuccgcgaguucguguucaagaacaucgacggcuacuucaagaucuacuccaagcacaccccgaucaaccugguccgggaccugccccagggguucagcgcccucgagccccugguggaccugcccaucggcaucaacaucacccgcuuccagacccuccuggcccugcaccgguccuaccucacgccgggggacagcagcuccggcuggaccgcgggcgccgccgccuacuacgugggguaccugcagccccgcaccuuccugcucaaguacaacgagaacggcaccaucacggacgcggucgacugcgcccuggacccccugagcgagaccaagugcacccucaaguccuucaccguggagaaggggaucuaccagacgagcaacuuccgggugcagcccaccgaguccaucguccgcuucccgaacaucaccaaccugugccccuucggcgagguguucaacgccacccgguucgccagcgucuacgccuggaaccgcaagcggaucuccaacugcguggcggacuacagcgugcuguacaacuccgccagcuucuccacguucaagugcuacggcgucagccccaccaagcucaacgaccugugcuucaccaacguguacgccgacuccuucgugauccgcggggacgagguccggcagaucgcccccggccagaccgggaagaucgccgacuacaacuacaagcugccggacgacuucacgggcugcgugaucgcguggaacagcaacaaccucgacuccaaggucgggggcaacuacaacuaccuguuccgccuguuccgcaagagcaaccucaagcccuucgagcgggacaucuccaccgagaucuaccaggccggcagcacccccugcaacgggguggagggcuucaacugcuacuucccccugcaguccuacggguuccagccgaccaacggcgugggguaccagcccuaccggguggucgugcugagcuucgagcuccugcacgcccccgccacggugugcggccccaagaaguccaccaaccuggucaagaacaagugcgugaacuucaacuucaacggccucaccgggaccggcgugcugaccgagagcaacaagaaguuccugccguuccagcaguucgggcgcgacaucgccgacacgaccgacgcgguccgcgacccccagacccuggagauccucgacaucacccccugcagcuucggcgggguguccgugaucacgccgggcaccaacaccagcaaccaggucgccgugcuguaccagggcgugaacugcaccgagguccccguggccauccacgccgaccagcugacgcccaccuggcggguguacuccaccgggagcaacgucuuccagacccgcgccggcugccucaucggggcggagcacgugaacaacuccuacgagugcgacauccccaucggcgccggcaucugcgccagcuaccagacgcagaccaacuccccgcggcgcgcccggagcguggcgucccagagcaucaucgccuacaccaugucccugggggccgagaacagcgucgccuacuccaacaacagcaucgccauccccaccaacuucacgaucuccgugaccaccgagauccugcccgugagcaugaccaagacgagcgucgacugcaccauguacaucugcggcgacuccaccgagugcagcaaccuccugcugcaguacggguccuucugcacccagcucaaccgcgcgcugacgggcaucgccguggagcaggacaagaacacccaggagguguucgcccaggucaagcagaucuacaagacgcccccgaucaaggacuucgggggcuucaacuucagccagauccugcccgaccccuccaagcccagcaagcgguccuucaucgaggaccuccuguucaacaaggugacccuggccgacgccggcuucaucaagcaguacggggacugccucggcgacaucgcggcccgcgaccugaucugcgcccagaaguucaacgggcugaccgugcucccgccccugcugaccgacgagaugaucgcccaguacaccagcgcccuccuggcgggcaccaucacguccggguggaccuucggcgccggcgccgcccugcagauccccuucgcgaugcagauggccuaccgguucaacgggaucggcgucacccagaacgugcucuacgagaaccagaagcugaucgccaaccaguucaacagcgccaucgggaagauccaggacucccugagcuccaccgccagcgcgcucggcaagcugcaggacguggucaaccagaacgcccaggcccugaacacgcucgugaagcagcuguccagcaacuucggggccaucuccagcgugcugaacgacauccucucccgccuggacccgcccgaggccgagguccagaucgaccggcugaucaccggccgccuccagagccugcagaccuacgugacccagcagcugauccgggcggccgagauccgcgccagcgccaaccucgccgcgaccaagauguccgagugcgugcugggccagagcaagcgggucgacuucugcgggaagggcuaccaccugauguccuucccccagagcgcgccccacggggugguguuccuccacgucacguacgugcccgcccaggagaagaacuucaccaccgccccggccaucugccacgacggcaaggcccacuucccccgcgagggggucuucguguccaacggcacccacugguucgugacgcagcggaacuucuacgagccccagaucaucaccaccgacaacaccuucgucagcggcaacugcgacguggugaucgggaucgucaacaacacgguguacgacccccugcagccggagcuggacuccuucaaggaggagcucgacaaguacuucaagaaccacaccagccccgacguggaccugggcgacaucuccgggaucaacgccagcgucgugaacauccagaaggagaucgaccgccugaacgagguggccaagaaccucaacgagucccugaucgaccugcaggagcucggcaaguacgagcaguacaucaaguggcccugguacaucuggcugggcuucaucgccgggcugaucgcgaucgucauggugaccaucaugcucugcugcaugaccagcugcugcuccugccugaagggcugcugcagcugcggguccugcugcaaguucgacgaggacgacagcgagccggugcugaagggcgucaagcuccacuacacgugaugacucgagcugguacugcaugcacgcaaugcuagcugccccuuucccguccuggguaccccgagucucccccgaccucgggucccagguaugcucccaccuccaccugccccacucaccaccucugcuaguuccagacaccucccaagcacgcagcaaugcagcucaaaacgcuuagccuagccacacccccacgggaaacagcagugauuaaccuuuagcaauaaacgaaaguuuaacuaagcuauacuaaccccaggguuggucaauuucgugccagccacacccuggagcuagcaaaaaaaaaaaaaaaaaaaaaaaaaaaaaaaaaaaaaaaaaaaaaaaaaaaaaaaaaaaaaaaaaaaaaaaaaaaaaaaaaaaaaaaaaaaaaaaaaaaa

SEQ ID NO: 26403 - RNA, 4273 nt, Artificial Sequence
  SARS-CoV-2/Wuhan/WIV05/2019__EPI_ISL_402128 spike protein mRNA gc (1-1273)(K986P_V987P_D614G_I692V)
agaauaaacuaguauucuucugguccccacagacucagagagaacccgccaccauguucguguuccugguccuccugccccuggugagcucccagugcgugaaccucaccacccgcacgcagcugccgcccgccuacaccaacagcuucacccggggcgucuacuaccccgacaagguguuccgcuccagcgugcugcacuccacccaggaccucuuccugcccuucuucagcaacgucacgugguuccacgccauccacguguccgggaccaacggcaccaagcgguucgacaacccggugcugcccuucaacgacggggucuacuucgcgagcaccgagaaguccaacaucauccgcggcuggaucuucgggacgacccucgacagcaagacccagucccugcugaucgugaacaacgccaccaacguggucaucaaggugugcgaguuccaguucugcaacgaccccuuccucggcguguacuaccacaagaacaacaagagcuggauggaguccgaguuccgggucuacagcuccgccaacaacugcacguucgaguacgugagccagcccuuccugauggaccuggagggcaagcaggggaacuucaagaaccuccgcgaguucguguucaagaacaucgacggcuacuucaagaucuacuccaagcacaccccgaucaaccugguccgggaccugccccagggguucagcgcccucgagccccugguggaccugcccaucggcaucaacaucacccgcuuccagacccuccuggcccugcaccgguccuaccucacgccgggggacagcagcuccggcuggaccgcgggcgccgccgccuacuacgugggguaccugcagccccgcaccuuccugcucaaguacaacgagaacggcaccaucacggacgcggucgacugcgcccuggacccccugagcgagaccaagugcacccucaaguccuucaccguggagaaggggaucuaccagacgagcaacuuccgggugcagcccaccgaguccaucguccgcuucccgaacaucaccaaccugugccccuucggcgagguguucaacgccacccgguucgccagcgucuacgccuggaaccgcaagcggaucuccaacugcguggcggacuacagcgugcuguacaacuccgccagcuucuccacguucaagugcuacggcgucagccccaccaagcucaacgaccugugcuucaccaacguguacgccgacuccuucgugauccgcggggacgagguccggcagaucgcccccggccagaccgggaagaucgccgacuacaacuacaagcugccggacgacuucacgggcugcgugaucgcguggaacagcaacaaccucgacuccaaggucgggggcaacuacaacuaccuguaccgccuguuccgcaagagcaaccucaagcccuucgagcgggacaucuccaccgagaucuaccaggccggcagcacccccugcaacgggguggagggcuucaacugcuacuucccccugcaguccuacggguuccagccgaccaacggcgugggguaccagcccuaccggguggucgugcugagcuucgagcuccugcacgcccccgccacggugugcggccccaagaaguccaccaaccuggucaagaacaagugcgugaacuucaacuucaacggccucaccgggaccggcgugcugaccgagagcaacaagaaguuccugccguuccagcaguucgggcgcgacaucgccgacacgaccgacgcgguccgcgacccccagacccuggagauccucgacaucacccccugcagcuucggcgggguguccgugaucacgccgggcaccaacaccagcaaccaggucgccgugcuguaccagggcgugaacugcaccgagguccccguggccauccacgccgaccagcugacgcccaccuggcggguguacuccaccgggagcaacgucuuccagacccgcgccggcugccucaucggggcggagcacgugaacaacuccuacgagugcgacauccccaucggcgccggcaucugcgccagcuaccagacgcagaccaacuccccgcggcgcgcccggagcguggcgucccagagcgucaucgccuacaccaugucccugggggccgagaacagcguggccuacuccaacaacagcaucgccauccccaccaacuucacgaucuccgugaccaccgagauccugcccgucagcaugaccaagacgagcguggacugcaccauguacaucugcggcgacuccaccgagugcagcaaccuccugcugcaguacggguccuucugcacccagcucaaccgcgcgcugacgggcaucgccguggagcaggacaagaacacccaggaggucuucgcccaggugaagcagaucuacaagacgcccccgaucaaggacuucgggggcuucaacuucagccagauccugcccgaccccuccaagcccagcaagcgguccuucaucgaggaccuccuguucaacaaggugacccuggccgacgccggcuucaucaagcaguacggggacugccucggcgacaucgcggcccgcgaccugaucugcgcccagaaguucaacgggcugaccguccucccgccccugcugaccgacgagaugaucgcccaguacaccagcgcccuccuggcgggcaccaucacguccggguggaccuucggcgccggcgccgcccugcagauccccuucgcgaugcagauggccuaccgguucaacgggaucggcgugacccagaacgugcucuacgagaaccagaagcugaucgccaaccaguucaacagcgccaucgggaagauccaggacucccugagcuccaccgccagcgcgcucggcaagcugcaggacgucgugaaccagaacgcccaggcccugaacacgcucgugaagcagcuguccagcaacuucggggccaucuccagcguccugaacgacauccucucccgccuggacccgcccgaggccgaggugcagaucgaccggcugaucaccggccgccuccagagccugcagaccuacgugacccagcagcugauccgggcggccgagauccgcgccagcgccaaccucgccgcgaccaagauguccgagugcguccugggccagagcaagcggguggacuucugcgggaagggcuaccaccugauguccuucccccagagcgcgccccacgggguggucuuccuccacgugacguacguccccgcccaggagaagaacuucaccaccgccccggccaucugccacgacggcaaggcccacuucccccgcgaggggguguucguguccaacggcacccacugguucgucacgcagcggaacuucuacgagccccagaucaucaccaccgacaacaccuucgugagcggcaacugcgacguggucaucgggaucgugaacaacacgguguacgacccccugcagccggagcuggacuccuucaaggaggagcucgacaaguacuucaagaaccacaccagccccgacgucgaccugggcgacaucuccgggaucaacgccagcguggugaacauccagaaggagaucgaccgccugaacgaggucgccaagaaccucaacgagucccugaucgaccugcaggagcucggcaaguacgagcaguacaucaaguggcccugguacaucuggcugggcuucaucgccgggcugaucgcgaucgugauggugaccaucaugcucugcugcaugaccagcugcugcuccugccugaagggcugcugcagcugcggguccugcugcaaguucgacgaggacgacagcgagccgguccugaagggcgugaagcuccacuacacgugaugacucgagcugguacugcaugcacgcaaugcuagcugccccuuucccguccuggguaccccgagucucccccgaccucgggucccagguaugcucccaccuccaccugccccacucaccaccucugcuaguuccagacaccucccaagcacgcagcaaugcagcucaaaacgcuuagccuagccacacccccacgggaaacagcagugauuaaccuuuagcaauaaacgaaaguuuaacuaagcuauacuaaccccaggguuggucaauuucgugccagccacacccuggagcuagcaaaaaaaaaaaaaaaaaaaaaaaaaaaaaaaaaaaaaaaaaaaaaaaaaaaaaaaaaaaaaaaaaaaaaaaaaaaaaaaaaaaaaaaaaaaaaaaaaaaa

SEQ ID NO: 26404 - RNA, 4273 nt, Artificial Sequence
  SARS-CoV-2/Wuhan/WIV05/2019__EPI_ISL_402128 spike protein mRNA gc (1-1273)(K986P_V987P_D614G_M1229I)
agaauaaacuaguauucuucugguccccacagacucagagagaacccgccaccauguucguguuccugguccuccugccccuggugagcucccagugcgugaaccucaccacccgcacgcagcugccgcccgccuacaccaacagcuucacccggggcgucuacuaccccgacaagguguuccgcuccagcgugcugcacuccacccaggaccucuuccugcccuucuucagcaacgucacgugguuccacgccauccacguguccgggaccaacggcaccaagcgguucgacaacccggugcugcccuucaacgacggggucuacuucgcgagcaccgagaaguccaacaucauccgcggcuggaucuucgggacgacccucgacagcaagacccagucccugcugaucgugaacaacgccaccaacguggucaucaaggugugcgaguuccaguucugcaacgaccccuuccucggcguguacuaccacaagaacaacaagagcuggauggaguccgaguuccgggucuacagcuccgccaacaacugcacguucgaguacgugagccagcccuuccugauggaccuggagggcaagcaggggaacuucaagaaccuccgcgaguucguguucaagaacaucgacggcuacuucaagaucuacuccaagcacaccccgaucaaccugguccgggaccugccccagggguucagcgcccucgagccccugguggaccugcccaucggcaucaacaucacccgcuuccagacccuccuggcccugcaccgguccuaccucacgccgggggacagcagcuccggcuggaccgcgggcgccgccgccuacuacgugggguaccugcagccccgcaccuuccugcucaaguacaacgagaacggcaccaucacggacgcggucgacugcgcccuggacccccugagcgagaccaagugcacccucaaguccuucaccguggagaaggggaucuaccagacgagcaacuuccgggugcagcccaccgaguccaucguccgcuucccgaacaucaccaaccugugccccuucggcgagguguucaacgccacccgguucgccagcgucuacgccuggaaccgcaagcggaucuccaacugcguggcggacuacagcgugcuguacaacuccgccagcuucuccacguucaagugcuacggcgucagccccaccaagcucaacgaccugugcuucaccaacguguacgccgacuccuucgugauccgcggggacgagguccggcagaucgcccccggccagaccgggaagaucgccgacuacaacuacaagcugccggacgacuucacgggcugcgugaucgcguggaacagcaacaaccucgacuccaaggucgggggcaacuacaacuaccuguaccgccuguuccgcaagagcaaccucaagcccuucgagcgggacaucuccaccgagaucuaccaggccggcagcacccccugcaacgggguggagggcuucaacugcuacuucccccugcaguccuacggguuccagccgaccaacggcgugggguaccagcccuaccggguggucgugcugagcuucgagcuccugcacgcccccgccacggugugcggccccaagaaguccaccaaccuggucaagaacaagugcgugaacuucaacuucaacggccucaccgggaccggcgugcugaccgagagcaacaagaaguuccugccguuccagcaguucgggcgcgacaucgccgacacgaccgacgcgguccgcgacccccagacccuggagauccucgacaucacccccugcagcuucggcgggguguccgugaucacgccgggcaccaacaccagcaaccaggucgccgugcuguaccagggcgugaacugcaccgagguccccguggccauccacgccgaccagcugacgcccaccuggcggguguacuccaccgggagcaacgucuuccagacccgcgccggcugccucaucggggcggagcacgugaacaacuccuacgagugcgacauccccaucggcgccggcaucugcgccagcuaccagacgcagaccaacuccccgcggcgcgcccggagcguggcgucccagagcaucaucgccuacaccaugucccugggggccgagaacagcgucgccuacuccaacaacagcaucgccauccccaccaacuucacgaucuccgugaccaccgagauccugcccgugagcaugaccaagacgagcgucgacugcaccauguacaucugcggcgacuccaccgagugcagcaaccuccugcugcaguacggguccuucugcacccagcucaaccgcgcgcugacgggcaucgccguggagcaggacaagaacacccaggagguguucgcccaggucaagcagaucuacaagacgcccccgaucaaggacuucgggggcuucaacuucagccagauccugcccgaccccuccaagcccagcaagcgguccuucaucgaggaccuccuguucaacaaggugacccuggccgacgccggcuucaucaagcaguacggggacugccucggcgacaucgcggcccgcgaccugaucugcgcccagaaguucaacgggcugaccgugcucccgccccugcugaccgacgagaugaucgcccaguacaccagcgcccuccuggcgggcaccaucacguccggguggaccuucggcgccggcgccgcccugcagauccccuucgcgaugcagauggccuaccgguucaacgggaucggcgucacccagaacgugcucuacgagaaccagaagcugaucgccaaccaguucaacagcgccaucgggaagauccaggacucccugagcuccaccgccagcgcgcucggcaagcugcaggacguggucaaccagaacgcccaggcccugaacacgcucgugaagcagcuguccagcaacuucggggccaucuccagcgugcugaacgacauccucucccgccuggacccgcccgaggccgagguccagaucgaccggcugaucaccggccgccuccagagccugcagaccuacgugacccagcagcugauccgggcggccgagauccgcgccagcgccaaccucgccgcgaccaagauguccgagugcgugcugggccagagcaagcgggucgacuucugcgggaagggcuaccaccugauguccuucccccagagcgcgccccacggggugguguuccuccacgucacguacgugcccgcccaggagaagaacuucaccaccgccccggccaucugccacgacggcaaggcccacuucccccgcgagggggucuucguguccaacggcacccacugguucgugacgcagcggaacuucuacgagccccagaucaucaccaccgacaacaccuucgucagcggcaacugcgacguggugaucgggaucgucaacaacacgguguacgacccccugcagccggagcuggacuccuucaaggaggagcucgacaaguacuucaagaaccacaccagccccgacguggaccugggcgacaucuccgggaucaacgccagcgucgugaacauccagaaggagaucgaccgccugaacgagguggccaagaaccucaacgagucccugaucgaccugcaggagcucggcaaguacgagcaguacaucaaguggcccugguacaucuggcugggcuucaucgccgggcugaucgcgaucgucaucgugaccaucaugcucugcugcaugaccagcugcugcuccugccugaagggcugcugcagcugcggguccugcugcaaguucgacgaggacgacagcgagccggugcugaagggcgucaagcuccacuacacgugaugacucgagcugguacugcaugcacgcaaugcuagcugccccuuucccguccuggguaccccgagucucccccgaccucgggucccagguaugcucccaccuccaccugccccacucaccaccucugcuaguuccagacaccucccaagcacgcagcaaugcagcucaaaacgcuuagccuagccacacccccacgggaaacagcagugauuaaccuuuagcaauaaacgaaaguuuaacuaagcuauacuaaccccaggguuggucaauuucgugccagccacacccuggagcuagcaaaaaaaaaaaaaaaaaaaaaaaaaaaaaaaaaaaaaaaaaaaaaaaaaaaaaaaaaaaaaaaaaaaaaaaaaaaaaaaaaaaaaaaaaaaaaaaaaaaa

SEQ ID NO: 26405 - RNA, 4267 nt, Artificial Sequence
  SARS-CoV-2/Wuhan/WIV05/2019__EPI_ISL_402128 spike protein mRNA gc (1-1273)(K986P_V987P_H69del_V70del_A222V_Y453F_S477N_D614G_I692V)
agaauaaacuaguauucuucugguccccacagacucagagagaacccgccaccauguucguguuccugguccuccugccccuggugagcucccagugcgugaaccucaccacccgcacgcagcugccgcccgccuacaccaacagcuucacccggggcgucuacuaccccgacaagguguuccgcuccagcgugcugcacuccacccaggaccucuuccugcccuucuucagcaacgucacgugguuccacgccaucuccgggaccaacggcaccaagcgguucgacaacccggugcugcccuucaacgacgggguguacuucgcgagcaccgagaaguccaacaucauccgcggcuggaucuucgggacgacccucgacagcaagacccagucccugcugaucgucaacaacgccaccaacguggugaucaaggucugcgaguuccaguucugcaacgaccccuuccucggcguguacuaccacaagaacaacaagagcuggauggaguccgaguuccggguguacagcuccgccaacaacugcacguucgaguacgucagccagcccuuccugauggaccuggagggcaagcaggggaacuucaagaaccuccgcgaguucguguucaagaacaucgacggcuacuucaagaucuacuccaagcacaccccgaucaaccuggugcgggaccugccccagggguucagcguccucgagccccugguggaccugcccaucggcaucaacaucacccgcuuccagacccuccuggcccugcaccgguccuaccucacgccgggggacagcagcuccggcuggaccgccggcgcggccgccuacuacgugggguaccugcagccccgcaccuuccugcucaaguacaacgagaacggcaccaucacggacgccgucgacugcgcgcuggacccccugagcgagaccaagugcacccucaaguccuucaccguggagaaggggaucuaccagacgagcaacuuccgggugcagcccaccgaguccaucguccgcuucccgaacaucaccaaccugugccccuucggcgagguguucaacgccacccgguucgccagcgucuacgccuggaaccgcaagcggaucuccaacugcguggccgacuacagcgugcuguacaacuccgcgagcuucuccacguucaagugcuacggcgucagccccaccaagcucaacgaccugugcuucaccaacguguacgccgacuccuucgugauccgcggggacgagguccggcagaucgcccccggccagaccgggaagaucgccgacuacaacuacaagcugccggacgacuucacgggcugcgugaucgccuggaacagcaacaaccucgacuccaaggucgggggcaacuacaacuaccuguuccgccuguuccgcaagagcaaccucaagcccuucgagcgggacaucuccaccgagaucuaccaggcgggcaacacccccugcaacgggguggagggcuucaacugcuacuucccccugcagagcuacggguuccagccgaccaacggcgugggguaccagcccuaccggguggucgugcuguccuucgagcuccugcacgcccccgccacggugugcggccccaagaaguccaccaaccuggucaagaacaagugcgugaacuucaacuucaacggccucaccgggaccggcgugcugaccgagagcaacaagaaguuccugccguuccagcaguucgggcgcgacaucgccgacacgaccgacgccguccgcgacccccagacccuggagauccucgacaucacccccugcagcuucggcggggugagcgugaucacgccgggcaccaacaccuccaaccaggucgcggugcuguaccagggcgugaacugcaccgagguccccguggccauccacgccgaccagcugacgcccaccuggcggguguacagcaccggguccaacgucuuccagacccgcgccggcugccucaucggggccgagcacgugaacaacagcuacgagugcgacauccccaucggcgcgggcaucugcgccuccuaccagacgcagaccaacagcccgcggcgcgcccgguccguggccagccaguccgucaucgcguacaccaugagccugggggccgagaacuccguggccuacagcaacaacuccaucgccauccccaccaacuucacgaucagcgugaccaccgagauccugcccgucuccaugaccaagacgagcguggacugcaccauguacaucugcggcgacagcaccgagugcuccaaccuccugcugcaguacgggagcuucugcacccagcucaaccgcgcccugacgggcaucgcgguggagcaggacaagaacacccaggaggucuucgcccaggugaagcagaucuacaagacgcccccgaucaaggacuucgggggcuucaacuucucccagauccugcccgaccccagcaagcccuccaagcggagcuucaucgaggaccuccuguucaacaaggugacccuggccgacgccggcuucaucaagcaguacggggacugccucggcgacaucgccgcgcgcgaccugaucugcgcccagaaguucaacgggcugaccguccucccgccccugcugaccgacgagaugaucgcccaguacaccuccgcccuccuggccggcaccaucacgagcggguggaccuucggcgcgggcgccgcccugcagauccccuucgccaugcagauggcguaccgguucaacgggaucggcgugacccagaacgugcucuacgagaaccagaagcugaucgccaaccaguucaacuccgccaucgggaagauccaggacagccuguccagcaccgccuccgcccucggcaagcugcaggacgucgugaaccagaacgcgcaggcccugaacacgcucgugaagcagcugagcuccaacuucggggccaucagcuccguccugaacgacauccucagccgccuggacccgcccgaggccgaggugcagaucgaccggcugaucaccggccgccuccagucccugcagaccuacgugacccagcagcugauccgggccgcggagauccgcgccagcgccaaccucgccgccaccaagaugagcgagugcguccugggccaguccaagcggguggacuucugcgggaagggcuaccaccugaugagcuucccccaguccgcgccccacgggguggucuuccuccacgugacguacguccccgcccaggagaagaacuucaccaccgccccggccaucugccacgacggcaaggcgcacuucccccgcgaggggguguucgugagcaacggcacccacugguucgucacgcagcggaacuucuacgagccccagaucaucaccaccgacaacaccuucguguccggcaacugcgacguggucaucgggaucgugaacaacacgguguacgacccccugcagccggagcuggacagcuucaaggaggagcucgacaaguacuucaagaaccacaccucccccgacgucgaccugggcgacaucagcgggaucaacgccuccguggugaacauccagaaggagaucgaccgccugaacgaggucgccaagaaccucaacgagagccugaucgaccugcaggagcucggcaaguacgagcaguacaucaaguggcccugguacaucuggcugggcuucaucgccgggcugaucgccaucgugauggugaccaucaugcucugcugcaugaccuccugcugcagcugccugaagggcugcugcuccugcgggagcugcugcaaguucgacgaggacgacuccgagccgguccugaagggcgugaagcuccacuacacgugaugacucgagcugguacugcaugcacgcaaugcuagcugccccuuucccguccuggguaccccgagucucccccgaccucgggucccagguaugcucccaccuccaccugccccacucaccaccucugcuaguuccagacaccucccaagcacgcagcaaugcagcucaaaacgcuuagccuagccacacccccacgggaaacagcagugauuaaccuuuagcaauaaacgaaaguuuaacuaagcuauacuaaccccaggguuggucaauuucgugccagccacacccuggagcuagcaaaaaaaaaaaaaaaaaaaaaaaaaaaaaaaaaaaaaaaaaaaaaaaaaaaaaaaaaaaaaaaaaaaaaaaaaaaaaaaaaaaaaaaaaaaaaaaaaaaa

SEQ ID NO: 26406 - RNA, 4267 nt, Artificial Sequence
  SARS-CoV-2/Wuhan/WIV05/2019__EPI_ISL_402128 spike protein mRNA gc (1-1273)(K986P_V987P_H69del_V70del_Y453F_D614G_I692V_M1229I)
agaauaaacuaguauucuucugguccccacagacucagagagaacccgccaccauguucguguuccugguccuccugccccuggugagcucccagugcgugaaccucaccacccgcacgcagcugccgcccgccuacaccaacagcuucacccggggcgucuacuaccccgacaagguguuccgcuccagcgugcugcacuccacccaggaccucuuccugcccuucuucagcaacgucacgugguuccacgccaucuccgggaccaacggcaccaagcgguucgacaacccggugcugcccuucaacgacgggguguacuucgcgagcaccgagaaguccaacaucauccgcggcuggaucuucgggacgacccucgacagcaagacccagucccugcugaucgucaacaacgccaccaacguggugaucaaggucugcgaguuccaguucugcaacgaccccuuccucggcguguacuaccacaagaacaacaagagcuggauggaguccgaguuccggguguacagcuccgccaacaacugcacguucgaguacgucagccagcccuuccugauggaccuggagggcaagcaggggaacuucaagaaccuccgcgaguucguguucaagaacaucgacggcuacuucaagaucuacuccaagcacaccccgaucaaccuggugcgggaccugccccagggguucagcgcccucgagccccuggucgaccugcccaucggcaucaacaucacccgcuuccagacccuccuggcccugcaccgguccuaccucacgccgggggacagcagcuccggcuggaccgcgggcgccgccgccuacuacgugggguaccugcagccccgcaccuuccugcucaaguacaacgagaacggcaccaucacggacgcgguggacugcgcccuggacccccugagcgagaccaagugcacccucaaguccuucaccgucgagaaggggaucuaccagacgagcaacuuccgggugcagcccaccgaguccaucgugcgcuucccgaacaucaccaaccugugccccuucggcgaggucuucaacgccacccgguucgccagcguguacgccuggaaccgcaagcggaucuccaacugcgucgcggacuacagcgugcuguacaacuccgccagcuucuccacguucaagugcuacggcgugagccccaccaagcucaacgaccugugcuucaccaacgucuacgccgacuccuucgugauccgcggggacgaggugcggcagaucgcccccggccagaccgggaagaucgccgacuacaacuacaagcugccggacgacuucacgggcugcgucaucgcguggaacagcaacaaccucgacuccaaggucgggggcaacuacaacuaccuguuccgccuguuccgcaagagcaaccucaagcccuucgagcgggacaucuccaccgagaucuaccaggccggcagcacccccugcaacgggguggagggcuucaacugcuacuucccccugcaguccuacggguuccagccgaccaacggcgugggguaccagcccuaccggguggugguccugagcuucgagcuccugcacgcccccgccacggugugcggccccaagaaguccaccaaccuggugaagaacaagugcgucaacuucaacuucaacggccucaccgggaccggcgugcugaccgagagcaacaagaaguuccugccguuccagcaguucgggcgcgacaucgccgacacgaccgacgcggugcgcgacccccagacccuggagauccucgacaucacccccugcagcuucggcggggucuccgugaucacgccgggcaccaacaccagcaaccagguggccguccuguaccagggcgugaacugcaccgaggugcccgucgccauccacgccgaccagcugacgcccaccuggcggguguacuccaccgggagcaacguguuccagacccgcgccggcugccucaucggggcggagcacgucaacaacuccuacgagugcgacauccccaucggcgccggcaucugcgccagcuaccagacgcagaccaacuccccgcggcgcgcccggagcguggcgucccagagcgugaucgccuacaccaugucccugggggccgagaacagcgucgccuacuccaacaacagcaucgccauccccaccaacuucacgaucuccgugaccaccgagauccugcccgugagcaugaccaagacgagcgucgacugcaccauguacaucugcggcgacuccaccgagugcagcaaccuccugcugcaguacggguccuucugcacccagcucaaccgcgcgcugacgggcaucgccguggagcaggacaagaacacccaggagguguucgcccaggucaagcagaucuacaagacgcccccgaucaaggacuucgggggcuucaacuucagccagauccugcccgaccccuccaagcccagcaagcgguccuucaucgaggaccuccuguucaacaaggugacccuggccgacgccggcuucaucaagcaguacggggacugccucggcgacaucgcggcccgcgaccugaucugcgcccagaaguucaacgggcugaccgugcucccgccccugcugaccgacgagaugaucgcccaguacaccagcgcccuccuggcgggcaccaucacguccggguggaccuucggcgccggcgccgcccugcagauccccuucgcgaugcagauggccuaccgguucaacgggaucggcgucacccagaacgugcucuacgagaaccagaagcugaucgccaaccaguucaacagcgccaucgggaagauccaggacucccugagcuccaccgccagcgcgcucggcaagcugcaggacguggucaaccagaacgcccaggcccugaacacgcucgugaagcagcuguccagcaacuucggggccaucuccagcgugcugaacgacauccucucccgccuggacccgcccgaggccgagguccagaucgaccggcugaucaccggccgccuccagagccugcagaccuacgugacccagcagcugauccgggcggccgagauccgcgccagcgccaaccucgccgcgaccaagauguccgagugcgugcugggccagagcaagcgggucgacuucugcgggaagggcuaccaccugauguccuucccccagagcgcgccccacggggugguguuccuccacgucacguacgugcccgcccaggagaagaacuucaccaccgccccggccaucugccacgacggcaaggcccacuucccccgcgagggggucuucguguccaacggcacccacugguucgugacgcagcggaacuucuacgagccccagaucaucaccaccgacaacaccuucgucagcggcaacugcgacguggugaucgggaucgucaacaacacgguguacgacccccugcagccggagcuggacuccuucaaggaggagcucgacaaguacuucaagaaccacaccagccccgacguggaccugggcgacaucuccgggaucaacgccagcgucgugaacauccagaaggagaucgaccgccugaacgagguggccaagaaccucaacgagucccugaucgaccugcaggagcucggcaaguacgagcaguacaucaaguggcccugguacaucuggcugggcuucaucgccgggcugaucgcgaucgucaucgugaccaucaugcucugcugcaugaccagcugcugcuccugccugaagggcugcugcagcugcggguccugcugcaaguucgacgaggacgacagcgagccggugcugaagggcgucaagcuccacuacacgugaugacucgagcugguacugcaugcacgcaaugcuagcugccccuuucccguccuggguaccccgagucucccccgaccucgggucccagguaugcucccaccuccaccugccccacucaccaccucugcuaguuccagacaccucccaagcacgcagcaaugcagcucaaaacgcuuagccuagccacacccccacgggaaacagcagugauuaaccuuuagcaauaaacgaaaguuuaacuaagcuauacuaaccccaggguuggucaauuucgugccagccacacccuggagcuagcaaaaaaaaaaaaaaaaaaaaaaaaaaaaaaaaaaaaaaaaaaaaaaaaaaaaaaaaaaaaaaaaaaaaaaaaaaaaaaaaaaaaaaaaaaaaaaaaaaaa

SEQ ID NO: 26407 - RNA, 4264 nt, Artificial Sequence
  SARS-CoV-2/Wuhan/WIV05/2019__EPI_ISL_402128 spike protein mRNA gc (1-1273)(K986P_V987P_K986P_V987P_H69del_V70del_Y144del_N501Y_A570 D_D614G_P681H_T716I_S982A_D1118H)
agaauaaacuaguauucuucugguccccacagacucagagagaacccgccaccauguucguguuccugguccuccugccccuggugagcucccagugcgugaaccucaccacccgcacgcagcugccgcccgccuacaccaacagcuucacccggggcgucuacuaccccgacaagguguuccgcuccagcgugcugcacuccacccaggaccucuuccugcccuucuucagcaacgucacgugguuccacgccaucuccgggaccaacggcaccaagcgguucgacaacccggugcugcccuucaacgacgggguguacuucgcgagcaccgagaaguccaacaucauccgcggcuggaucuucgggacgacccucgacagcaagacccagucccugcugaucgucaacaacgccaccaacguggugaucaaggucugcgaguuccaguucugcaacgaccccuuccucggcguguaccacaagaacaacaagagcuggauggaguccgaguuccggguguacagcuccgccaacaacugcacguucgaguacgucagccagcccuuccugauggaccuggagggcaagcaggggaacuucaagaaccuccgcgaguucguguucaagaacaucgacggcuacuucaagaucuacuccaagcacaccccgaucaaccuggugcgggaccugccccagggguucagcgcccucgagccccuggucgaccugcccaucggcaucaacaucacccgcuuccagacccuccuggcccugcaccgguccuaccucacgccgggggacagcagcuccggcuggaccgcgggcgccgccgccuacuacgugggguaccugcagccccgcaccuuccugcucaaguacaacgagaacggcaccaucacggacgcgguggacugcgcccuggacccccugagcgagaccaagugcacccucaaguccuucaccgucgagaaggggaucuaccagacgagcaacuuccgggugcagcccaccgaguccaucgugcgcuucccgaacaucaccaaccugugccccuucggcgaggucuucaacgccacccgguucgccagcguguacgccuggaaccgcaagcggaucuccaacugcgucgcggacuacagcgugcuguacaacuccgccagcuucuccacguucaagugcuacggcgugagccccaccaagcucaacgaccugugcuucaccaacgucuacgccgacuccuucgugauccgcggggacgaggugcggcagaucgcccccggccagaccgggaagaucgccgacuacaacuacaagcugccggacgacuucacgggcugcgucaucgcguggaacagcaacaaccucgacuccaaggucgggggcaacuacaacuaccuguaccgccuguuccgcaagagcaaccucaagcccuucgagcgggacaucuccaccgagaucuaccaggccggcagcacccccugcaacgggguggagggcuucaacugcuacuucccccugcaguccuacggguuccagccgaccuacggcgugggguaccagcccuaccggguggugguccugagcuucgagcuccugcacgcccccgccacggugugcggccccaagaaguccaccaaccuggugaagaacaagugcgucaacuucaacuucaacggccucaccgggaccggcgugcugaccgagagcaacaagaaguuccugccguuccagcaguucgggcgcgacaucgacgacacgaccgacgccgugcgcgacccccagacccuggagauccucgacaucacccccugcagcuucggcggggucuccgugaucacgccgggcaccaacaccagcaaccagguggcgguccuguaccagggcgugaacugcaccgaggugcccgucgccauccacgccgaccagcugacgcccaccuggcggguguacuccaccgggagcaacguguuccagacccgcgccggcugccucaucggggccgagcacgucaacaacuccuacgagugcgacauccccaucggcgcgggcaucugcgccagcuaccagacgcagaccaacucccaccggcgcgcccggagcguggccucccagagcaucaucgcguacaccaugucccugggggccgagaacagcguggccuacuccaacaacagcaucgccaucccgaucaacuucaccaucuccgucacgaccgagauccugcccgugagcaugaccaagaccagcguggacugcacgauguacaucugcggcgacuccaccgagugcagcaaccuccugcugcaguacggguccuucugcacccagcucaaccgcgcccugaccggcaucgcggucgagcaggacaagaacacgcaggagguguucgcccaggugaagcagaucuacaagaccccgcccaucaaggacuucgggggcuucaacuucagccagauccugcccgaccccuccaagcccagcaagcgguccuucaucgaggaccuccuguucaacaaggucacccuggccgacgccggcuucaucaagcaguacggggacugccucggcgacaucgccgcgcgcgaccugaucugcgcccagaaguucaacgggcugaccgugcugcccccgcuccugacggacgagaugaucgcccaguacaccagcgcccuccuggccggcaccaucaccuccggguggacguucggcgcgggcgccgcccugcagauccccuucgccaugcagauggcguaccgguucaacgggaucggcgugacccagaacguccucuacgagaaccagaagcugaucgccaaccaguucaacagcgccaucgggaagauccaggacucccugagcuccaccgccagcgcccucggcaagcugcaggacguggugaaccagaacgcgcaggcccugaacacccucgucaagcagcuguccagcaacuucggggccaucuccagcgugcugaacgacauccucgcccgccuggacccgcccgaggccgaggugcagaucgaccggcugaucacgggccgccuccagucccugcagaccuacgucacccagcagcugauccgggcggccgagauccgcgccagcgccaaccucgccgcgaccaagaugagcgagugcgugcugggccaguccaagcggguggacuucugcgggaagggcuaccaccugaugagcuucccccaguccgcgccccacggggucguguuccuccacgugaccuacguccccgcccaggagaagaacuucacgaccgcccccgccaucugccacgacggcaaggcccacuucccgcgcgaggggguguucgucagcaacggcacccacugguucgugacccagcggaacuucuacgagccccagaucaucacgacccacaacaccuucguguccggcaacugcgacgucgugaucgggaucgugaacaacaccgucuacgacccccugcagcccgagcuggacagcuucaaggaggagcucgacaaguacuucaagaaccacacguccccggacguggaccugggcgacaucagcgggaucaacgccuccguggucaacauccagaaggagaucgaccgccugaacgagguggccaagaaccucaacgagagccugaucgaccugcaggagcucggcaaguacgagcaguacaucaaguggcccugguacaucuggcugggcuucaucgccgggcugaucgcgaucgugauggucaccaucaugcucugcugcaugaccuccugcugcagcugccugaagggcugcugcuccugcgggagcugcugcaaguucgacgaggacgacuccgagcccgugcugaagggcgugaagcuccacuacaccugaugacucgagcugguacugcaugcacgcaaugcuagcugccccuuucccguccuggguaccccgagucucccccgaccucgggucccagguaugcucccaccuccaccugccccacucaccaccucugcuaguuccagacaccucccaagcacgcagcaaugcagcucaaaacgcuuagccuagccacacccccacgggaaacagcagugauuaaccuuuagcaauaaacgaaaguuuaacuaagcuauacuaaccccaggguuggucaauuucgugccagccacacccuggagcuagcaaaaaaaaaaaaaaaaaaaaaaaaaaaaaaaaaaaaaaaaaaaaaaaaaaaaaaaaaaaaaaaaaaaaaaaaaaaaaaaaaaaaaaaaaaaaaaaaaaaa

SEQ ID NO: 26408 - RNA, 4273 nt, Artificial Sequence
  SARS-CoV-2/Wuhan/WIV05/2019__EPI_ISL_402128 spike protein mRNA gc (1-1273)(K986P_V987P_K986P_V987P_K417N_E484K_N501Y_D614G)
agaauaaacuaguauucuucugguccccacagacucagagagaacccgccaccauguucguguuccugguccuccugccccuggugagcucccagugcgugaaccucaccacccgcacgcagcugccgcccgccuacaccaacagcuucacccggggcgucuacuaccccgacaagguguuccgcuccagcgugcugcacuccacccaggaccucuuccugcccuucuucagcaacgucacgugguuccacgccauccacguguccgggaccaacggcaccaagcgguucgacaacccggugcugcccuucaacgacggggucuacuucgcgagcaccgagaaguccaacaucauccgcggcuggaucuucgggacgacccucgacagcaagacccagucccugcugaucgugaacaacgccaccaacguggucaucaaggugugcgaguuccaguucugcaacgaccccuuccucggcguguacuaccacaagaacaacaagagcuggauggaguccgaguuccgggucuacagcuccgccaacaacugcacguucgaguacgugagccagcccuuccugauggaccuggagggcaagcaggggaacuucaagaaccuccgcgaguucguguucaagaacaucgacggcuacuucaagaucuacuccaagcacaccccgaucaaccugguccgggaccugccccagggguucagcgcccucgagccccugguggaccugcccaucggcaucaacaucacccgcuuccagacccuccuggcccugcaccgguccuaccucacgccgggggacagcagcuccggcuggaccgcgggcgccgccgccuacuacgugggguaccugcagccccgcaccuuccugcucaaguacaacgagaacggcaccaucacggacgcggucgacugcgcccuggacccccugagcgagaccaagugcacccucaaguccuucaccguggagaaggggaucuaccagacgagcaacuuccgggugcagcccaccgaguccaucguccgcuucccgaacaucaccaaccugugccccuucggcgagguguucaacgccacccgguucgccagcgucuacgccuggaaccgcaagcggaucuccaacugcguggcggacuacagcgugcuguacaacuccgccagcuucuccacguucaagugcuacggcgucagccccaccaagcucaacgaccugugcuucaccaacguguacgccgacuccuucgugauccgcggggacgagguccggcagaucgcccccggccagaccgggaacaucgccgacuacaacuacaagcugccggacgacuucacgggcugcgugaucgcguggaacagcaacaaccucgacuccaaggucgggggcaacuacaacuaccuguaccgccuguuccgcaagagcaaccucaagcccuucgagcgggacaucuccaccgagaucuaccaggccggcagcacccccugcaacggggugaagggcuucaacugcuacuucccccugcaguccuacggguuccagccgaccuacggcgugggguaccagcccuaccggguggucgugcugagcuucgagcuccugcacgcccccgccacggugugcggccccaagaaguccaccaaccuggucaagaacaagugcgugaacuucaacuucaacggccucaccgggaccggcgugcugaccgagagcaacaagaaguuccugccguuccagcaguucgggcgcgacaucgccgacacgaccgacgcgguccgcgacccccagacccuggagauccucgacaucacccccugcagcuucggcgggguguccgugaucacgccgggcaccaacaccagcaaccaggucgccgugcuguaccagggcgugaacugcaccgagguccccguggccauccacgccgaccagcugacgcccaccuggcggguguacuccaccgggagcaacgucuuccagacccgcgccggcugccucaucggggcggagcacgugaacaacuccuacgagugcgacauccccaucggcgccggcaucugcgccagcuaccagacgcagaccaacuccccgcggcgcgcccggagcguggcgucccagagcaucaucgccuacaccaugucccugggggccgagaacagcgucgccuacuccaacaacagcaucgccauccccaccaacuucacgaucuccgugaccaccgagauccugcccgugagcaugaccaagacgagcgucgacugcaccauguacaucugcggcgacuccaccgagugcagcaaccuccugcugcaguacggguccuucugcacccagcucaaccgcgcgcugacgggcaucgccguggagcaggacaagaacacccaggagguguucgcccaggucaagcagaucuacaagacgcccccgaucaaggacuucgggggcuucaacuucagccagauccugcccgaccccuccaagcccagcaagcgguccuucaucgaggaccuccuguucaacaaggugacccuggccgacgccggcuucaucaagcaguacggggacugccucggcgacaucgcggcccgcgaccugaucugcgcccagaaguucaacgggcugaccgugcucccgccccugcugaccgacgagaugaucgcccaguacaccagcgcccuccuggcgggcaccaucacguccggguggaccuucggcgccggcgccgcccugcagauccccuucgcgaugcagauggccuaccgguucaacgggaucggcgucacccagaacgugcucuacgagaaccagaagcugaucgccaaccaguucaacagcgccaucgggaagauccaggacucccugagcuccaccgccagcgcgcucggcaagcugcaggacguggucaaccagaacgcccaggcccugaacacgcucgugaagcagcuguccagcaacuucggggccaucuccagcgugcugaacgacauccucucccgccuggacccgcccgaggccgagguccagaucgaccggcugaucaccggccgccuccagagccugcagaccuacgugacccagcagcugauccgggcggccgagauccgcgccagcgccaaccucgccgcgaccaagauguccgagugcgugcugggccagagcaagcgggucgacuucugcgggaagggcuaccaccugauguccuucccccagagcgcgccccacggggugguguuccuccacgucacguacgugcccgcccaggagaagaacuucaccaccgccccggccaucugccacgacggcaaggcccacuucccccgcgagggggucuucguguccaacggcacccacugguucgugacgcagcggaacuucuacgagccccagaucaucaccaccgacaacaccuucgucagcggcaacugcgacguggugaucgggaucgucaacaacacgguguacgacccccugcagccggagcuggacuccuucaaggaggagcucgacaaguacuucaagaaccacaccagccccgacguggaccugggcgacaucuccgggaucaacgccagcgucgugaacauccagaaggagaucgaccgccugaacgagguggccaagaaccucaacgagucccugaucgaccugcaggagcucggcaaguacgagcaguacaucaaguggcccugguacaucuggcugggcuucaucgccgggcugaucgcgaucgucauggugaccaucaugcucugcugcaugaccagcugcugcuccugccugaagggcugcugcagcugcggguccugcugcaaguucgacgaggacgacagcgagccggugcugaagggcgucaagcuccacuacacgugaugacucgagcugguacugcaugcacgcaaugcuagcugccccuuucccguccuggguaccccgagucucccccgaccucgggucccagguaugcucccaccuccaccugccccacucaccaccucugcuaguuccagacaccucccaagcacgcagcaaugcagcucaaaacgcuuagccuagccacacccccacgggaaacagcagugauuaaccuuuagcaauaaacgaaaguuuaacuaagcuauacuaaccccaggguuggucaauuucgugccagccacacccuggagcuagcaaaaaaaaaaaaaaaaaaaaaaaaaaaaaaaaaaaaaaaaaaaaaaaaaaaaaaaaaaaaaaaaaaaaaaaaaaaaaaaaaaaaaaaaaaaaaaaaaaaa

SEQ ID NO: 26409 - RNA, 4264 nt, Artificial Sequence
  SARS-CoV-2/Wuhan/WIV05/2019__EPI_ISL_402128 spike protein mRNA gc (1-1273)(K986P_V987P_K986P_V987P_L18F_D80A_D215G_L242del_A243del_ L244del_R246I_K417N_E484K_N501Y_D614G_A701V)
agaauaaacuaguauucuucugguccccacagacucagagagaacccgccaccauguucguguuccugguccuccugccccuggugagcucccagugcgugaacuucaccacccgcacgcagcucccgcccgccuacaccaacagcuucacccggggcgucuacuaccccgacaagguguuccgcuccagcgugcugcacuccacccaggaccuguuccuccccuucuucagcaacgucacgugguuccacgccauccacguguccgggaccaacggcaccaagcgguucgcgaacccggugcugcccuucaacgacggggucuacuucgccagcaccgagaaguccaacaucauccgcggcuggaucuucgggacgacccuggacagcaagacccagucccuccugaucgugaacaacgccaccaacguggucaucaaggugugcgaguuccaguucugcaacgaccccuuccugggcguguacuaccacaagaacaacaagagcuggauggaguccgaguuccgggucuacagcuccgccaacaacugcacguucgaguacgugagccagcccuuccucauggaccuggagggcaagcaggggaacuucaagaaccugcgcgaguucguguucaagaacaucgacggcuacuucaagaucuacuccaagcacaccccgaucaaccucguccgggggcugccccagggcuucagcgcccuggagccccucguggaccugcccaucgggaucaacaucacccgcuuccagacccugcacaucuccuaccucacgccgggcgacagcagcuccggcuggaccgcgggggccgccgccuacuacgugggcuaccugcagccccggaccuuccugcucaaguacaacgagaacgggaccaucacggacgcggucgacugcgcccuggacccccugagcgagaccaagugcacccucaaguccuucaccguggagaagggcaucuaccagacgagcaacuuccgcgugcagcccaccgaguccaucguccgguucccgaacaucaccaaccugugccccuucggcgagguguucaacgccacccgcuucgccagcgucuacgccuggaaccggaagcgcaucuccaacugcguggcggacuacagcgugcuguacaacuccgccagcuucuccacguucaagugcuacggggucagccccaccaagcucaacgaccugugcuucaccaacguguacgccgacuccuucgugauccggggcgacgagguccgccagaucgcccccgggcagaccggcaacaucgccgacuacaacuacaagcugccggacgacuucacggggugcgugaucgcguggaacagcaacaaccucgacuccaaggugggcggcaacuacaacuaccuguaccggcuguuccgcaagagcaaccucaagcccuucgagcgggacaucuccaccgagaucuaccaggccgggagcacccccugcaacggcgucaagggguucaacugcuacuucccccugcaguccuacggcuuccagccgaccuacggggugggcuaccagcccuaccgcguggucgugcugagcuucgagcuccugcacgcccccgccacggugugcggccccaagaaguccaccaaccuggucaagaacaagugcgugaacuucaacuucaacgggcucaccggcaccggggugcugaccgagagcaacaagaaguuccugccguuccagcaguucggccgggacaucgccgacacgaccgacgcgguccgcgacccccagacccucgagauccuggacaucacccccugcagcuucgggggcguguccgugaucacgccgggcaccaacaccagcaaccaggucgccgugcuguaccagggggugaacugcaccgagguccccguggccauccacgccgaccagcugacgcccaccuggcgcguguacuccaccggcagcaacgucuuccagacccgggccgggugccucaucggcgcggagcacgugaacaacuccuacgagugcgacauccccaucggcgccgggaucugcgccagcuaccagacgcagaccaacuccccgcgccgggcccgcagcguggcgucccagagcaucaucgccuacaccaugucccugggcgucgagaacagcguggccuacuccaacaacagcaucgccauccccaccaacuucacgaucuccgugaccaccgagauccugcccgucagcaugaccaagacgagcguggacugcaccauguacaucugcggggacuccaccgagugcagcaaccuccugcugcaguacggcuccuucugcacccagcucaaccgggcccugacggggaucgcgguggagcaggacaagaacacccaggaggucuucgcccaggugaagcagaucuacaagacgcccccgaucaaggacuucggcggcuucaacuucagccagauccugcccgaccccuccaagcccagcaagcgcuccuucaucgaggaccuccuguucaacaaggugacccuggccgacgccggguucaucaagcaguacggcgacugccucggggacaucgccgcgcgggaccugaucugcgcccagaaguucaacggccugaccguccucccgccccugcugaccgacgagaugaucgcccaguacaccagcgcccuccuggccgggaccaucacguccggcuggaccuucggcgcgggggccgcccugcagauccccuucgccaugcagauggcguaccgcuucaacggcaucggggugacccagaacgugcucuacgagaaccagaagcugaucgccaaccaguucaacagcgccaucggcaagauccaggacucccugagcuccaccgccagcgcccucgggaagcugcaggacgucgugaaccagaacgcgcaggcccugaacacgcucgugaagcagcuguccagcaacuucggcgccaucuccagcguccugaacgacauccucucccggcuggacccgcccgaggccgaggugcagaucgaccgccugaucaccggccggcuccagagccugcagaccuacgugacccagcagcugauccgcgccgcggagauccgggccagcgccaaccucgccgccaccaagauguccgagugcguccuggggcagagcaagcgcguggacuucugcggcaagggguaccaccugauguccuucccccagagcgcgccccacggcguggucuuccuccacgugacguacguccccgcccaggagaagaacuucaccaccgccccggccaucugccacgacgggaaggcgcacuucccccgggagggcguguucguguccaacggcacccacugguucgucacgcagcgcaacuucuacgagccccagaucaucaccaccgacaacaccuucgugagcgggaacugcgacguggucaucggcaucgugaacaacacgguguacgacccccugcagccggagcuggacuccuucaaggaggagcucgacaaguacuucaagaaccacaccagccccgacgucgaccugggggacaucuccggcaucaacgccagcguggugaacauccagaaggagaucgaccggcugaacgaggucgccaagaaccucaacgagucccugaucgaccugcaggagcucggcaaguacgagcaguacaucaaguggcccugguacaucuggcugggguucaucgccggccugaucgccaucgugauggugaccaucaugcucugcugcaugaccagcugcugcuccugccugaaggggugcugcagcugcggcuccugcugcaaguucgacgaggacgacagcgagccgguccugaagggggugaagcuccacuacacgugaugacucgagcugguacugcaugcacgcaaugcuagcugccccuuucccguccuggguaccccgagucucccccgaccucgggucccagguaugcucccaccuccaccugccccacucaccaccucugcuaguuccagacaccucccaagcacgcagcaaugcagcucaaaacgcuuagccuagccacacccccacgggaaacagcagugauuaaccuuuagcaauaaacgaaaguuuaacuaagcuauacuaaccccaggguuggucaauuucgugccagccacacccuggagcuagcaaaaaaaaaaaaaaaaaaaaaaaaaaaaaaaaaaaaaaaaaaaaaaaaaaaaaaaaaaaaaaaaaaaaaaaaaaaaaaaaaaaaaaaaaaaaaaaaaaaa

SEQ ID NO: 26410 - RNA, 4273 nt, Artificial Sequence
  SARS-CoV-2/Wuhan/WIV05/2019__EPI_ISL_402128 spike protein mRNA gc (1-1273)(K986P_V987P_K986P_V987P_E484K_D614G)
agaauaaacuaguauucuucugguccccacagacucagagagaacccgccaccauguucguguuccugguccuccugccccuggugagcucccagugcgugaaccucaccacccgcacgcagcugccgcccgccuacaccaacagcuucacccggggcgucuacuaccccgacaagguguuccgcuccagcgugcugcacuccacccaggaccucuuccugcccuucuucagcaacgucacgugguuccacgccauccacguguccgggaccaacggcaccaagcgguucgacaacccggugcugcccuucaacgacggggucuacuucgcgagcaccgagaaguccaacaucauccgcggcuggaucuucgggacgacccucgacagcaagacccagucccugcugaucgugaacaacgccaccaacguggucaucaaggugugcgaguuccaguucugcaacgaccccuuccucggcguguacuaccacaagaacaacaagagcuggauggaguccgaguuccgggucuacagcuccgccaacaacugcacguucgaguacgugagccagcccuuccugauggaccuggagggcaagcaggggaacuucaagaaccuccgcgaguucguguucaagaacaucgacggcuacuucaagaucuacuccaagcacaccccgaucaaccugguccgggaccugccccagggguucagcgcccucgagccccugguggaccugcccaucggcaucaacaucacccgcuuccagacccuccuggcccugcaccgguccuaccucacgccgggggacagcagcuccggcuggaccgcgggcgccgccgccuacuacgugggguaccugcagccccgcaccuuccugcucaaguacaacgagaacggcaccaucacggacgcggucgacugcgcccuggacccccugagcgagaccaagugcacccucaaguccuucaccguggagaaggggaucuaccagacgagcaacuuccgggugcagcccaccgaguccaucguccgcuucccgaacaucaccaaccugugccccuucggcgagguguucaacgccacccgguucgccagcgucuacgccuggaaccgcaagcggaucuccaacugcguggcggacuacagcgugcuguacaacuccgccagcuucuccacguucaagugcuacggcgucagccccaccaagcucaacgaccugugcuucaccaacguguacgccgacuccuucgugauccgcggggacgagguccggcagaucgcccccggccagaccgggaagaucgccgacuacaacuacaagcugccggacgacuucacgggcugcgugaucgcguggaacagcaacaaccucgacuccaaggucgggggcaacuacaacuaccuguaccgccuguuccgcaagagcaaccucaagcccuucgagcgggacaucuccaccgagaucuaccaggccggcagcacccccugcaacggggugaagggcuucaacugcuacuucccccugcaguccuacggguuccagccgaccaacggcgugggguaccagcccuaccggguggucgugcugagcuucgagcuccugcacgcccccgccacggugugcggccccaagaaguccaccaaccuggucaagaacaagugcgugaacuucaacuucaacggccucaccgggaccggcgugcugaccgagagcaacaagaaguuccugccguuccagcaguucgggcgcgacaucgccgacacgaccgacgcgguccgcgacccccagacccuggagauccucgacaucacccccugcagcuucggcgggguguccgugaucacgccgggcaccaacaccagcaaccaggucgccgugcuguaccagggcgugaacugcaccgagguccccguggccauccacgccgaccagcugacgcccaccuggcggguguacuccaccgggagcaacgucuuccagacccgcgccggcugccucaucggggcggagcacgugaacaacuccuacgagugcgacauccccaucggcgccggcaucugcgccagcuaccagacgcagaccaacuccccgcggcgcgcccggagcguggcgucccagagcaucaucgccuacaccaugucccugggggccgagaacagcgucgccuacuccaacaacagcaucgccauccccaccaacuucacgaucuccgugaccaccgagauccugcccgugagcaugaccaagacgagcgucgacugcaccauguacaucugcggcgacuccaccgagugcagcaaccuccugcugcaguacggguccuucugcacccagcucaaccgcgcgcugacgggcaucgccguggagcaggacaagaacacccaggagguguucgcccaggucaagcagaucuacaagacgcccccgaucaaggacuucgggggcuucaacuucagccagauccugcccgaccccuccaagcccagcaagcgguccuucaucgaggaccuccuguucaacaaggugacccuggccgacgccggcuucaucaagcaguacggggacugccucggcgacaucgcggcccgcgaccugaucugcgcccagaaguucaacgggcugaccgugcucccgccccugcugaccgacgagaugaucgcccaguacaccagcgcccuccuggcgggcaccaucacguccggguggaccuucggcgccggcgccgcccugcagauccccuucgcgaugcagauggccuaccgguucaacgggaucggcgucacccagaacgugcucuacgagaaccagaagcugaucgccaaccaguucaacagcgccaucgggaagauccaggacucccugagcuccaccgccagcgcgcucggcaagcugcaggacguggucaaccagaacgcccaggcccugaacacgcucgugaagcagcuguccagcaacuucggggccaucuccagcgugcugaacgacauccucucccgccuggacccgcccgaggccgagguccagaucgaccggcugaucaccggccgccuccagagccugcagaccuacgugacccagcagcugauccgggcggccgagauccgcgccagcgccaaccucgccgcgaccaagauguccgagugcgugcugggccagagcaagcgggucgacuucugcgggaagggcuaccaccugauguccuucccccagagcgcgccccacggggugguguuccuccacgucacguacgugcccgcccaggagaagaacuucaccaccgccccggccaucugccacgacggcaaggcccacuucccccgcgagggggucuucguguccaacggcacccacugguucgugacgcagcggaacuucuacgagccccagaucaucaccaccgacaacaccuucgucagcggcaacugcgacguggugaucgggaucgucaacaacacgguguacgacccccugcagccggagcuggacuccuucaaggaggagcucgacaaguacuucaagaaccacaccagccccgacguggaccugggcgacaucuccgggaucaacgccagcgucgugaacauccagaaggagaucgaccgccugaacgagguggccaagaaccucaacgagucccugaucgaccugcaggagcucggcaaguacgagcaguacaucaaguggcccugguacaucuggcugggcuucaucgccgggcugaucgcgaucgucauggugaccaucaugcucugcugcaugaccagcugcugcuccugccugaagggcugcugcagcugcggguccugcugcaaguucgacgaggacgacagcgagccggugcugaagggcgucaagcuccacuacacgugaugacucgagcugguacugcaugcacgcaaugcuagcugccccuuucccguccuggguaccccgagucucccccgaccucgggucccagguaugcucccaccuccaccugccccacucaccaccucugcuaguuccagacaccucccaagcacgcagcaaugcagcucaaaacgcuuagccuagccacacccccacgggaaacagcagugauuaaccuuuagcaauaaacgaaaguuuaacuaagcuauacuaaccccaggguuggucaauuucgugccagccacacccuggagcuagcaaaaaaaaaaaaaaaaaaaaaaaaaaaaaaaaaaaaaaaaaaaaaaaaaaaaaaaaaaaaaaaaaaaaaaaaaaaaaaaaaaaaaaaaaaaaaaaaaaaa

SEQ ID NO: 26411 - RNA, 4273 nt, Artificial Sequence
  SARS-CoV-2/Wuhan/WIV05/2019__EPI_ISL_402128 spike protein mRNA gc (1-1273)(K986P_V987P_K986P_V987P_L18F_T20N_P26S_D138Y_R190S_K417T _E484K_N501Y_D614G_H655Y_T1027I)
agaauaaacuaguauucuucugguccccacagacucagagagaacccgccaccauguucguguuccugguccuccugccccuggugagcucccagugcgugaacuucaccaaccgcacccagcucccgagcgccuacacgaacuccuucacccggggcgucuacuaccccgacaagguguuccgcagcuccgugcugcacagcacccaggaccuguuccuccccuucuucuccaacgucaccugguuccacgccauccacgugagcgggacgaacggcaccaagcgguucgacaaccccgugcugccguucaacgacggggucuacuucgcguccaccgagaaguccaacaucauccgcggcuggaucuucgggaccacgcuggacuccaagacccagagccuccugaucgugaacaacgccaccaacguggucaucaaggugugcgaguuccaguucugcaacuaccccuuccugggcguguacuaccacaagaacaacaaguccuggauggagagcgaguuccgggucuacuccagcgccaacaacugcaccuucgaguacgugucccagcccuuccucauggaccuggagggcaagcaggggaacuucaagaaccugagcgaguucguguucaagaacaucgacggcuacuucaagaucuacuccaagcacacgcccaucaaccucguccgcgaccugccgcagggguucagcgcccuggagccccucguggaccugcccaucggcaucaacaucacccgguuccagacccugcucgcccugcaccgcagcuaccugacccccggggacuccagcuccggcuggacggcgggcgccgccgccuacuacgugggguaccuccagccgcggaccuuccugcugaaguacaacgagaacggcaccaucaccgacgcggucgacugcgcccucgacccccugagcgagacgaagugcacccugaaguccuucaccguggagaaggggaucuaccagaccagcaacuuccgcgugcagcccacggaguccaucguccgguuccccaacaucaccaaccucugcccguucggcgagguguucaacgccacccgcuucgccagcgucuacgccuggaaccggaagcgcaucuccaacugcguggcggacuacagcgugcuguacaacuccgccagcuucuccaccuucaagugcuacggcgucagccccacgaagcugaacgaccucugcuucaccaacguguacgccgacuccuucgugauccgcggggacgagguccggcagaucgcccccggccagaccgggaccaucgccgacuacaacuacaagcugcccgacgacuucacgggcugcgugaucgcguggaacagcaacaaccuggacuccaaggucgggggcaacuacaacuaccucuaccggcuguuccgcaagagcaaccugaagccguucgagcgggacaucuccaccgagaucuaccaggccggcagcacccccugcaacggggugaagggcuucaacugcuacuucccccuccagagcuacggguuccagcccaccuacggcgugggguaccagccguaccgcguggucgugcuguccuucgagcugcuccacgcccccgccacggugugcggccccaagaaguccaccaaccuggucaagaacaagugcgugaacuucaacuucaacggccugaccgggaccggcgugcucaccgagagcaacaagaaguuccugcccuuccagcaguucgggcgggacaucgccgacacgaccgacgcgguccgcgacccgcagacccuggagauccuggacaucacccccugcagcuucggcgggguguccgugaucacgcccggcaccaacaccagcaaccaggucgccgugcucuaccagggcgugaacugcaccgaggucccgguggccauccacgccgaccagcugacgcccaccuggcgcguguacuccaccgggagcaacgucuuccagacccgggccggcugccugaucggggcggaguacgugaacaacuccuacgagugcgacauccccaucggcgccggcaucugcgccagcuaccagacgcagaccaacagcccccgccgggcccgcagcguggcgucccagagcaucaucgccuacaccaugucccucggggccgagaacagcgucgccuacuccaacaacagcaucgccaucccgaccaacuucacgaucagcgugaccaccgagauccugcccguguccaugaccaagacgagcgucgacugcaccauguacaucugcggcgacuccaccgagugcagcaaccugcuccugcaguacggguccuucugcacccagcugaaccgggcgcucacgggcaucgccguggagcaggacaagaacacccaggagguguucgcccaggucaagcagaucuacaagaccccgcccaucaaggacuucgggggcuucaacuucagccagauccugcccgaccccuccaagcccagcaagcgcuccuucaucgaggaccuccuguucaacaaggugacccuggccgacgccggcuucaucaagcaguacggggacugccugggcgacaucgcggcccgggaccucaucugcgcccagaaguucaacgggcugacggugcugcccccgcuccugaccgacgagaugaucgcccaguacaccagcgcccugcucgcgggcaccaucacguccggguggaccuucggcgccggcgccgcccugcagauccccuucgcgaugcagauggccuaccgcuucaacgggaucggcgucacccagaacgugcuguacgagaaccagaagcucaucgccaaccaguucaacagcgccaucgggaagauccaggacucccugagcuccaccgccagcgcgcugggcaagcuccaggacguggucaaccagaacgcccaggcccugaacacgcuggugaagcagcucuccagcaacuucggggccaucuccagcgugcugaacgacauccugagccggcucgacccgcccgaggccgagguccagaucgaccgccugaucaccggccggcugcagucccuccagaccuacgugacccagcagcugauccgcgcggccgagauccgggccagcgccaaccuggccgcgaucaagauguccgagugcgugcucggccagagcaagcgcgucgacuucugcgggaagggcuaccaccugauguccuucccccagagcgcgccccacggggugguguuccugcacgucaccuacgugcccgcccaggagaagaacuucacgaccgcccccgccaucugccacgacggcaaggcccacuucccgcgggagggggucuucguguccaacggcacccacugguucgugacccagcgcaacuucuacgagccccagaucaucacgaccgacaacaccuucgucagcggcaacugcgacguggugaucgggaucgucaacaacaccguguacgacccccuccagcccgagcuggacuccuucaaggaggagcuggacaaguacuucaagaaccacacgagcccggacguggaccucggcgacaucuccgggaucaacgccagcgucgugaacauccagaaggagaucgaccggcugaacgagguggccaagaaccugaacgagucccucaucgaccugcaggagcugggcaaguacgagcaguacaucaaguggcccugguacaucuggcucggcuucaucgccgggcugaucgcgaucgucauggugaccaucaugcugugcugcaugaccagcugcugcuccugccucaagggcugcugcagcugcggguccugcugcaaguucgacgaggacgacagcgagcccgugcugaagggcgucaagcugcacuacaccugaugacucgagcugguacugcaugcacgcaaugcuagcugccccuuucccguccuggguaccccgagucucccccgaccucgggucccagguaugcucccaccuccaccugccccacucaccaccucugcuaguuccagacaccucccaagcacgcagcaaugcagcucaaaacgcuuagccuagccacacccccacgggaaacagcagugauuaaccuuuagcaauaaacgaaaguuuaacuaagcuauacuaaccccaggguuggucaauuucgugccagccacacccuggagcuagcaaaaaaaaaaaaaaaaaaaaaaaaaaaaaaaaaaaaaaaaaaaaaaaaaaaaaaaaaaaaaaaaaaaaaaaaaaaaaaaaaaaaaaaaaaaaaaaaaaaa

SEQ ID NO: 26412 - RNA, 4273 nt, Artificial Sequence
  SARS-CoV-2/Wuhan/WIV05/2019__EPI_ISL_402128 spike protein mRNA gc (1-1273)(K986P_V987P_K986P_V987P_S13I_W152C_L452R_D614G)
agaauaaacuaguauucuucugguccccacagacucagagagaacccgccaccauguucguguuccugguccuccugccccuggugagcauccagugcgugaaccucaccacccgcacgcagcugccgcccgccuacaccaacuccuucacccggggcgucuacuaccccgacaagguguuccgcagcuccgugcugcacagcacccaggaccucuuccugcccuucuucuccaacgucacgugguuccacgccauccacgugagcgggaccaacggcaccaagcgguucgacaacccggugcugcccuucaacgacggggucuacuucgcguccaccgagaaguccaacaucauccgcggcuggaucuucgggacgacccucgacagcaagacccagagccugcugaucgugaacaacgccaccaacguggucaucaaggugugcgaguuccaguucugcaacgaccccuuccucggcguguacuaccacaagaacaacaaguccugcauggagagcgaguuccgggucuacuccagcgccaacaacugcacguucgaguacgugucccagcccuuccugauggaccuggagggcaagcaggggaacuucaagaaccuccgcgaguucguguucaagaacaucgacggcuacuucaagaucuacagcaagcacaccccgaucaaccugguccgggaccugccccagggguucuccgcccucgagccccugguggaccugcccaucggcaucaacaucacccgcuuccagacccuccuggcccugcaccggagcuaccucacgccgggggacuccagcagcggcuggaccgcgggcgccgccgccuacuacgugggguaccugcagccccgcaccuuccugcucaaguacaacgagaacggcaccaucacggacgcggucgacugcgcccuggacccccuguccgagaccaagugcacccucaagagcuucaccguggagaaggggaucuaccagacguccaacuuccgggugcagcccaccgagagcaucguccgcuucccgaacaucaccaaccugugccccuucggcgagguguucaacgccacccgguucgccuccgucuacgccuggaaccgcaagcggaucagcaacugcguggcggacuacuccgugcuguacaacagcgccuccuucagcacguucaagugcuacggcgucucccccaccaagcucaacgaccugugcuucaccaacguguacgccgacagcuucgugauccgcggggacgagguccggcagaucgcccccggccagaccgggaagaucgccgacuacaacuacaagcugccggacgacuucacgggcugcgugaucgcguggaacuccaacaaccucgacagcaaggucgggggcaacuacaacuaccgcuaccggcuguuccgcaaguccaaccugaagcccuucgagcgggacaucagcaccgagaucuaccaggccggcuccacccccugcaacgggguggagggcuucaacugcuacuucccccuccagagcuacggguuccagccgaccaacggcgugggguaccagcccuaccgcguggucgugcuguccuucgagcugcuccacgcccccgccacggugugcggccccaagaaguccaccaaccuggucaagaacaagugcgugaacuucaacuucaacggccugaccgggaccggcgugcucaccgagagcaacaagaaguuccugccguuccagcaguucgggcgcgacaucgccgacacgaccgacgcgguccgggacccccagacccuggagauccuggacaucacccccugcagcuucggcggggugagcgugaucacgccgggcaccaacaccuccaaccaggucgccgugcucuaccagggcgugaacugcaccgagguccccguggccauccacgccgaccagcugacgcccaccuggcgcguguacagcaccggguccaacgucuuccagacccgggccggcugccugaucggggcggagcacgugaacaacagcuacgagugcgacauccccaucggcgccggcaucugcgccuccuaccagacgcagaccaacagcccgcgccgggcccgcuccguggcgagccaguccaucaucgccuacaccaugagccucggggccgagaacuccgucgccuacagcaacaacuccaucgccauccccaccaacuucacgaucagcgugaccaccgagauccugcccguguccaugaccaagacgagcgucgacugcaccauguacaucugcggcgacagcaccgagugcuccaaccugcuccugcaguacgggagcuucugcacccagcugaaccgggcgcucacgggcaucgccguggagcaggacaagaacacccaggagguguucgcccaggucaagcagaucuacaagacgcccccgaucaaggacuucgggggcuucaacuucucccagauccugcccgaccccagcaagcccuccaagcgcagcuucaucgaggaccuccuguucaacaaggugacccuggccgacgccggcuucaucaagcaguacggggacugccugggcgacaucgcggcccgggaccucaucugcgcccagaaguucaacgggcugaccgugcugccgccccuccugaccgacgagaugaucgcccaguacaccuccgcccugcucgcgggcaccaucacgagcggguggaccuucggcgccggcgccgcccugcagauccccuucgcgaugcagauggccuaccgcuucaacgggaucggcgucacccagaacgugcuguacgagaaccagaagcucaucgccaaccaguucaacuccgccaucgggaagauccaggacagccuguccagcaccgccuccgcgcugggcaagcuccaggacguggucaaccagaacgcccaggcccugaacacgcuggugaagcagcucagcuccaacuucggggccaucagcuccgugcugaacgacauccugagccggcucgacccgcccgaggccgagguccagaucgaccgccugaucaccggccggcugcagucccuccagaccuacgugacccagcagcugauccgcgcggccgagauccgggccagcgccaaccuggccgcgaccaagaugagcgagugcgugcucggccaguccaagcgcgucgacuucugcgggaagggcuaccaccugaugagcuucccccaguccgcgccccacggggugguguuccugcacgucacguacgugcccgcccaggagaagaacuucaccaccgccccggccaucugccacgacggcaaggcccacuucccccgggagggggucuucgugagcaacggcacccacugguucgugacgcagcgcaacuucuacgagccccagaucaucaccaccgacaacaccuucgucuccggcaacugcgacguggugaucgggaucgucaacaacacgguguacgacccccuccagccggagcuggacagcuucaaggaggagcuggacaaguacuucaagaaccacaccucccccgacguggaccucggcgacaucagcgggaucaacgccuccgucgugaacauccagaaggagaucgaccggcugaacgagguggccaagaaccugaacgagagccucaucgaccugcaggagcugggcaaguacgagcaguacaucaaguggcccugguacaucuggcucggcuucaucgccgggcugaucgcgaucgucauggugaccaucaugcugugcugcaugaccuccugcugcagcugccucaagggcugcugcuccugcgggagcugcugcaaguucgacgaggacgacuccgagccggugcugaagggcgucaagcugcacuacacgugaugacucgagcugguacugcaugcacgcaaugcuagcugccccuuucccguccuggguaccccgagucucccccgaccucgggucccagguaugcucccaccuccaccugccccacucaccaccucugcuaguuccagacaccucccaagcacgcagcaaugcagcucaaaacgcuuagccuagccacacccccacgggaaacagcagugauuaaccuuuagcaauaaacgaaaguuuaacuaagcuauacuaaccccaggguuggucaauuucgugccagccacacccuggagcuagcaaaaaaaaaaaaaaaaaaaaaaaaaaaaaaaaaaaaaaaaaaaaaaaaaaaaaaaaaaaaaaaaaaaaaaaaaaaaaaaaaaaaaaaaaaaaaaaaaaaa

SEQ ID NO: 26413 - RNA, 4273 nt, Artificial Sequence
  SARS-CoV-2/Wuhan/WIV05/2019__EPI_ISL_402128 spike protein mRNA gc (1-1273)(K986P_V987P)
agaauaaacuaguauucuucugguccccacagacucagagagaacccgccaccauguucguguuccuggugcugcugccccuggugagcagccagugcgugaaccugaccacccggacccagcugccaccagccuacaccaacagcuucacccggggcgucuacuaccccgacaagguguuccggagcagcguccugcacagcacccaggaccuguuccugcccuucuucagcaacgugaccugguuccacgccauccacgugagcggcaccaacggcaccaagcgguucgacaaccccgugcugcccuucaacgacggcguguacuucgccagcaccgagaagagcaacaucauccggggcuggaucuucggcaccacccuggacagcaagacccagagccugcugaucgugaauaacgccaccaacguggugaucaaggugugcgaguuccaguucugcaacgaccccuuccugggcguguacuaccacaagaacaacaagagcuggauggagagcgaguuccggguguacagcagcgccaacaacugcaccuucgaguacgugagccagcccuuccugauggaccuggagggcaagcagggcaacuucaagaaccugcgggaguucguguucaagaacaucgacggcuacuucaagaucuacagcaagcacaccccaaucaaccuggugcgggaucugccccagggcuucucagcccuggagccccugguggaccugcccaucggcaucaacaucacccgguuccagacccugcuggcccugcaccggagcuaccugaccccaggcgacagcagcagcggguggacagcaggcgcggcugcuuacuacgugggcuaccugcagccccggaccuuccugcugaaguacaacgagaacggcaccaucaccgacgccguggacugcgcccuggacccucugagcgagaccaagugcacccugaagagcuucaccguggagaagggcaucuaccagaccagcaacuuccgggugcagcccaccgagagcaucgugcgguuccccaacaucaccaaccugugccccuucggcgagguguucaacgccacccgguucgccagcguguacgccuggaaccggaagcggaucagcaacugcguggccgacuacagcgugcuguacaacagcgccagcuucagcaccuucaagugcuacggcgugagccccaccaagcugaacgaccugugcuucaccaacguguacgccgacagcuucgugauccguggcgacgaggugcggcagaucgcacccggccagacaggcaagaucgccgacuacaacuacaagcugcccgacgacuucaccggcugcgugaucgccuggaacagcaacaaccucgacagcaaggugggcggcaacuacaacuaccuguaccggcuguuccggaagagcaaccugaagcccuucgagcgggacaucagcaccgagaucuaccaagccggcuccaccccuugcaacggcguggagggcuucaacugcuacuucccucugcagagcuacggcuuccagcccaccaacggcgugggcuaccagcccuaccgggugguggugcugagcuucgagcugcugcacgccccagccaccguguguggccccaagaagagcaccaaccuggugaagaacaagugcgugaacuucaacuucaacggccuuaccggcaccggcgugcugaccgagagcaacaagaaauuccugcccuuucagcaguucggccgggacaucgccgacaccaccgacgcugugcgggauccccagacccuggagauccuggacaucaccccuugcagcuucggcggcgugagcgugaucaccccaggcaccaacaccagcaaccagguggccgugcuguaccaggacgugaacugcaccgaggugcccguggccauccacgccgaccagcugacacccaccuggcgggucuacagcaccggcagcaacguguuccagacccgggccgguugccugaucggcgccgagcacgugaacaacagcuacgagugcgacauccccaucggcgccggcaucugugccagcuaccagacccagaccaauucaccccggagggcaaggagcguggccagccagagcaucaucgccuacaccaugagccugggcgccgagaacagcguggccuacagcaacaacagcaucgccauccccaccaacuucaccaucagcgugaccaccgagauucugcccgugagcaugaccaagaccagcguggacugcaccauguacaucugcggcgacagcaccgagugcagcaaccugcugcugcaguacggcagcuucugcacccagcugaaccgggcccugaccggcaucgccguggagcaggacaagaacacccaggagguguucgcccaggugaagcagaucuacaagaccccucccaucaaggacuucggcggcuucaacuucagccagauccugcccgaccccagcaagcccagcaagcggagcuucaucgaggaccugcuguucaacaaggugacccuagccgacgccggcuucaucaagcaguacggcgacugccucggcgacauagccgcccgggaccugaucugcgcccagaaguucaacggccugaccgugcugccuccccugcugaccgacgagaugaucgcccaguacaccagcgcccuguuagccggaaccaucaccagcggcuggacuuucggcgcuggagccgcucugcagauccccuucgccaugcagauggccuaccgguucaacggcaucggcgugacccagaacgugcuguacgagaaccagaagcugaucgccaaccaguucaacagcgccaucggcaagauccaggacagccugagcagcaccgcuagcgcccugggcaagcugcaggacguggugaaccagaacgcccaggcccugaacacccuggugaagcagcugagcagcaacuucggcgccaucagcagcgugcugaacgacauccugagccggcuggacccucccgaggccgaggugcagaucgaccggcugaucacuggccggcugcagagccugcagaccuacgugacccagcagcugauccgggccgccgagauucgggccagcgccaaccuggccgccaccaagaugagcgagugcgugcugggccagagcaagcggguggacuucugcggcaagggcuaccaccugaugagcuuuccccagagcgcaccccacggagugguguuccugcacgugaccuacgugcccgcccaggagaagaacuucaccaccgccccagccaucugccacgacggcaaggcccacuuuccccgggagggcguguucgugagcaacggcacccacugguucgugacccagcggaacuucuacgagccccagaucaucaccaccgacaacaccuucgugagcggcaacugcgacguggugaucggcaucgugaacaacaccguguacgauccccugcagcccgagcuggacagcuucaaggaggagcuggacaaguacuucaagaaucacaccagccccgacguggaccugggcgacaucagcggcaucaacgccagcguggugaacauccagaaggagaucgaucggcugaacgagguggccaagaaccugaacgagagccugaucgaccugcaggagcugggcaaguacgagcaguacaucaaguggcccugguacaucuggcugggcuucaucgccggccugaucgccaucgugauggugaccaucaugcugugcugcaugaccagcugcugcagcugccugaagggcuguugcagcugcggcagcugcugcaaguucgacgaggacgacagcgagcccgugcugaagggcgugaagcugcacuacaccugaugacucgagcugguacugcaugcacgcaaugcuagcugccccuuucccguccuggguaccccgagucucccccgaccucgggucccagguaugcucccaccuccaccugccccacucaccaccucugcuaguuccagacaccucccaagcacgcagcaaugcagcucaaaacgcuuagccuagccacacccccacgggaaacagcagugauuaaccuuuagcaauaaacgaaaguuuaacuaagcuauacuaaccccaggguuggucaauuucgugccagccacacccuggagcuagcaaaaaaaaaaaaaaaaaaaaaaaaaaaaaaaaaaaaaaaaaaaaaaaaaaaaaaaaaaaaaaaaaaaaaaaaaaaaaaaaaaaaaaaaaaaaaaaaaaaa

SEQ ID NO: 26414 - RNA, 4273 nt, Artificial Sequence
  SARS-CoV-2/Wuhan/WIV05/2019__EPI_ISL_402128 spike protein mRNA gc (1-1273)(K986P_V987P_ D614G)
agaauaaacuaguauucuucugguccccacagacucagagagaacccgccaccauguucguguuccuggugcugcugccccuggugagcagccagugcgugaaccugaccacccggacccagcugccaccagccuacaccaacagcuucacccggggcgucuacuaccccgacaagguguuccggagcagcguccugcacagcacccaggaccuguuccugcccuucuucagcaacgugaccugguuccacgccauccacgugagcggcaccaacggcaccaagcgguucgacaaccccgugcugcccuucaacgacggcguguacuucgccagcaccgagaagagcaacaucauccggggcuggaucuucggcaccacccuggacagcaagacccagagccugcugaucgugaauaacgccaccaacguggugaucaaggugugcgaguuccaguucugcaacgaccccuuccugggcguguacuaccacaagaacaacaagagcuggauggagagcgaguuccggguguacagcagcgccaacaacugcaccuucgaguacgugagccagcccuuccugauggaccuggagggcaagcagggcaacuucaagaaccugcgggaguucguguucaagaacaucgacggcuacuucaagaucuacagcaagcacaccccaaucaaccuggugcgggaucugccccagggcuucucagcccuggagccccugguggaccugcccaucggcaucaacaucacccgguuccagacccugcuggcccugcaccggagcuaccugaccccaggcgacagcagcagcggguggacagcaggcgcggcugcuuacuacgugggcuaccugcagccccggaccuuccugcugaaguacaacgagaacggcaccaucaccgacgccguggacugcgcccuggacccucugagcgagaccaagugcacccugaagagcuucaccguggagaagggcaucuaccagaccagcaacuuccgggugcagcccaccgagagcaucgugcgguuccccaacaucaccaaccugugccccuucggcgagguguucaacgccacccgguucgccagcguguacgccuggaaccggaagcggaucagcaacugcguggccgacuacagcgugcuguacaacagcgccagcuucagcaccuucaagugcuacggcgugagccccaccaagcugaacgaccugugcuucaccaacguguacgccgacagcuucgugauccguggcgacgaggugcggcagaucgcacccggccagacaggcaagaucgccgacuacaacuacaagcugcccgacgacuucaccggcugcgugaucgccuggaacagcaacaaccucgacagcaaggugggcggcaacuacaacuaccuguaccggcuguuccggaagagcaaccugaagcccuucgagcgggacaucagcaccgagaucuaccaagccggcuccaccccuugcaacggcguggagggcuucaacugcuacuucccucugcagagcuacggcuuccagcccaccaacggcgugggcuaccagcccuaccgggugguggugcugagcuucgagcugcugcacgccccagccaccguguguggccccaagaagagcaccaaccuggugaagaacaagugcgugaacuucaacuucaacggccuuaccggcaccggcgugcugaccgagagcaacaagaaauuccugcccuuucagcaguucggccgggacaucgccgacaccaccgacgcugugcgggauccccagacccuggagauccuggacaucaccccuugcagcuucggcggcgugagcgugaucaccccaggcaccaacaccagcaaccagguggccgugcuguaccagggcgugaacugcaccgaggugcccguggccauccacgccgaccagcugacacccaccuggcgggucuacagcaccggcagcaacguguuccagacccgggccgguugccugaucggcgccgagcacgugaacaacagcuacgagugcgacauccccaucggcgccggcaucugugccagcuaccagacccagaccaauucaccccggagggcaaggagcguggccagccagagcaucaucgccuacaccaugagccugggcgccgagaacagcguggccuacagcaacaacagcaucgccauccccaccaacuucaccaucagcgugaccaccgagauucugcccgugagcaugaccaagaccagcguggacugcaccauguacaucugcggcgacagcaccgagugcagcaaccugcugcugcaguacggcagcuucugcacccagcugaaccgggcccugaccggcaucgccguggagcaggacaagaacacccaggagguguucgcccaggugaagcagaucuacaagaccccucccaucaaggacuucggcggcuucaacuucagccagauccugcccgaccccagcaagcccagcaagcggagcuucaucgaggaccugcuguucaacaaggugacccuagccgacgccggcuucaucaagcaguacggcgacugccucggcgacauagccgcccgggaccugaucugcgcccagaaguucaacggccugaccgugcugccuccccugcugaccgacgagaugaucgcccaguacaccagcgcccuguuagccggaaccaucaccagcggcuggacuuucggcgcuggagccgcucugcagauccccuucgccaugcagauggccuaccgguucaacggcaucggcgugacccagaacgugcuguacgagaaccagaagcugaucgccaaccaguucaacagcgccaucggcaagauccaggacagccugagcagcaccgcuagcgcccugggcaagcugcaggacguggugaaccagaacgcccaggcccugaacacccuggugaagcagcugagcagcaacuucggcgccaucagcagcgugcugaacgacauccugagccggcuggacccucccgaggccgaggugcagaucgaccggcugaucacuggccggcugcagagccugcagaccuacgugacccagcagcugauccgggccgccgagauucgggccagcgccaaccuggccgccaccaagaugagcgagugcgugcugggccagagcaagcggguggacuucugcggcaagggcuaccaccugaugagcuuuccccagagcgcaccccacggagugguguuccugcacgugaccuacgugcccgcccaggagaagaacuucaccaccgccccagccaucugccacgacggcaaggcccacuuuccccgggagggcguguucgugagcaacggcacccacugguucgugacccagcggaacuucuacgagccccagaucaucaccaccgacaacaccuucgugagcggcaacugcgacguggugaucggcaucgugaacaacaccguguacgauccccugcagcccgagcuggacagcuucaaggaggagcuggacaaguacuucaagaaucacaccagccccgacguggaccugggcgacaucagcggcaucaacgccagcguggugaacauccagaaggagaucgaucggcugaacgagguggccaagaaccugaacgagagccugaucgaccugcaggagcugggcaaguacgagcaguacaucaaguggcccugguacaucuggcugggcuucaucgccggccugaucgccaucgugauggugaccaucaugcugugcugcaugaccagcugcugcagcugccugaagggcuguugcagcugcggcagcugcugcaaguucgacgaggacgacagcgagcccgugcugaagggcgugaagcugcacuacaccugaugacucgagcugguacugcaugcacgcaaugcuagcugccccuuucccguccuggguaccccgagucucccccgaccucgggucccagguaugcucccaccuccaccugccccacucaccaccucugcuaguuccagacaccucccaagcacgcagcaaugcagcucaaaacgcuuagccuagccacacccccacgggaaacagcagugauuaaccuuuagcaauaaacgaaaguuuaacuaagcuauacuaaccccaggguuggucaauuucgugccagccacacccuggagcuagcaaaaaaaaaaaaaaaaaaaaaaaaaaaaaaaaaaaaaaaaaaaaaaaaaaaaaaaaaaaaaaaaaaaaaaaaaaaaaaaaaaaaaaaaaaaaaaaaaaaa

SEQ ID NO: 26415 - RNA, 4273 nt, Artificial Sequence
  SARS-CoV-2/Wuhan/WIV05/2019__EPI_ISL_402128 spike protein mRNA gc (1-1273)(K986P_V987P_A222V_D614G)
agaauaaacuaguauucuucugguccccacagacucagagagaacccgccaccauguucguguuccuggugcugcugccccuggugagcagccagugcgugaaccugaccacccggacccagcugccaccagccuacaccaacagcuucacccggggcgucuacuaccccgacaagguguuccggagcagcguccugcacagcacccaggaccuguuccugcccuucuucagcaacgugaccugguuccacgccauccacgugagcggcaccaacggcaccaagcgguucgacaaccccgugcugcccuucaacgacggcguguacuucgccagcaccgagaagagcaacaucauccggggcuggaucuucggcaccacccuggacagcaagacccagagccugcugaucgugaauaacgccaccaacguggugaucaaggugugcgaguuccaguucugcaacgaccccuuccugggcguguacuaccacaagaacaacaagagcuggauggagagcgaguuccggguguacagcagcgccaacaacugcaccuucgaguacgugagccagcccuuccugauggaccuggagggcaagcagggcaacuucaagaaccugcgggaguucguguucaagaacaucgacggcuacuucaagaucuacagcaagcacaccccaaucaaccuggugcgggaucugccccagggcuucucagugcuggagccccugguggaccugcccaucggcaucaacaucacccgguuccagacccugcuggcccugcaccggagcuaccugaccccaggcgacagcagcagcggguggacagcaggcgcggcugcuuacuacgugggcuaccugcagccccggaccuuccugcugaaguacaacgagaacggcaccaucaccgacgccguggacugcgcccuggacccucugagcgagaccaagugcacccugaagagcuucaccguggagaagggcaucuaccagaccagcaacuuccgggugcagcccaccgagagcaucgugcgguuccccaacaucaccaaccugugccccuucggcgagguguucaacgccacccgguucgccagcguguacgccuggaaccggaagcggaucagcaacugcguggccgacuacagcgugcuguacaacagcgccagcuucagcaccuucaagugcuacggcgugagccccaccaagcugaacgaccugugcuucaccaacguguacgccgacagcuucgugauccguggcgacgaggugcggcagaucgcacccggccagacaggcaagaucgccgacuacaacuacaagcugcccgacgacuucaccggcugcgugaucgccuggaacagcaacaaccucgacagcaaggugggcggcaacuacaacuaccuguaccggcuguuccggaagagcaaccugaagcccuucgagcgggacaucagcaccgagaucuaccaagccggcuccaccccuugcaacggcguggagggcuucaacugcuacuucccucugcagagcuacggcuuccagcccaccaacggcgugggcuaccagcccuaccgggugguggugcugagcuucgagcugcugcacgccccagccaccguguguggccccaagaagagcaccaaccuggugaagaacaagugcgugaacuucaacuucaacggccuuaccggcaccggcgugcugaccgagagcaacaagaaauuccugcccuuucagcaguucggccgggacaucgccgacaccaccgacgcugugcgggauccccagacccuggagauccuggacaucaccccuugcagcuucggcggcgugagcgugaucaccccaggcaccaacaccagcaaccagguggccgugcuguaccagggcgugaacugcaccgaggugcccguggccauccacgccgaccagcugacacccaccuggcgggucuacagcaccggcagcaacguguuccagacccgggccgguugccugaucggcgccgagcacgugaacaacagcuacgagugcgacauccccaucggcgccggcaucugugccagcuaccagacccagaccaauucaccccggagggcaaggagcguggccagccagagcaucaucgccuacaccaugagccugggcgccgagaacagcguggccuacagcaacaacagcaucgccauccccaccaacuucaccaucagcgugaccaccgagauucugcccgugagcaugaccaagaccagcguggacugcaccauguacaucugcggcgacagcaccgagugcagcaaccugcugcugcaguacggcagcuucugcacccagcugaaccgggcccugaccggcaucgccguggagcaggacaagaacacccaggagguguucgcccaggugaagcagaucuacaagaccccucccaucaaggacuucggcggcuucaacuucagccagauccugcccgaccccagcaagcccagcaagcggagcuucaucgaggaccugcuguucaacaaggugacccuagccgacgccggcuucaucaagcaguacggcgacugccucggcgacauagccgcccgggaccugaucugcgcccagaaguucaacggccugaccgugcugccuccccugcugaccgacgagaugaucgcccaguacaccagcgcccuguuagccggaaccaucaccagcggcuggacuuucggcgcuggagccgcucugcagauccccuucgccaugcagauggccuaccgguucaacggcaucggcgugacccagaacgugcuguacgagaaccagaagcugaucgccaaccaguucaacagcgccaucggcaagauccaggacagccugagcagcaccgcuagcgcccugggcaagcugcaggacguggugaaccagaacgcccaggcccugaacacccuggugaagcagcugagcagcaacuucggcgccaucagcagcgugcugaacgacauccugagccggcuggacccucccgaggccgaggugcagaucgaccggcugaucacuggccggcugcagagccugcagaccuacgugacccagcagcugauccgggccgccgagauucgggccagcgccaaccuggccgccaccaagaugagcgagugcgugcugggccagagcaagcggguggacuucugcggcaagggcuaccaccugaugagcuuuccccagagcgcaccccacggagugguguuccugcacgugaccuacgugcccgcccaggagaagaacuucaccaccgccccagccaucugccacgacggcaaggcccacuuuccccgggagggcguguucgugagcaacggcacccacugguucgugacccagcggaacuucuacgagccccagaucaucaccaccgacaacaccuucgugagcggcaacugcgacguggugaucggcaucgugaacaacaccguguacgauccccugcagcccgagcuggacagcuucaaggaggagcuggacaaguacuucaagaaucacaccagccccgacguggaccugggcgacaucagcggcaucaacgccagcguggugaacauccagaaggagaucgaucggcugaacgagguggccaagaaccugaacgagagccugaucgaccugcaggagcugggcaaguacgagcaguacaucaaguggcccugguacaucuggcugggcuucaucgccggccugaucgccaucgugauggugaccaucaugcugugcugcaugaccagcugcugcagcugccugaagggcuguugcagcugcggcagcugcugcaaguucgacgaggacgacagcgagcccgugcugaagggcgugaagcugcacuacaccugaugacucgagcugguacugcaugcacgcaaugcuagcugccccuuucccguccuggguaccccgagucucccccgaccucgggucccagguaugcucccaccuccaccugccccacucaccaccucugcuaguuccagacaccucccaagcacgcagcaaugcagcucaaaacgcuuagccuagccacacccccacgggaaacagcagugauuaaccuuuagcaauaaacgaaaguuuaacuaagcuauacuaaccccaggguuggucaauuucgugccagccacacccuggagcuagcaaaaaaaaaaaaaaaaaaaaaaaaaaaaaaaaaaaaaaaaaaaaaaaaaaaaaaaaaaaaaaaaaaaaaaaaaaaaaaaaaaaaaaaaaaaaaaaaaaaa

SEQ ID NO: 26416 - RNA, 4273 nt, Artificial Sequence
  SARS-CoV-2/Wuhan/WIV05/2019__EPI_ISL_402128 spike protein mRNA gc (1-1273)(K986P_V987P_N439K_D614G)
agaauaaacuaguauucuucugguccccacagacucagagagaacccgccaccauguucguguuccuggugcugcugccccuggugagcagccagugcgugaaccugaccacccggacccagcugccaccagccuacaccaacagcuucacccggggcgucuacuaccccgacaagguguuccggagcagcguccugcacagcacccaggaccuguuccugcccuucuucagcaacgugaccugguuccacgccauccacgugagcggcaccaacggcaccaagcgguucgacaaccccgugcugcccuucaacgacggcguguacuucgccagcaccgagaagagcaacaucauccggggcuggaucuucggcaccacccuggacagcaagacccagagccugcugaucgugaauaacgccaccaacguggugaucaaggugugcgaguuccaguucugcaacgaccccuuccugggcguguacuaccacaagaacaacaagagcuggauggagagcgaguuccggguguacagcagcgccaacaacugcaccuucgaguacgugagccagcccuuccugauggaccuggagggcaagcagggcaacuucaagaaccugcgggaguucguguucaagaacaucgacggcuacuucaagaucuacagcaagcacaccccaaucaaccuggugcgggaucugccccagggcuucucagcccuggagccccugguggaccugcccaucggcaucaacaucacccgguuccagacccugcuggcccugcaccggagcuaccugaccccaggcgacagcagcagcggguggacagcaggcgcggcugcuuacuacgugggcuaccugcagccccggaccuuccugcugaaguacaacgagaacggcaccaucaccgacgccguggacugcgcccuggacccucugagcgagaccaagugcacccugaagagcuucaccguggagaagggcaucuaccagaccagcaacuuccgggugcagcccaccgagagcaucgugcgguuccccaacaucaccaaccugugccccuucggcgagguguucaacgccacccgguucgccagcguguacgccuggaaccggaagcggaucagcaacugcguggccgacuacagcgugcuguacaacagcgccagcuucagcaccuucaagugcuacggcgugagccccaccaagcugaacgaccugugcuucaccaacguguacgccgacagcuucgugauccguggcgacgaggugcggcagaucgcacccggccagacaggcaagaucgccgacuacaacuacaagcugcccgacgacuucaccggcugcgugaucgccuggaacagcaagaaccucgacagcaaggugggcggcaacuacaacuaccuguaccggcuguuccggaagagcaaccugaagcccuucgagcgggacaucagcaccgagaucuaccaagccggcuccaccccuugcaacggcguggagggcuucaacugcuacuucccucugcagagcuacggcuuccagcccaccaacggcgugggcuaccagcccuaccgggugguggugcugagcuucgagcugcugcacgccccagccaccguguguggccccaagaagagcaccaaccuggugaagaacaagugcgugaacuucaacuucaacggccuuaccggcaccggcgugcugaccgagagcaacaagaaauuccugcccuuucagcaguucggccgggacaucgccgacaccaccgacgcugugcgggauccccagacccuggagauccuggacaucaccccuugcagcuucggcggcgugagcgugaucaccccaggcaccaacaccagcaaccagguggccgugcuguaccagggcgugaacugcaccgaggugcccguggccauccacgccgaccagcugacacccaccuggcgggucuacagcaccggcagcaacguguuccagacccgggccgguugccugaucggcgccgagcacgugaacaacagcuacgagugcgacauccccaucggcgccggcaucugugccagcuaccagacccagaccaauucaccccggagggcaaggagcguggccagccagagcaucaucgccuacaccaugagccugggcgccgagaacagcguggccuacagcaacaacagcaucgccauccccaccaacuucaccaucagcgugaccaccgagauucugcccgugagcaugaccaagaccagcguggacugcaccauguacaucugcggcgacagcaccgagugcagcaaccugcugcugcaguacggcagcuucugcacccagcugaaccgggcccugaccggcaucgccguggagcaggacaagaacacccaggagguguucgcccaggugaagcagaucuacaagaccccucccaucaaggacuucggcggcuucaacuucagccagauccugcccgaccccagcaagcccagcaagcggagcuucaucgaggaccugcuguucaacaaggugacccuagccgacgccggcuucaucaagcaguacggcgacugccucggcgacauagccgcccgggaccugaucugcgcccagaaguucaacggccugaccgugcugccuccccugcugaccgacgagaugaucgcccaguacaccagcgcccuguuagccggaaccaucaccagcggcuggacuuucggcgcuggagccgcucugcagauccccuucgccaugcagauggccuaccgguucaacggcaucggcgugacccagaacgugcuguacgagaaccagaagcugaucgccaaccaguucaacagcgccaucggcaagauccaggacagccugagcagcaccgcuagcgcccugggcaagcugcaggacguggugaaccagaacgcccaggcccugaacacccuggugaagcagcugagcagcaacuucggcgccaucagcagcgugcugaacgacauccugagccggcuggacccucccgaggccgaggugcagaucgaccggcugaucacuggccggcugcagagccugcagaccuacgugacccagcagcugauccgggccgccgagauucgggccagcgccaaccuggccgccaccaagaugagcgagugcgugcugggccagagcaagcggguggacuucugcggcaagggcuaccaccugaugagcuuuccccagagcgcaccccacggagugguguuccugcacgugaccuacgugcccgcccaggagaagaacuucaccaccgccccagccaucugccacgacggcaaggcccacuuuccccgggagggcguguucgugagcaacggcacccacugguucgugacccagcggaacuucuacgagccccagaucaucaccaccgacaacaccuucgugagcggcaacugcgacguggugaucggcaucgugaacaacaccguguacgauccccugcagcccgagcuggacagcuucaaggaggagcuggacaaguacuucaagaaucacaccagccccgacguggaccugggcgacaucagcggcaucaacgccagcguggugaacauccagaaggagaucgaucggcugaacgagguggccaagaaccugaacgagagccugaucgaccugcaggagcugggcaaguacgagcaguacaucaaguggcccugguacaucuggcugggcuucaucgccggccugaucgccaucgugauggugaccaucaugcugugcugcaugaccagcugcugcagcugccugaagggcuguugcagcugcggcagcugcugcaaguucgacgaggacgacagcgagcccgugcugaagggcgugaagcugcacuacaccugaugacucgagcugguacugcaugcacgcaaugcuagcugccccuuucccguccuggguaccccgagucucccccgaccucgggucccagguaugcucccaccuccaccugccccacucaccaccucugcuaguuccagacaccucccaagcacgcagcaaugcagcucaaaacgcuuagccuagccacacccccacgggaaacagcagugauuaaccuuuagcaauaaacgaaaguuuaacuaagcuauacuaaccccaggguuggucaauuucgugccagccacacccuggagcuagcaaaaaaaaaaaaaaaaaaaaaaaaaaaaaaaaaaaaaaaaaaaaaaaaaaaaaaaaaaaaaaaaaaaaaaaaaaaaaaaaaaaaaaaaaaaaaaaaaaaa

SEQ ID NO: 26417 - RNA, 4273 nt, Artificial Sequence
  SARS-CoV-2/Wuhan/WIV05/2019__EPI_ISL_402128 spike protein mRNA gc (1-1273)(K986P_V987P_S477N_D614G)
agaauaaacuaguauucuucugguccccacagacucagagagaacccgccaccauguucguguuccuggugcugcugccccuggugagcagccagugcgugaaccugaccacccggacccagcugccaccagccuacaccaacagcuucacccggggcgucuacuaccccgacaagguguuccggagcagcguccugcacagcacccaggaccuguuccugcccuucuucagcaacgugaccugguuccacgccauccacgugagcggcaccaacggcaccaagcgguucgacaaccccgugcugcccuucaacgacggcguguacuucgccagcaccgagaagagcaacaucauccggggcuggaucuucggcaccacccuggacagcaagacccagagccugcugaucgugaauaacgccaccaacguggugaucaaggugugcgaguuccaguucugcaacgaccccuuccugggcguguacuaccacaagaacaacaagagcuggauggagagcgaguuccggguguacagcagcgccaacaacugcaccuucgaguacgugagccagcccuuccugauggaccuggagggcaagcagggcaacuucaagaaccugcgggaguucguguucaagaacaucgacggcuacuucaagaucuacagcaagcacaccccaaucaaccuggugcgggaucugccccagggcuucucagcccuggagccccugguggaccugcccaucggcaucaacaucacccgguuccagacccugcuggcccugcaccggagcuaccugaccccaggcgacagcagcagcggguggacagcaggcgcggcugcuuacuacgugggcuaccugcagccccggaccuuccugcugaaguacaacgagaacggcaccaucaccgacgccguggacugcgcccuggacccucugagcgagaccaagugcacccugaagagcuucaccguggagaagggcaucuaccagaccagcaacuuccgggugcagcccaccgagagcaucgugcgguuccccaacaucaccaaccugugccccuucggcgagguguucaacgccacccgguucgccagcguguacgccuggaaccggaagcggaucagcaacugcguggccgacuacagcgugcuguacaacagcgccagcuucagcaccuucaagugcuacggcgugagccccaccaagcugaacgaccugugcuucaccaacguguacgccgacagcuucgugauccguggcgacgaggugcggcagaucgcacccggccagacaggcaagaucgccgacuacaacuacaagcugcccgacgacuucaccggcugcgugaucgccuggaacagcaacaaccucgacagcaaggugggcggcaacuacaacuaccuguaccggcuguuccggaagagcaaccugaagcccuucgagcgggacaucagcaccgagaucuaccaagccggcaacaccccuugcaacggcguggagggcuucaacugcuacuucccucugcagagcuacggcuuccagcccaccaacggcgugggcuaccagcccuaccgggugguggugcugagcuucgagcugcugcacgccccagccaccguguguggccccaagaagagcaccaaccuggugaagaacaagugcgugaacuucaacuucaacggccuuaccggcaccggcgugcugaccgagagcaacaagaaauuccugcccuuucagcaguucggccgggacaucgccgacaccaccgacgcugugcgggauccccagacccuggagauccuggacaucaccccuugcagcuucggcggcgugagcgugaucaccccaggcaccaacaccagcaaccagguggccgugcuguaccagggcgugaacugcaccgaggugcccguggccauccacgccgaccagcugacacccaccuggcgggucuacagcaccggcagcaacguguuccagacccgggccgguugccugaucggcgccgagcacgugaacaacagcuacgagugcgacauccccaucggcgccggcaucugugccagcuaccagacccagaccaauucaccccggagggcaaggagcguggccagccagagcaucaucgccuacaccaugagccugggcgccgagaacagcguggccuacagcaacaacagcaucgccauccccaccaacuucaccaucagcgugaccaccgagauucugcccgugagcaugaccaagaccagcguggacugcaccauguacaucugcggcgacagcaccgagugcagcaaccugcugcugcaguacggcagcuucugcacccagcugaaccgggcccugaccggcaucgccguggagcaggacaagaacacccaggagguguucgcccaggugaagcagaucuacaagaccccucccaucaaggacuucggcggcuucaacuucagccagauccugcccgaccccagcaagcccagcaagcggagcuucaucgaggaccugcuguucaacaaggugacccuagccgacgccggcuucaucaagcaguacggcgacugccucggcgacauagccgcccgggaccugaucugcgcccagaaguucaacggccugaccgugcugccuccccugcugaccgacgagaugaucgcccaguacaccagcgcccuguuagccggaaccaucaccagcggcuggacuuucggcgcuggagccgcucugcagauccccuucgccaugcagauggccuaccgguucaacggcaucggcgugacccagaacgugcuguacgagaaccagaagcugaucgccaaccaguucaacagcgccaucggcaagauccaggacagccugagcagcaccgcuagcgcccugggcaagcugcaggacguggugaaccagaacgcccaggcccugaacacccuggugaagcagcugagcagcaacuucggcgccaucagcagcgugcugaacgacauccugagccggcuggacccucccgaggccgaggugcagaucgaccggcugaucacuggccggcugcagagccugcagaccuacgugacccagcagcugauccgggccgccgagauucgggccagcgccaaccuggccgccaccaagaugagcgagugcgugcugggccagagcaagcggguggacuucugcggcaagggcuaccaccugaugagcuuuccccagagcgcaccccacggagugguguuccugcacgugaccuacgugcccgcccaggagaagaacuucaccaccgccccagccaucugccacgacggcaaggcccacuuuccccgggagggcguguucgugagcaacggcacccacugguucgugacccagcggaacuucuacgagccccagaucaucaccaccgacaacaccuucgugagcggcaacugcgacguggugaucggcaucgugaacaacaccguguacgauccccugcagcccgagcuggacagcuucaaggaggagcuggacaaguacuucaagaaucacaccagccccgacguggaccugggcgacaucagcggcaucaacgccagcguggugaacauccagaaggagaucgaucggcugaacgagguggccaagaaccugaacgagagccugaucgaccugcaggagcugggcaaguacgagcaguacaucaaguggcccugguacaucuggcugggcuucaucgccggccugaucgccaucgugauggugaccaucaugcugugcugcaugaccagcugcugcagcugccugaagggcuguugcagcugcggcagcugcugcaaguucgacgaggacgacagcgagcccgugcugaagggcgugaagcugcacuacaccugaugacucgagcugguacugcaugcacgcaaugcuagcugccccuuucccguccuggguaccccgagucucccccgaccucgggucccagguaugcucccaccuccaccugccccacucaccaccucugcuaguuccagacaccucccaagcacgcagcaaugcagcucaaaacgcuuagccuagccacacccccacgggaaacagcagugauuaaccuuuagcaauaaacgaaaguuuaacuaagcuauacuaaccccaggguuggucaauuucgugccagccacacccuggagcuagcaaaaaaaaaaaaaaaaaaaaaaaaaaaaaaaaaaaaaaaaaaaaaaaaaaaaaaaaaaaaaaaaaaaaaaaaaaaaaaaaaaaaaaaaaaaaaaaaaaaa

SEQ ID NO: 26418 - RNA, 4273 nt, Artificial Sequence
  SARS-CoV-2/Wuhan/WIV05/2019__EPI_ISL_402128 spike protein mRNA gc (1-1273)(K986P_V987P_N501Y_D614G)
agaauaaacuaguauucuucugguccccacagacucagagagaacccgccaccauguucguguuccuggugcugcugccccuggugagcagccagugcgugaaccugaccacccggacccagcugccaccagccuacaccaacagcuucacccggggcgucuacuaccccgacaagguguuccggagcagcguccugcacagcacccaggaccuguuccugcccuucuucagcaacgugaccugguuccacgccauccacgugagcggcaccaacggcaccaagcgguucgacaaccccgugcugcccuucaacgacggcguguacuucgccagcaccgagaagagcaacaucauccggggcuggaucuucggcaccacccuggacagcaagacccagagccugcugaucgugaauaacgccaccaacguggugaucaaggugugcgaguuccaguucugcaacgaccccuuccugggcguguacuaccacaagaacaacaagagcuggauggagagcgaguuccggguguacagcagcgccaacaacugcaccuucgaguacgugagccagcccuuccugauggaccuggagggcaagcagggcaacuucaagaaccugcgggaguucguguucaagaacaucgacggcuacuucaagaucuacagcaagcacaccccaaucaaccuggugcgggaucugccccagggcuucucagcccuggagccccugguggaccugcccaucggcaucaacaucacccgguuccagacccugcuggcccugcaccggagcuaccugaccccaggcgacagcagcagcggguggacagcaggcgcggcugcuuacuacgugggcuaccugcagccccggaccuuccugcugaaguacaacgagaacggcaccaucaccgacgccguggacugcgcccuggacccucugagcgagaccaagugcacccugaagagcuucaccguggagaagggcaucuaccagaccagcaacuuccgggugcagcccaccgagagcaucgugcgguuccccaacaucaccaaccugugccccuucggcgagguguucaacgccacccgguucgccagcguguacgccuggaaccggaagcggaucagcaacugcguggccgacuacagcgugcuguacaacagcgccagcuucagcaccuucaagugcuacggcgugagccccaccaagcugaacgaccugugcuucaccaacguguacgccgacagcuucgugauccguggcgacgaggugcggcagaucgcacccggccagacaggcaagaucgccgacuacaacuacaagcugcccgacgacuucaccggcugcgugaucgccuggaacagcaacaaccucgacagcaaggugggcggcaacuacaacuaccuguaccggcuguuccggaagagcaaccugaagcccuucgagcgggacaucagcaccgagaucuaccaagccggcuccaccccuugcaacggcguggagggcuucaacugcuacuucccucugcagagcuacggcuuccagcccaccuacggcgugggcuaccagcccuaccgggugguggugcugagcuucgagcugcugcacgccccagccaccguguguggccccaagaagagcaccaaccuggugaagaacaagugcgugaacuucaacuucaacggccuuaccggcaccggcgugcugaccgagagcaacaagaaauuccugcccuuucagcaguucggccgggacaucgccgacaccaccgacgcugugcgggauccccagacccuggagauccuggacaucaccccuugcagcuucggcggcgugagcgugaucaccccaggcaccaacaccagcaaccagguggccgugcuguaccagggcgugaacugcaccgaggugcccguggccauccacgccgaccagcugacacccaccuggcgggucuacagcaccggcagcaacguguuccagacccgggccgguugccugaucggcgccgagcacgugaacaacagcuacgagugcgacauccccaucggcgccggcaucugugccagcuaccagacccagaccaauucaccccggagggcaaggagcguggccagccagagcaucaucgccuacaccaugagccugggcgccgagaacagcguggccuacagcaacaacagcaucgccauccccaccaacuucaccaucagcgugaccaccgagauucugcccgugagcaugaccaagaccagcguggacugcaccauguacaucugcggcgacagcaccgagugcagcaaccugcugcugcaguacggcagcuucugcacccagcugaaccgggcccugaccggcaucgccguggagcaggacaagaacacccaggagguguucgcccaggugaagcagaucuacaagaccccucccaucaaggacuucggcggcuucaacuucagccagauccugcccgaccccagcaagcccagcaagcggagcuucaucgaggaccugcuguucaacaaggugacccuagccgacgccggcuucaucaagcaguacggcgacugccucggcgacauagccgcccgggaccugaucugcgcccagaaguucaacggccugaccgugcugccuccccugcugaccgacgagaugaucgcccaguacaccagcgcccuguuagccggaaccaucaccagcggcuggacuuucggcgcuggagccgcucugcagauccccuucgccaugcagauggccuaccgguucaacggcaucggcgugacccagaacgugcuguacgagaaccagaagcugaucgccaaccaguucaacagcgccaucggcaagauccaggacagccugagcagcaccgcuagcgcccugggcaagcugcaggacguggugaaccagaacgcccaggcccugaacacccuggugaagcagcugagcagcaacuucggcgccaucagcagcgugcugaacgacauccugagccggcuggacccucccgaggccgaggugcagaucgaccggcugaucacuggccggcugcagagccugcagaccuacgugacccagcagcugauccgggccgccgagauucgggccagcgccaaccuggccgccaccaagaugagcgagugcgugcugggccagagcaagcggguggacuucugcggcaagggcuaccaccugaugagcuuuccccagagcgcaccccacggagugguguuccugcacgugaccuacgugcccgcccaggagaagaacuucaccaccgccccagccaucugccacgacggcaaggcccacuuuccccgggagggcguguucgugagcaacggcacccacugguucgugacccagcggaacuucuacgagccccagaucaucaccaccgacaacaccuucgugagcggcaacugcgacguggugaucggcaucgugaacaacaccguguacgauccccugcagcccgagcuggacagcuucaaggaggagcuggacaaguacuucaagaaucacaccagccccgacguggaccugggcgacaucagcggcaucaacgccagcguggugaacauccagaaggagaucgaucggcugaacgagguggccaagaaccugaacgagagccugaucgaccugcaggagcugggcaaguacgagcaguacaucaaguggcccugguacaucuggcugggcuucaucgccggccugaucgccaucgugauggugaccaucaugcugugcugcaugaccagcugcugcagcugccugaagggcuguugcagcugcggcagcugcugcaaguucgacgaggacgacagcgagcccgugcugaagggcgugaagcugcacuacaccugaugacucgagcugguacugcaugcacgcaaugcuagcugccccuuucccguccuggguaccccgagucucccccgaccucgggucccagguaugcucccaccuccaccugccccacucaccaccucugcuaguuccagacaccucccaagcacgcagcaaugcagcucaaaacgcuuagccuagccacacccccacgggaaacagcagugauuaaccuuuagcaauaaacgaaaguuuaacuaagcuauacuaaccccaggguuggucaauuucgugccagccacacccuggagcuagcaaaaaaaaaaaaaaaaaaaaaaaaaaaaaaaaaaaaaaaaaaaaaaaaaaaaaaaaaaaaaaaaaaaaaaaaaaaaaaaaaaaaaaaaaaaaaaaaaaaa

SEQ ID NO: 26419 - RNA, 4267 nt, Artificial Sequence
  SARS-CoV-2/Wuhan/WIV05/2019__EPI_ISL_402128 spike protein mRNA gc (1-1273)(K986P_V987P_H69del_V70del_D614G)
agaauaaacuaguauucuucugguccccacagacucagagagaacccgccaccauguucguguuccuggugcugcugccccuggugagcagccagugcgugaaccugaccacccggacccagcugccaccagccuacaccaacagcuucacccggggcgucuacuaccccgacaagguguuccggagcagcguccugcacagcacccaggaccuguuccugcccuucuucagcaacgugaccugguuccacgccaucagcggcaccaacggcaccaagcgguucgacaaccccgugcugcccuucaacgacggcguguacuucgccagcaccgagaagagcaacaucauccggggcuggaucuucggcaccacccuggacagcaagacccagagccugcugaucgugaauaacgccaccaacguggugaucaaggugugcgaguuccaguucugcaacgaccccuuccugggcguguacuaccacaagaacaacaagagcuggauggagagcgaguuccggguguacagcagcgccaacaacugcaccuucgaguacgugagccagcccuuccugauggaccuggagggcaagcagggcaacuucaagaaccugcgggaguucguguucaagaacaucgacggcuacuucaagaucuacagcaagcacaccccaaucaaccuggugcgggaucugccccagggcuucucagcccuggagccccugguggaccugcccaucggcaucaacaucacccgguuccagacccugcuggcccugcaccggagcuaccugaccccaggcgacagcagcagcggguggacagcaggcgcggcugcuuacuacgugggcuaccugcagccccggaccuuccugcugaaguacaacgagaacggcaccaucaccgacgccguggacugcgcccuggacccucugagcgagaccaagugcacccugaagagcuucaccguggagaagggcaucuaccagaccagcaacuuccgggugcagcccaccgagagcaucgugcgguuccccaacaucaccaaccugugccccuucggcgagguguucaacgccacccgguucgccagcguguacgccuggaaccggaagcggaucagcaacugcguggccgacuacagcgugcuguacaacagcgccagcuucagcaccuucaagugcuacggcgugagccccaccaagcugaacgaccugugcuucaccaacguguacgccgacagcuucgugauccguggcgacgaggugcggcagaucgcacccggccagacaggcaagaucgccgacuacaacuacaagcugcccgacgacuucaccggcugcgugaucgccuggaacagcaacaaccucgacagcaaggugggcggcaacuacaacuaccuguaccggcuguuccggaagagcaaccugaagcccuucgagcgggacaucagcaccgagaucuaccaagccggcuccaccccuugcaacggcguggagggcuucaacugcuacuucccucugcagagcuacggcuuccagcccaccaacggcgugggcuaccagcccuaccgggugguggugcugagcuucgagcugcugcacgccccagccaccguguguggccccaagaagagcaccaaccuggugaagaacaagugcgugaacuucaacuucaacggccuuaccggcaccggcgugcugaccgagagcaacaagaaauuccugcccuuucagcaguucggccgggacaucgccgacaccaccgacgcugugcgggauccccagacccuggagauccuggacaucaccccuugcagcuucggcggcgugagcgugaucaccccaggcaccaacaccagcaaccagguggccgugcuguaccagggcgugaacugcaccgaggugcccguggccauccacgccgaccagcugacacccaccuggcgggucuacagcaccggcagcaacguguuccagacccgggccgguugccugaucggcgccgagcacgugaacaacagcuacgagugcgacauccccaucggcgccggcaucugugccagcuaccagacccagaccaauucaccccggagggcaaggagcguggccagccagagcaucaucgccuacaccaugagccugggcgccgagaacagcguggccuacagcaacaacagcaucgccauccccaccaacuucaccaucagcgugaccaccgagauucugcccgugagcaugaccaagaccagcguggacugcaccauguacaucugcggcgacagcaccgagugcagcaaccugcugcugcaguacggcagcuucugcacccagcugaaccgggcccugaccggcaucgccguggagcaggacaagaacacccaggagguguucgcccaggugaagcagaucuacaagaccccucccaucaaggacuucggcggcuucaacuucagccagauccugcccgaccccagcaagcccagcaagcggagcuucaucgaggaccugcuguucaacaaggugacccuagccgacgccggcuucaucaagcaguacggcgacugccucggcgacauagccgcccgggaccugaucugcgcccagaaguucaacggccugaccgugcugccuccccugcugaccgacgagaugaucgcccaguacaccagcgcccuguuagccggaaccaucaccagcggcuggacuuucggcgcuggagccgcucugcagauccccuucgccaugcagauggccuaccgguucaacggcaucggcgugacccagaacgugcuguacgagaaccagaagcugaucgccaaccaguucaacagcgccaucggcaagauccaggacagccugagcagcaccgcuagcgcccugggcaagcugcaggacguggugaaccagaacgcccaggcccugaacacccuggugaagcagcugagcagcaacuucggcgccaucagcagcgugcugaacgacauccugagccggcuggacccucccgaggccgaggugcagaucgaccggcugaucacuggccggcugcagagccugcagaccuacgugacccagcagcugauccgggccgccgagauucgggccagcgccaaccuggccgccaccaagaugagcgagugcgugcugggccagagcaagcggguggacuucugcggcaagggcuaccaccugaugagcuuuccccagagcgcaccccacggagugguguuccugcacgugaccuacgugcccgcccaggagaagaacuucaccaccgccccagccaucugccacgacggcaaggcccacuuuccccgggagggcguguucgugagcaacggcacccacugguucgugacccagcggaacuucuacgagccccagaucaucaccaccgacaacaccuucgugagcggcaacugcgacguggugaucggcaucgugaacaacaccguguacgauccccugcagcccgagcuggacagcuucaaggaggagcuggacaaguacuucaagaaucacaccagccccgacguggaccugggcgacaucagcggcaucaacgccagcguggugaacauccagaaggagaucgaucggcugaacgagguggccaagaaccugaacgagagccugaucgaccugcaggagcugggcaaguacgagcaguacaucaaguggcccugguacaucuggcugggcuucaucgccggccugaucgccaucgugauggugaccaucaugcugugcugcaugaccagcugcugcagcugccugaagggcuguugcagcugcggcagcugcugcaaguucgacgaggacgacagcgagcccgugcugaagggcgugaagcugcacuacaccugaugacucgagcugguacugcaugcacgcaaugcuagcugccccuuucccguccuggguaccccgagucucccccgaccucgggucccagguaugcucccaccuccaccugccccacucaccaccucugcuaguuccagacaccucccaagcacgcagcaaugcagcucaaaacgcuuagccuagccacacccccacgggaaacagcagugauuaaccuuuagcaauaaacgaaaguuuaacuaagcuauacuaaccccaggguuggucaauuucgugccagccacacccuggagcuagcaaaaaaaaaaaaaaaaaaaaaaaaaaaaaaaaaaaaaaaaaaaaaaaaaaaaaaaaaaaaaaaaaaaaaaaaaaaaaaaaaaaaaaaaaaaaaaaaaaaa

SEQ ID NO: 26420 - RNA, 4273 nt, Artificial Sequence
  SARS-CoV-2/Wuhan/WIV05/2019__EPI_ISL_402128 spike protein mRNA gc (1-1273)(K986P_V987P_Y453F_D614G)
agaauaaacuaguauucuucugguccccacagacucagagagaacccgccaccauguucguguuccuggugcugcugccccuggugagcagccagugcgugaaccugaccacccggacccagcugccaccagccuacaccaacagcuucacccggggcgucuacuaccccgacaagguguuccggagcagcguccugcacagcacccaggaccuguuccugcccuucuucagcaacgugaccugguuccacgccauccacgugagcggcaccaacggcaccaagcgguucgacaaccccgugcugcccuucaacgacggcguguacuucgccagcaccgagaagagcaacaucauccggggcuggaucuucggcaccacccuggacagcaagacccagagccugcugaucgugaauaacgccaccaacguggugaucaaggugugcgaguuccaguucugcaacgaccccuuccugggcguguacuaccacaagaacaacaagagcuggauggagagcgaguuccggguguacagcagcgccaacaacugcaccuucgaguacgugagccagcccuuccugauggaccuggagggcaagcagggcaacuucaagaaccugcgggaguucguguucaagaacaucgacggcuacuucaagaucuacagcaagcacaccccaaucaaccuggugcgggaucugccccagggcuucucagcccuggagccccugguggaccugcccaucggcaucaacaucacccgguuccagacccugcuggcccugcaccggagcuaccugaccccaggcgacagcagcagcggguggacagcaggcgcggcugcuuacuacgugggcuaccugcagccccggaccuuccugcugaaguacaacgagaacggcaccaucaccgacgccguggacugcgcccuggacccucugagcgagaccaagugcacccugaagagcuucaccguggagaagggcaucuaccagaccagcaacuuccgggugcagcccaccgagagcaucgugcgguuccccaacaucaccaaccugugccccuucggcgagguguucaacgccacccgguucgccagcguguacgccuggaaccggaagcggaucagcaacugcguggccgacuacagcgugcuguacaacagcgccagcuucagcaccuucaagugcuacggcgugagccccaccaagcugaacgaccugugcuucaccaacguguacgccgacagcuucgugauccguggcgacgaggugcggcagaucgcacccggccagacaggcaagaucgccgacuacaacuacaagcugcccgacgacuucaccggcugcgugaucgccuggaacagcaacaaccucgacagcaaggugggcggcaacuacaacuaccuguuccggcuguuccggaagagcaaccugaagcccuucgagcgggacaucagcaccgagaucuaccaagccggcuccaccccuugcaacggcguggagggcuucaacugcuacuucccucugcagagcuacggcuuccagcccaccaacggcgugggcuaccagcccuaccgggugguggugcugagcuucgagcugcugcacgccccagccaccguguguggccccaagaagagcaccaaccuggugaagaacaagugcgugaacuucaacuucaacggccuuaccggcaccggcgugcugaccgagagcaacaagaaauuccugcccuuucagcaguucggccgggacaucgccgacaccaccgacgcugugcgggauccccagacccuggagauccuggacaucaccccuugcagcuucggcggcgugagcgugaucaccccaggcaccaacaccagcaaccagguggccgugcuguaccagggcgugaacugcaccgaggugcccguggccauccacgccgaccagcugacacccaccuggcgggucuacagcaccggcagcaacguguuccagacccgggccgguugccugaucggcgccgagcacgugaacaacagcuacgagugcgacauccccaucggcgccggcaucugugccagcuaccagacccagaccaauucaccccggagggcaaggagcguggccagccagagcaucaucgccuacaccaugagccugggcgccgagaacagcguggccuacagcaacaacagcaucgccauccccaccaacuucaccaucagcgugaccaccgagauucugcccgugagcaugaccaagaccagcguggacugcaccauguacaucugcggcgacagcaccgagugcagcaaccugcugcugcaguacggcagcuucugcacccagcugaaccgggcccugaccggcaucgccguggagcaggacaagaacacccaggagguguucgcccaggugaagcagaucuacaagaccccucccaucaaggacuucggcggcuucaacuucagccagauccugcccgaccccagcaagcccagcaagcggagcuucaucgaggaccugcuguucaacaaggugacccuagccgacgccggcuucaucaagcaguacggcgacugccucggcgacauagccgcccgggaccugaucugcgcccagaaguucaacggccugaccgugcugccuccccugcugaccgacgagaugaucgcccaguacaccagcgcccuguuagccggaaccaucaccagcggcuggacuuucggcgcuggagccgcucugcagauccccuucgccaugcagauggccuaccgguucaacggcaucggcgugacccagaacgugcuguacgagaaccagaagcugaucgccaaccaguucaacagcgccaucggcaagauccaggacagccugagcagcaccgcuagcgcccugggcaagcugcaggacguggugaaccagaacgcccaggcccugaacacccuggugaagcagcugagcagcaacuucggcgccaucagcagcgugcugaacgacauccugagccggcuggacccucccgaggccgaggugcagaucgaccggcugaucacuggccggcugcagagccugcagaccuacgugacccagcagcugauccgggccgccgagauucgggccagcgccaaccuggccgccaccaagaugagcgagugcgugcugggccagagcaagcggguggacuucugcggcaagggcuaccaccugaugagcuuuccccagagcgcaccccacggagugguguuccugcacgugaccuacgugcccgcccaggagaagaacuucaccaccgccccagccaucugccacgacggcaaggcccacuuuccccgggagggcguguucgugagcaacggcacccacugguucgugacccagcggaacuucuacgagccccagaucaucaccaccgacaacaccuucgugagcggcaacugcgacguggugaucggcaucgugaacaacaccguguacgauccccugcagcccgagcuggacagcuucaaggaggagcuggacaaguacuucaagaaucacaccagccccgacguggaccugggcgacaucagcggcaucaacgccagcguggugaacauccagaaggagaucgaucggcugaacgagguggccaagaaccugaacgagagccugaucgaccugcaggagcugggcaaguacgagcaguacaucaaguggcccugguacaucuggcugggcuucaucgccggccugaucgccaucgugauggugaccaucaugcugugcugcaugaccagcugcugcagcugccugaagggcuguugcagcugcggcagcugcugcaaguucgacgaggacgacagcgagcccgugcugaagggcgugaagcugcacuacaccugaugacucgagcugguacugcaugcacgcaaugcuagcugccccuuucccguccuggguaccccgagucucccccgaccucgggucccagguaugcucccaccuccaccugccccacucaccaccucugcuaguuccagacaccucccaagcacgcagcaaugcagcucaaaacgcuuagccuagccacacccccacgggaaacagcagugauuaaccuuuagcaauaaacgaaaguuuaacuaagcuauacuaaccccaggguuggucaauuucgugccagccacacccuggagcuagcaaaaaaaaaaaaaaaaaaaaaaaaaaaaaaaaaaaaaaaaaaaaaaaaaaaaaaaaaaaaaaaaaaaaaaaaaaaaaaaaaaaaaaaaaaaaaaaaaaaa

SEQ ID NO: 26421 - RNA, 4273 nt, Artificial Sequence
  SARS-CoV-2/Wuhan/WIV05/2019__EPI_ISL_402128 spike protein mRNA gc (1-1273)(K986P_V987P_D614G_I692V)
agaauaaacuaguauucuucugguccccacagacucagagagaacccgccaccauguucguguuccuggugcugcugccccuggugagcagccagugcgugaaccugaccacccggacccagcugccaccagccuacaccaacagcuucacccggggcgucuacuaccccgacaagguguuccggagcagcguccugcacagcacccaggaccuguuccugcccuucuucagcaacgugaccugguuccacgccauccacgugagcggcaccaacggcaccaagcgguucgacaaccccgugcugcccuucaacgacggcguguacuucgccagcaccgagaagagcaacaucauccggggcuggaucuucggcaccacccuggacagcaagacccagagccugcugaucgugaauaacgccaccaacguggugaucaaggugugcgaguuccaguucugcaacgaccccuuccugggcguguacuaccacaagaacaacaagagcuggauggagagcgaguuccggguguacagcagcgccaacaacugcaccuucgaguacgugagccagcccuuccugauggaccuggagggcaagcagggcaacuucaagaaccugcgggaguucguguucaagaacaucgacggcuacuucaagaucuacagcaagcacaccccaaucaaccuggugcgggaucugccccagggcuucucagcccuggagccccugguggaccugcccaucggcaucaacaucacccgguuccagacccugcuggcccugcaccggagcuaccugaccccaggcgacagcagcagcggguggacagcaggcgcggcugcuuacuacgugggcuaccugcagccccggaccuuccugcugaaguacaacgagaacggcaccaucaccgacgccguggacugcgcccuggacccucugagcgagaccaagugcacccugaagagcuucaccguggagaagggcaucuaccagaccagcaacuuccgggugcagcccaccgagagcaucgugcgguuccccaacaucaccaaccugugccccuucggcgagguguucaacgccacccgguucgccagcguguacgccuggaaccggaagcggaucagcaacugcguggccgacuacagcgugcuguacaacagcgccagcuucagcaccuucaagugcuacggcgugagccccaccaagcugaacgaccugugcuucaccaacguguacgccgacagcuucgugauccguggcgacgaggugcggcagaucgcacccggccagacaggcaagaucgccgacuacaacuacaagcugcccgacgacuucaccggcugcgugaucgccuggaacagcaacaaccucgacagcaaggugggcggcaacuacaacuaccuguaccggcuguuccggaagagcaaccugaagcccuucgagcgggacaucagcaccgagaucuaccaagccggcuccaccccuugcaacggcguggagggcuucaacugcuacuucccucugcagagcuacggcuuccagcccaccaacggcgugggcuaccagcccuaccgggugguggugcugagcuucgagcugcugcacgccccagccaccguguguggccccaagaagagcaccaaccuggugaagaacaagugcgugaacuucaacuucaacggccuuaccggcaccggcgugcugaccgagagcaacaagaaauuccugcccuuucagcaguucggccgggacaucgccgacaccaccgacgcugugcgggauccccagacccuggagauccuggacaucaccccuugcagcuucggcggcgugagcgugaucaccccaggcaccaacaccagcaaccagguggccgugcuguaccagggcgugaacugcaccgaggugcccguggccauccacgccgaccagcugacacccaccuggcgggucuacagcaccggcagcaacguguuccagacccgggccgguugccugaucggcgccgagcacgugaacaacagcuacgagugcgacauccccaucggcgccggcaucugugccagcuaccagacccagaccaauucaccccggagggcaaggagcguggccagccagagcgugaucgccuacaccaugagccugggcgccgagaacagcguggccuacagcaacaacagcaucgccauccccaccaacuucaccaucagcgugaccaccgagauucugcccgugagcaugaccaagaccagcguggacugcaccauguacaucugcggcgacagcaccgagugcagcaaccugcugcugcaguacggcagcuucugcacccagcugaaccgggcccugaccggcaucgccguggagcaggacaagaacacccaggagguguucgcccaggugaagcagaucuacaagaccccucccaucaaggacuucggcggcuucaacuucagccagauccugcccgaccccagcaagcccagcaagcggagcuucaucgaggaccugcuguucaacaaggugacccuagccgacgccggcuucaucaagcaguacggcgacugccucggcgacauagccgcccgggaccugaucugcgcccagaaguucaacggccugaccgugcugccuccccugcugaccgacgagaugaucgcccaguacaccagcgcccuguuagccggaaccaucaccagcggcuggacuuucggcgcuggagccgcucugcagauccccuucgccaugcagauggccuaccgguucaacggcaucggcgugacccagaacgugcuguacgagaaccagaagcugaucgccaaccaguucaacagcgccaucggcaagauccaggacagccugagcagcaccgcuagcgcccugggcaagcugcaggacguggugaaccagaacgcccaggcccugaacacccuggugaagcagcugagcagcaacuucggcgccaucagcagcgugcugaacgacauccugagccggcuggacccucccgaggccgaggugcagaucgaccggcugaucacuggccggcugcagagccugcagaccuacgugacccagcagcugauccgggccgccgagauucgggccagcgccaaccuggccgccaccaagaugagcgagugcgugcugggccagagcaagcggguggacuucugcggcaagggcuaccaccugaugagcuuuccccagagcgcaccccacggagugguguuccugcacgugaccuacgugcccgcccaggagaagaacuucaccaccgccccagccaucugccacgacggcaaggcccacuuuccccgggagggcguguucgugagcaacggcacccacugguucgugacccagcggaacuucuacgagccccagaucaucaccaccgacaacaccuucgugagcggcaacugcgacguggugaucggcaucgugaacaacaccguguacgauccccugcagcccgagcuggacagcuucaaggaggagcuggacaaguacuucaagaaucacaccagccccgacguggaccugggcgacaucagcggcaucaacgccagcguggugaacauccagaaggagaucgaucggcugaacgagguggccaagaaccugaacgagagccugaucgaccugcaggagcugggcaaguacgagcaguacaucaaguggcccugguacaucuggcugggcuucaucgccggccugaucgccaucgugauggugaccaucaugcugugcugcaugaccagcugcugcagcugccugaagggcuguugcagcugcggcagcugcugcaaguucgacgaggacgacagcgagcccgugcugaagggcgugaagcugcacuacaccugaugacucgagcugguacugcaugcacgcaaugcuagcugccccuuucccguccuggguaccccgagucucccccgaccucgggucccagguaugcucccaccuccaccugccccacucaccaccucugcuaguuccagacaccucccaagcacgcagcaaugcagcucaaaacgcuuagccuagccacacccccacgggaaacagcagugauuaaccuuuagcaauaaacgaaaguuuaacuaagcuauacuaaccccaggguuggucaauuucgugccagccacacccuggagcuagcaaaaaaaaaaaaaaaaaaaaaaaaaaaaaaaaaaaaaaaaaaaaaaaaaaaaaaaaaaaaaaaaaaaaaaaaaaaaaaaaaaaaaaaaaaaaaaaaaaaa

SEQ ID NO: 26422 - RNA, 4273 nt, Artificial Sequence
  SARS-CoV-2/Wuhan/WIV05/2019__EPI_ISL_402128 spike protein mRNA gc (1-1273)(K986P_V987P_D614G_M1229I)
agaauaaacuaguauucuucugguccccacagacucagagagaacccgccaccauguucguguuccuggugcugcugccccuggugagcagccagugcgugaaccugaccacccggacccagcugccaccagccuacaccaacagcuucacccggggcgucuacuaccccgacaagguguuccggagcagcguccugcacagcacccaggaccuguuccugcccuucuucagcaacgugaccugguuccacgccauccacgugagcggcaccaacggcaccaagcgguucgacaaccccgugcugcccuucaacgacggcguguacuucgccagcaccgagaagagcaacaucauccggggcuggaucuucggcaccacccuggacagcaagacccagagccugcugaucgugaauaacgccaccaacguggugaucaaggugugcgaguuccaguucugcaacgaccccuuccugggcguguacuaccacaagaacaacaagagcuggauggagagcgaguuccggguguacagcagcgccaacaacugcaccuucgaguacgugagccagcccuuccugauggaccuggagggcaagcagggcaacuucaagaaccugcgggaguucguguucaagaacaucgacggcuacuucaagaucuacagcaagcacaccccaaucaaccuggugcgggaucugccccagggcuucucagcccuggagccccugguggaccugcccaucggcaucaacaucacccgguuccagacccugcuggcccugcaccggagcuaccugaccccaggcgacagcagcagcggguggacagcaggcgcggcugcuuacuacgugggcuaccugcagccccggaccuuccugcugaaguacaacgagaacggcaccaucaccgacgccguggacugcgcccuggacccucugagcgagaccaagugcacccugaagagcuucaccguggagaagggcaucuaccagaccagcaacuuccgggugcagcccaccgagagcaucgugcgguuccccaacaucaccaaccugugccccuucggcgagguguucaacgccacccgguucgccagcguguacgccuggaaccggaagcggaucagcaacugcguggccgacuacagcgugcuguacaacagcgccagcuucagcaccuucaagugcuacggcgugagccccaccaagcugaacgaccugugcuucaccaacguguacgccgacagcuucgugauccguggcgacgaggugcggcagaucgcacccggccagacaggcaagaucgccgacuacaacuacaagcugcccgacgacuucaccggcugcgugaucgccuggaacagcaacaaccucgacagcaaggugggcggcaacuacaacuaccuguaccggcuguuccggaagagcaaccugaagcccuucgagcgggacaucagcaccgagaucuaccaagccggcuccaccccuugcaacggcguggagggcuucaacugcuacuucccucugcagagcuacggcuuccagcccaccaacggcgugggcuaccagcccuaccgggugguggugcugagcuucgagcugcugcacgccccagccaccguguguggccccaagaagagcaccaaccuggugaagaacaagugcgugaacuucaacuucaacggccuuaccggcaccggcgugcugaccgagagcaacaagaaauuccugcccuuucagcaguucggccgggacaucgccgacaccaccgacgcugugcgggauccccagacccuggagauccuggacaucaccccuugcagcuucggcggcgugagcgugaucaccccaggcaccaacaccagcaaccagguggccgugcuguaccagggcgugaacugcaccgaggugcccguggccauccacgccgaccagcugacacccaccuggcgggucuacagcaccggcagcaacguguuccagacccgggccgguugccugaucggcgccgagcacgugaacaacagcuacgagugcgacauccccaucggcgccggcaucugugccagcuaccagacccagaccaauucaccccggagggcaaggagcguggccagccagagcaucaucgccuacaccaugagccugggcgccgagaacagcguggccuacagcaacaacagcaucgccauccccaccaacuucaccaucagcgugaccaccgagauucugcccgugagcaugaccaagaccagcguggacugcaccauguacaucugcggcgacagcaccgagugcagcaaccugcugcugcaguacggcagcuucugcacccagcugaaccgggcccugaccggcaucgccguggagcaggacaagaacacccaggagguguucgcccaggugaagcagaucuacaagaccccucccaucaaggacuucggcggcuucaacuucagccagauccugcccgaccccagcaagcccagcaagcggagcuucaucgaggaccugcuguucaacaaggugacccuagccgacgccggcuucaucaagcaguacggcgacugccucggcgacauagccgcccgggaccugaucugcgcccagaaguucaacggccugaccgugcugccuccccugcugaccgacgagaugaucgcccaguacaccagcgcccuguuagccggaaccaucaccagcggcuggacuuucggcgcuggagccgcucugcagauccccuucgccaugcagauggccuaccgguucaacggcaucggcgugacccagaacgugcuguacgagaaccagaagcugaucgccaaccaguucaacagcgccaucggcaagauccaggacagccugagcagcaccgcuagcgcccugggcaagcugcaggacguggugaaccagaacgcccaggcccugaacacccuggugaagcagcugagcagcaacuucggcgccaucagcagcgugcugaacgacauccugagccggcuggacccucccgaggccgaggugcagaucgaccggcugaucacuggccggcugcagagccugcagaccuacgugacccagcagcugauccgggccgccgagauucgggccagcgccaaccuggccgccaccaagaugagcgagugcgugcugggccagagcaagcggguggacuucugcggcaagggcuaccaccugaugagcuuuccccagagcgcaccccacggagugguguuccugcacgugaccuacgugcccgcccaggagaagaacuucaccaccgccccagccaucugccacgacggcaaggcccacuuuccccgggagggcguguucgugagcaacggcacccacugguucgugacccagcggaacuucuacgagccccagaucaucaccaccgacaacaccuucgugagcggcaacugcgacguggugaucggcaucgugaacaacaccguguacgauccccugcagcccgagcuggacagcuucaaggaggagcuggacaaguacuucaagaaucacaccagccccgacguggaccugggcgacaucagcggcaucaacgccagcguggugaacauccagaaggagaucgaucggcugaacgagguggccaagaaccugaacgagagccugaucgaccugcaggagcugggcaaguacgagcaguacaucaaguggcccugguacaucuggcugggcuucaucgccggccugaucgccaucgugaucgugaccaucaugcugugcugcaugaccagcugcugcagcugccugaagggcuguugcagcugcggcagcugcugcaaguucgacgaggacgacagcgagcccgugcugaagggcgugaagcugcacuacaccugaugacucgagcugguacugcaugcacgcaaugcuagcugccccuuucccguccuggguaccccgagucucccccgaccucgggucccagguaugcucccaccuccaccugccccacucaccaccucugcuaguuccagacaccucccaagcacgcagcaaugcagcucaaaacgcuuagccuagccacacccccacgggaaacagcagugauuaaccuuuagcaauaaacgaaaguuuaacuaagcuauacuaaccccaggguuggucaauuucgugccagccacacccuggagcuagcaaaaaaaaaaaaaaaaaaaaaaaaaaaaaaaaaaaaaaaaaaaaaaaaaaaaaaaaaaaaaaaaaaaaaaaaaaaaaaaaaaaaaaaaaaaaaaaaaaaa

SEQ ID NO: 26423 - RNA, 4267 nt, Artificial Sequence
  SARS-CoV-2/Wuhan/WIV05/2019__EPI_ISL_402128 spike protein mRNA gc (1-1273)(K986P_V987P_H69del_V70del_A222V_Y453F_S477N_D614G_I692V)
agaauaaacuaguauucuucugguccccacagacucagagagaacccgccaccauguucguguuccuggugcugcugccccuggugagcagccagugcgugaaccugaccacccggacccagcugccaccagccuacaccaacagcuucacccggggcgucuacuaccccgacaagguguuccggagcagcguccugcacagcacccaggaccuguuccugcccuucuucagcaacgugaccugguuccacgccaucagcggcaccaacggcaccaagcgguucgacaaccccgugcugcccuucaacgacggcguguacuucgccagcaccgagaagagcaacaucauccggggcuggaucuucggcaccacccuggacagcaagacccagagccugcugaucgugaauaacgccaccaacguggugaucaaggugugcgaguuccaguucugcaacgaccccuuccugggcguguacuaccacaagaacaacaagagcuggauggagagcgaguuccggguguacagcagcgccaacaacugcaccuucgaguacgugagccagcccuuccugauggaccuggagggcaagcagggcaacuucaagaaccugcgggaguucguguucaagaacaucgacggcuacuucaagaucuacagcaagcacaccccaaucaaccuggugcgggaucugccccagggcuucucagugcuggagccccugguggaccugcccaucggcaucaacaucacccgguuccagacccugcuggcccugcaccggagcuaccugaccccaggcgacagcagcagcggguggacagcaggcgcggcugcuuacuacgugggcuaccugcagccccggaccuuccugcugaaguacaacgagaacggcaccaucaccgacgccguggacugcgcccuggacccucugagcgagaccaagugcacccugaagagcuucaccguggagaagggcaucuaccagaccagcaacuuccgggugcagcccaccgagagcaucgugcgguuccccaacaucaccaaccugugccccuucggcgagguguucaacgccacccgguucgccagcguguacgccuggaaccggaagcggaucagcaacugcguggccgacuacagcgugcuguacaacagcgccagcuucagcaccuucaagugcuacggcgugagccccaccaagcugaacgaccugugcuucaccaacguguacgccgacagcuucgugauccguggcgacgaggugcggcagaucgcacccggccagacaggcaagaucgccgacuacaacuacaagcugcccgacgacuucaccggcugcgugaucgccuggaacagcaacaaccucgacagcaaggugggcggcaacuacaacuaccuguuccggcuguuccggaagagcaaccugaagcccuucgagcgggacaucagcaccgagaucuaccaagccggcaacaccccuugcaacggcguggagggcuucaacugcuacuucccucugcagagcuacggcuuccagcccaccaacggcgugggcuaccagcccuaccgggugguggugcugagcuucgagcugcugcacgccccagccaccguguguggccccaagaagagcaccaaccuggugaagaacaagugcgugaacuucaacuucaacggccuuaccggcaccggcgugcugaccgagagcaacaagaaauuccugcccuuucagcaguucggccgggacaucgccgacaccaccgacgcugugcgggauccccagacccuggagauccuggacaucaccccuugcagcuucggcggcgugagcgugaucaccccaggcaccaacaccagcaaccagguggccgugcuguaccagggcgugaacugcaccgaggugcccguggccauccacgccgaccagcugacacccaccuggcgggucuacagcaccggcagcaacguguuccagacccgggccgguugccugaucggcgccgagcacgugaacaacagcuacgagugcgacauccccaucggcgccggcaucugugccagcuaccagacccagaccaauucaccccggagggcaaggagcguggccagccagagcgugaucgccuacaccaugagccugggcgccgagaacagcguggccuacagcaacaacagcaucgccauccccaccaacuucaccaucagcgugaccaccgagauucugcccgugagcaugaccaagaccagcguggacugcaccauguacaucugcggcgacagcaccgagugcagcaaccugcugcugcaguacggcagcuucugcacccagcugaaccgggcccugaccggcaucgccguggagcaggacaagaacacccaggagguguucgcccaggugaagcagaucuacaagaccccucccaucaaggacuucggcggcuucaacuucagccagauccugcccgaccccagcaagcccagcaagcggagcuucaucgaggaccugcuguucaacaaggugacccuagccgacgccggcuucaucaagcaguacggcgacugccucggcgacauagccgcccgggaccugaucugcgcccagaaguucaacggccugaccgugcugccuccccugcugaccgacgagaugaucgcccaguacaccagcgcccuguuagccggaaccaucaccagcggcuggacuuucggcgcuggagccgcucugcagauccccuucgccaugcagauggccuaccgguucaacggcaucggcgugacccagaacgugcuguacgagaaccagaagcugaucgccaaccaguucaacagcgccaucggcaagauccaggacagccugagcagcaccgcuagcgcccugggcaagcugcaggacguggugaaccagaacgcccaggcccugaacacccuggugaagcagcugagcagcaacuucggcgccaucagcagcgugcugaacgacauccugagccggcuggacccucccgaggccgaggugcagaucgaccggcugaucacuggccggcugcagagccugcagaccuacgugacccagcagcugauccgggccgccgagauucgggccagcgccaaccuggccgccaccaagaugagcgagugcgugcugggccagagcaagcggguggacuucugcggcaagggcuaccaccugaugagcuuuccccagagcgcaccccacggagugguguuccugcacgugaccuacgugcccgcccaggagaagaacuucaccaccgccccagccaucugccacgacggcaaggcccacuuuccccgggagggcguguucgugagcaacggcacccacugguucgugacccagcggaacuucuacgagccccagaucaucaccaccgacaacaccuucgugagcggcaacugcgacguggugaucggcaucgugaacaacaccguguacgauccccugcagcccgagcuggacagcuucaaggaggagcuggacaaguacuucaagaaucacaccagccccgacguggaccugggcgacaucagcggcaucaacgccagcguggugaacauccagaaggagaucgaucggcugaacgagguggccaagaaccugaacgagagccugaucgaccugcaggagcugggcaaguacgagcaguacaucaaguggcccugguacaucuggcugggcuucaucgccggccugaucgccaucgugauggugaccaucaugcugugcugcaugaccagcugcugcagcugccugaagggcuguugcagcugcggcagcugcugcaaguucgacgaggacgacagcgagcccgugcugaagggcgugaagcugcacuacaccugaugacucgagcugguacugcaugcacgcaaugcuagcugccccuuucccguccuggguaccccgagucucccccgaccucgggucccagguaugcucccaccuccaccugccccacucaccaccucugcuaguuccagacaccucccaagcacgcagcaaugcagcucaaaacgcuuagccuagccacacccccacgggaaacagcagugauuaaccuuuagcaauaaacgaaaguuuaacuaagcuauacuaaccccaggguuggucaauuucgugccagccacacccuggagcuagcaaaaaaaaaaaaaaaaaaaaaaaaaaaaaaaaaaaaaaaaaaaaaaaaaaaaaaaaaaaaaaaaaaaaaaaaaaaaaaaaaaaaaaaaaaaaaaaaaaaa

SEQ ID NO: 26424 - RNA, 4267 nt, Artificial Sequence
  SARS-CoV-2/Wuhan/WIV05/2019__EPI_ISL_402128 spike protein mRNA gc (1-1273)(K986P_V987P_H69del_V70del_Y453F_D614G_I692V_M1229I)
agaauaaacuaguauucuucugguccccacagacucagagagaacccgccaccauguucguguuccuggugcugcugccccuggugagcagccagugcgugaaccugaccacccggacccagcugccaccagccuacaccaacagcuucacccggggcgucuacuaccccgacaagguguuccggagcagcguccugcacagcacccaggaccuguuccugcccuucuucagcaacgugaccugguuccacgccaucagcggcaccaacggcaccaagcgguucgacaaccccgugcugcccuucaacgacggcguguacuucgccagcaccgagaagagcaacaucauccggggcuggaucuucggcaccacccuggacagcaagacccagagccugcugaucgugaauaacgccaccaacguggugaucaaggugugcgaguuccaguucugcaacgaccccuuccugggcguguacuaccacaagaacaacaagagcuggauggagagcgaguuccggguguacagcagcgccaacaacugcaccuucgaguacgugagccagcccuuccugauggaccuggagggcaagcagggcaacuucaagaaccugcgggaguucguguucaagaacaucgacggcuacuucaagaucuacagcaagcacaccccaaucaaccuggugcgggaucugccccagggcuucucagcccuggagccccugguggaccugcccaucggcaucaacaucacccgguuccagacccugcuggcccugcaccggagcuaccugaccccaggcgacagcagcagcggguggacagcaggcgcggcugcuuacuacgugggcuaccugcagccccggaccuuccugcugaaguacaacgagaacggcaccaucaccgacgccguggacugcgcccuggacccucugagcgagaccaagugcacccugaagagcuucaccguggagaagggcaucuaccagaccagcaacuuccgggugcagcccaccgagagcaucgugcgguuccccaacaucaccaaccugugccccuucggcgagguguucaacgccacccgguucgccagcguguacgccuggaaccggaagcggaucagcaacugcguggccgacuacagcgugcuguacaacagcgccagcuucagcaccuucaagugcuacggcgugagccccaccaagcugaacgaccugugcuucaccaacguguacgccgacagcuucgugauccguggcgacgaggugcggcagaucgcacccggccagacaggcaagaucgccgacuacaacuacaagcugcccgacgacuucaccggcugcgugaucgccuggaacagcaacaaccucgacagcaaggugggcggcaacuacaacuaccuguuccggcuguuccggaagagcaaccugaagcccuucgagcgggacaucagcaccgagaucuaccaagccggcuccaccccuugcaacggcguggagggcuucaacugcuacuucccucugcagagcuacggcuuccagcccaccaacggcgugggcuaccagcccuaccgggugguggugcugagcuucgagcugcugcacgccccagccaccguguguggccccaagaagagcaccaaccuggugaagaacaagugcgugaacuucaacuucaacggccuuaccggcaccggcgugcugaccgagagcaacaagaaauuccugcccuuucagcaguucggccgggacaucgccgacaccaccgacgcugugcgggauccccagacccuggagauccuggacaucaccccuugcagcuucggcggcgugagcgugaucaccccaggcaccaacaccagcaaccagguggccgugcuguaccagggcgugaacugcaccgaggugcccguggccauccacgccgaccagcugacacccaccuggcgggucuacagcaccggcagcaacguguuccagacccgggccgguugccugaucggcgccgagcacgugaacaacagcuacgagugcgacauccccaucggcgccggcaucugugccagcuaccagacccagaccaauucaccccggagggcaaggagcguggccagccagagcgugaucgccuacaccaugagccugggcgccgagaacagcguggccuacagcaacaacagcaucgccauccccaccaacuucaccaucagcgugaccaccgagauucugcccgugagcaugaccaagaccagcguggacugcaccauguacaucugcggcgacagcaccgagugcagcaaccugcugcugcaguacggcagcuucugcacccagcugaaccgggcccugaccggcaucgccguggagcaggacaagaacacccaggagguguucgcccaggugaagcagaucuacaagaccccucccaucaaggacuucggcggcuucaacuucagccagauccugcccgaccccagcaagcccagcaagcggagcuucaucgaggaccugcuguucaacaaggugacccuagccgacgccggcuucaucaagcaguacggcgacugccucggcgacauagccgcccgggaccugaucugcgcccagaaguucaacggccugaccgugcugccuccccugcugaccgacgagaugaucgcccaguacaccagcgcccuguuagccggaaccaucaccagcggcuggacuuucggcgcuggagccgcucugcagauccccuucgccaugcagauggccuaccgguucaacggcaucggcgugacccagaacgugcuguacgagaaccagaagcugaucgccaaccaguucaacagcgccaucggcaagauccaggacagccugagcagcaccgcuagcgcccugggcaagcugcaggacguggugaaccagaacgcccaggcccugaacacccuggugaagcagcugagcagcaacuucggcgccaucagcagcgugcugaacgacauccugagccggcuggacccucccgaggccgaggugcagaucgaccggcugaucacuggccggcugcagagccugcagaccuacgugacccagcagcugauccgggccgccgagauucgggccagcgccaaccuggccgccaccaagaugagcgagugcgugcugggccagagcaagcggguggacuucugcggcaagggcuaccaccugaugagcuuuccccagagcgcaccccacggagugguguuccugcacgugaccuacgugcccgcccaggagaagaacuucaccaccgccccagccaucugccacgacggcaaggcccacuuuccccgggagggcguguucgugagcaacggcacccacugguucgugacccagcggaacuucuacgagccccagaucaucaccaccgacaacaccuucgugagcggcaacugcgacguggugaucggcaucgugaacaacaccguguacgauccccugcagcccgagcuggacagcuucaaggaggagcuggacaaguacuucaagaaucacaccagccccgacguggaccugggcgacaucagcggcaucaacgccagcguggugaacauccagaaggagaucgaucggcugaacgagguggccaagaaccugaacgagagccugaucgaccugcaggagcugggcaaguacgagcaguacaucaaguggcccugguacaucuggcugggcuucaucgccggccugaucgccaucgugaucgugaccaucaugcugugcugcaugaccagcugcugcagcugccugaagggcuguugcagcugcggcagcugcugcaaguucgacgaggacgacagcgagcccgugcugaagggcgugaagcugcacuacaccugaugacucgagcugguacugcaugcacgcaaugcuagcugccccuuucccguccuggguaccccgagucucccccgaccucgggucccagguaugcucccaccuccaccugccccacucaccaccucugcuaguuccagacaccucccaagcacgcagcaaugcagcucaaaacgcuuagccuagccacacccccacgggaaacagcagugauuaaccuuuagcaauaaacgaaaguuuaacuaagcuauacuaaccccaggguuggucaauuucgugccagccacacccuggagcuagcaaaaaaaaaaaaaaaaaaaaaaaaaaaaaaaaaaaaaaaaaaaaaaaaaaaaaaaaaaaaaaaaaaaaaaaaaaaaaaaaaaaaaaaaaaaaaaaaaaaa

SEQ ID NO: 26425 - RNA, 4264 nt, Artificial Sequence
  SARS-CoV-2/Wuhan/WIV05/2019__EPI_ISL_402128 spike protein mRNA gc (1-1273)(K986P_V987P_K986P_V987P_H69del_V70del_Y144del_N501Y_A570 D_D614G_P681H_T716I_S982A_D1118H)
agaauaaacuaguauucuucugguccccacagacucagagagaacccgccaccauguucguguuccuggugcugcugccccuggugagcagccagugcgugaaccugaccacccggacccagcugccaccagccuacaccaacagcuucacccggggcgucuacuaccccgacaagguguuccggagcagcguccugcacagcacccaggaccuguuccugcccuucuucagcaacgugaccugguuccacgccaucagcggcaccaacggcaccaagcgguucgacaaccccgugcugcccuucaacgacggcguguacuucgccagcaccgagaagagcaacaucauccggggcuggaucuucggcaccacccuggacagcaagacccagagccugcugaucgugaauaacgccaccaacguggugaucaaggugugcgaguuccaguucugcaacgaccccuuccugggcguguaccacaagaacaacaagagcuggauggagagcgaguuccggguguacagcagcgccaacaacugcaccuucgaguacgugagccagcccuuccugauggaccuggagggcaagcagggcaacuucaagaaccugcgggaguucguguucaagaacaucgacggcuacuucaagaucuacagcaagcacaccccaaucaaccuggugcgggaucugccccagggcuucucagcccuggagccccugguggaccugcccaucggcaucaacaucacccgguuccagacccugcuggcccugcaccggagcuaccugaccccaggcgacagcagcagcggguggacagcaggcgcggcugcuuacuacgugggcuaccugcagccccggaccuuccugcugaaguacaacgagaacggcaccaucaccgacgccguggacugcgcccuggacccucugagcgagaccaagugcacccugaagagcuucaccguggagaagggcaucuaccagaccagcaacuuccgggugcagcccaccgagagcaucgugcgguuccccaacaucaccaaccugugccccuucggcgagguguucaacgccacccgguucgccagcguguacgccuggaaccggaagcggaucagcaacugcguggccgacuacagcgugcuguacaacagcgccagcuucagcaccuucaagugcuacggcgugagccccaccaagcugaacgaccugugcuucaccaacguguacgccgacagcuucgugauccguggcgacgaggugcggcagaucgcacccggccagacaggcaagaucgccgacuacaacuacaagcugcccgacgacuucaccggcugcgugaucgccuggaacagcaacaaccucgacagcaaggugggcggcaacuacaacuaccuguaccggcuguuccggaagagcaaccugaagcccuucgagcgggacaucagcaccgagaucuaccaagccggcuccaccccuugcaacggcguggagggcuucaacugcuacuucccucugcagagcuacggcuuccagcccaccuacggcgugggcuaccagcccuaccgggugguggugcugagcuucgagcugcugcacgccccagccaccguguguggccccaagaagagcaccaaccuggugaagaacaagugcgugaacuucaacuucaacggccuuaccggcaccggcgugcugaccgagagcaacaagaaauuccugcccuuucagcaguucggccgggacaucgacgacaccaccgacgcugugcgggauccccagacccuggagauccuggacaucaccccuugcagcuucggcggcgugagcgugaucaccccaggcaccaacaccagcaaccagguggccgugcuguaccagggcgugaacugcaccgaggugcccguggccauccacgccgaccagcugacacccaccuggcgggucuacagcaccggcagcaacguguuccagacccgggccgguugccugaucggcgccgagcacgugaacaacagcuacgagugcgacauccccaucggcgccggcaucugugccagcuaccagacccagaccaauucacaccggagggcaaggagcguggccagccagagcaucaucgccuacaccaugagccugggcgccgagaacagcguggccuacagcaacaacagcaucgccauccccaucaacuucaccaucagcgugaccaccgagauucugcccgugagcaugaccaagaccagcguggacugcaccauguacaucugcggcgacagcaccgagugcagcaaccugcugcugcaguacggcagcuucugcacccagcugaaccgggcccugaccggcaucgccguggagcaggacaagaacacccaggagguguucgcccaggugaagcagaucuacaagaccccucccaucaaggacuucggcggcuucaacuucagccagauccugcccgaccccagcaagcccagcaagcggagcuucaucgaggaccugcuguucaacaaggugacccuagccgacgccggcuucaucaagcaguacggcgacugccucggcgacauagccgcccgggaccugaucugcgcccagaaguucaacggccugaccgugcugccuccccugcugaccgacgagaugaucgcccaguacaccagcgcccuguuagccggaaccaucaccagcggcuggacuuucggcgcuggagccgcucugcagauccccuucgccaugcagauggccuaccgguucaacggcaucggcgugacccagaacgugcuguacgagaaccagaagcugaucgccaaccaguucaacagcgccaucggcaagauccaggacagccugagcagcaccgcuagcgcccugggcaagcugcaggacguggugaaccagaacgcccaggcccugaacacccuggugaagcagcugagcagcaacuucggcgccaucagcagcgugcugaacgacauccuggcccggcuggacccucccgaggccgaggugcagaucgaccggcugaucacuggccggcugcagagccugcagaccuacgugacccagcagcugauccgggccgccgagauucgggccagcgccaaccuggccgccaccaagaugagcgagugcgugcugggccagagcaagcggguggacuucugcggcaagggcuaccaccugaugagcuuuccccagagcgcaccccacggagugguguuccugcacgugaccuacgugcccgcccaggagaagaacuucaccaccgccccagccaucugccacgacggcaaggcccacuuuccccgggagggcguguucgugagcaacggcacccacugguucgugacccagcggaacuucuacgagccccagaucaucaccacccacaacaccuucgugagcggcaacugcgacguggugaucggcaucgugaacaacaccguguacgauccccugcagcccgagcuggacagcuucaaggaggagcuggacaaguacuucaagaaucacaccagccccgacguggaccugggcgacaucagcggcaucaacgccagcguggugaacauccagaaggagaucgaucggcugaacgagguggccaagaaccugaacgagagccugaucgaccugcaggagcugggcaaguacgagcaguacaucaaguggcccugguacaucuggcugggcuucaucgccggccugaucgccaucgugauggugaccaucaugcugugcugcaugaccagcugcugcagcugccugaagggcuguugcagcugcggcagcugcugcaaguucgacgaggacgacagcgagcccgugcugaagggcgugaagcugcacuacaccugaugacucgagcugguacugcaugcacgcaaugcuagcugccccuuucccguccuggguaccccgagucucccccgaccucgggucccagguaugcucccaccuccaccugccccacucaccaccucugcuaguuccagacaccucccaagcacgcagcaaugcagcucaaaacgcuuagccuagccacacccccacgggaaacagcagugauuaaccuuuagcaauaaacgaaaguuuaacuaagcuauacuaaccccaggguuggucaauuucgugccagccacacccuggagcuagcaaaaaaaaaaaaaaaaaaaaaaaaaaaaaaaaaaaaaaaaaaaaaaaaaaaaaaaaaaaaaaaaaaaaaaaaaaaaaaaaaaaaaaaaaaaaaaaaaaaa

SEQ ID NO: 26426 - RNA, 4273 nt, Artificial Sequence
  SARS-CoV-2/Wuhan/WIV05/2019__EPI_ISL_402128 spike protein mRNA gc (1-1273)(K986P_V987P_K986P_V987P_K417N_E484K_N501Y_D614G)
agaauaaacuaguauucuucugguccccacagacucagagagaacccgccaccauguucguguuccuggugcugcugccccuggugagcagccagugcgugaaccugaccacccggacccagcugccaccagccuacaccaacagcuucacccggggcgucuacuaccccgacaagguguuccggagcagcguccugcacagcacccaggaccuguuccugcccuucuucagcaacgugaccugguuccacgccauccacgugagcggcaccaacggcaccaagcgguucgacaaccccgugcugcccuucaacgacggcguguacuucgccagcaccgagaagagcaacaucauccggggcuggaucuucggcaccacccuggacagcaagacccagagccugcugaucgugaauaacgccaccaacguggugaucaaggugugcgaguuccaguucugcaacgaccccuuccugggcguguacuaccacaagaacaacaagagcuggauggagagcgaguuccggguguacagcagcgccaacaacugcaccuucgaguacgugagccagcccuuccugauggaccuggagggcaagcagggcaacuucaagaaccugcgggaguucguguucaagaacaucgacggcuacuucaagaucuacagcaagcacaccccaaucaaccuggugcgggaucugccccagggcuucucagcccuggagccccugguggaccugcccaucggcaucaacaucacccgguuccagacccugcuggcccugcaccggagcuaccugaccccaggcgacagcagcagcggguggacagcaggcgcggcugcuuacuacgugggcuaccugcagccccggaccuuccugcugaaguacaacgagaacggcaccaucaccgacgccguggacugcgcccuggacccucugagcgagaccaagugcacccugaagagcuucaccguggagaagggcaucuaccagaccagcaacuuccgggugcagcccaccgagagcaucgugcgguuccccaacaucaccaaccugugccccuucggcgagguguucaacgccacccgguucgccagcguguacgccuggaaccggaagcggaucagcaacugcguggccgacuacagcgugcuguacaacagcgccagcuucagcaccuucaagugcuacggcgugagccccaccaagcugaacgaccugugcuucaccaacguguacgccgacagcuucgugauccguggcgacgaggugcggcagaucgcacccggccagacaggcaacaucgccgacuacaacuacaagcugcccgacgacuucaccggcugcgugaucgccuggaacagcaacaaccucgacagcaaggugggcggcaacuacaacuaccuguaccggcuguuccggaagagcaaccugaagcccuucgagcgggacaucagcaccgagaucuaccaagccggcuccaccccuugcaacggcgugaagggcuucaacugcuacuucccucugcagagcuacggcuuccagcccaccuacggcgugggcuaccagcccuaccgggugguggugcugagcuucgagcugcugcacgccccagccaccguguguggccccaagaagagcaccaaccuggugaagaacaagugcgugaacuucaacuucaacggccuuaccggcaccggcgugcugaccgagagcaacaagaaauuccugcccuuucagcaguucggccgggacaucgccgacaccaccgacgcugugcgggauccccagacccuggagauccuggacaucaccccuugcagcuucggcggcgugagcgugaucaccccaggcaccaacaccagcaaccagguggccgugcuguaccagggcgugaacugcaccgaggugcccguggccauccacgccgaccagcugacacccaccuggcgggucuacagcaccggcagcaacguguuccagacccgggccgguugccugaucggcgccgagcacgugaacaacagcuacgagugcgacauccccaucggcgccggcaucugugccagcuaccagacccagaccaauucaccccggagggcaaggagcguggccagccagagcaucaucgccuacaccaugagccugggcgccgagaacagcguggccuacagcaacaacagcaucgccauccccaccaacuucaccaucagcgugaccaccgagauucugcccgugagcaugaccaagaccagcguggacugcaccauguacaucugcggcgacagcaccgagugcagcaaccugcugcugcaguacggcagcuucugcacccagcugaaccgggcccugaccggcaucgccguggagcaggacaagaacacccaggagguguucgcccaggugaagcagaucuacaagaccccucccaucaaggacuucggcggcuucaacuucagccagauccugcccgaccccagcaagcccagcaagcggagcuucaucgaggaccugcuguucaacaaggugacccuagccgacgccggcuucaucaagcaguacggcgacugccucggcgacauagccgcccgggaccugaucugcgcccagaaguucaacggccugaccgugcugccuccccugcugaccgacgagaugaucgcccaguacaccagcgcccuguuagccggaaccaucaccagcggcuggacuuucggcgcuggagccgcucugcagauccccuucgccaugcagauggccuaccgguucaacggcaucggcgugacccagaacgugcuguacgagaaccagaagcugaucgccaaccaguucaacagcgccaucggcaagauccaggacagccugagcagcaccgcuagcgcccugggcaagcugcaggacguggugaaccagaacgcccaggcccugaacacccuggugaagcagcugagcagcaacuucggcgccaucagcagcgugcugaacgacauccugagccggcuggacccucccgaggccgaggugcagaucgaccggcugaucacuggccggcugcagagccugcagaccuacgugacccagcagcugauccgggccgccgagauucgggccagcgccaaccuggccgccaccaagaugagcgagugcgugcugggccagagcaagcggguggacuucugcggcaagggcuaccaccugaugagcuuuccccagagcgcaccccacggagugguguuccugcacgugaccuacgugcccgcccaggagaagaacuucaccaccgccccagccaucugccacgacggcaaggcccacuuuccccgggagggcguguucgugagcaacggcacccacugguucgugacccagcggaacuucuacgagccccagaucaucaccaccgacaacaccuucgugagcggcaacugcgacguggugaucggcaucgugaacaacaccguguacgauccccugcagcccgagcuggacagcuucaaggaggagcuggacaaguacuucaagaaucacaccagccccgacguggaccugggcgacaucagcggcaucaacgccagcguggugaacauccagaaggagaucgaucggcugaacgagguggccaagaaccugaacgagagccugaucgaccugcaggagcugggcaaguacgagcaguacaucaaguggcccugguacaucuggcugggcuucaucgccggccugaucgccaucgugauggugaccaucaugcugugcugcaugaccagcugcugcagcugccugaagggcuguugcagcugcggcagcugcugcaaguucgacgaggacgacagcgagcccgugcugaagggcgugaagcugcacuacaccugaugacucgagcugguacugcaugcacgcaaugcuagcugccccuuucccguccuggguaccccgagucucccccgaccucgggucccagguaugcucccaccuccaccugccccacucaccaccucugcuaguuccagacaccucccaagcacgcagcaaugcagcucaaaacgcuuagccuagccacacccccacgggaaacagcagugauuaaccuuuagcaauaaacgaaaguuuaacuaagcuauacuaaccccaggguuggucaauuucgugccagccacacccuggagcuagcaaaaaaaaaaaaaaaaaaaaaaaaaaaaaaaaaaaaaaaaaaaaaaaaaaaaaaaaaaaaaaaaaaaaaaaaaaaaaaaaaaaaaaaaaaaaaaaaaaaa

SEQ ID NO: 26427 - RNA, 4264 nt, Artificial Sequence
  SARS-CoV-2/Wuhan/WIV05/2019__EPI_ISL_402128 spike protein mRNA gc (1-1273)(K986P_V987P_K986P_V987P_L18F_D80A_D215G_L242del_A243del_ L244del_R246I_K417N_E484K_N501Y_D614G_A701V)
agaauaaacuaguauucuucugguccccacagacucagagagaacccgccaccauguucguguuccuggugcugcugccccuggugagcagccagugcgugaacuucaccacccggacccagcugccaccagccuacaccaacagcuucacccggggcgucuacuaccccgacaagguguuccggagcagcguccugcacagcacccaggaccuguuccugcccuucuucagcaacgugaccugguuccacgccauccacgugagcggcaccaacggcaccaagcgguucgccaaccccgugcugcccuucaacgacggcguguacuucgccagcaccgagaagagcaacaucauccggggcuggaucuucggcaccacccuggacagcaagacccagagccugcugaucgugaauaacgccaccaacguggugaucaaggugugcgaguuccaguucugcaacgaccccuuccugggcguguacuaccacaagaacaacaagagcuggauggagagcgaguuccggguguacagcagcgccaacaacugcaccuucgaguacgugagccagcccuuccugauggaccuggagggcaagcagggcaacuucaagaaccugcgggaguucguguucaagaacaucgacggcuacuucaagaucuacagcaagcacaccccaaucaaccuggugcggggccugccccagggcuucucagcccuggagccccugguggaccugcccaucggcaucaacaucacccgguuccagacccugcacaucagcuaccugaccccaggcgacagcagcagcggguggacagcaggcgcggcugcuuacuacgugggcuaccugcagccccggaccuuccugcugaaguacaacgagaacggcaccaucaccgacgccguggacugcgcccuggacccucugagcgagaccaagugcacccugaagagcuucaccguggagaagggcaucuaccagaccagcaacuuccgggugcagcccaccgagagcaucgugcgguuccccaacaucaccaaccugugccccuucggcgagguguucaacgccacccgguucgccagcguguacgccuggaaccggaagcggaucagcaacugcguggccgacuacagcgugcuguacaacagcgccagcuucagcaccuucaagugcuacggcgugagccccaccaagcugaacgaccugugcuucaccaacguguacgccgacagcuucgugauccguggcgacgaggugcggcagaucgcacccggccagacaggcaacaucgccgacuacaacuacaagcugcccgacgacuucaccggcugcgugaucgccuggaacagcaacaaccucgacagcaaggugggcggcaacuacaacuaccuguaccggcuguuccggaagagcaaccugaagcccuucgagcgggacaucagcaccgagaucuaccaagccggcuccaccccuugcaacggcgugaagggcuucaacugcuacuucccucugcagagcuacggcuuccagcccaccuacggcgugggcuaccagcccuaccgggugguggugcugagcuucgagcugcugcacgccccagccaccguguguggccccaagaagagcaccaaccuggugaagaacaagugcgugaacuucaacuucaacggccuuaccggcaccggcgugcugaccgagagcaacaagaaauuccugcccuuucagcaguucggccgggacaucgccgacaccaccgacgcugugcgggauccccagacccuggagauccuggacaucaccccuugcagcuucggcggcgugagcgugaucaccccaggcaccaacaccagcaaccagguggccgugcuguaccagggcgugaacugcaccgaggugcccguggccauccacgccgaccagcugacacccaccuggcgggucuacagcaccggcagcaacguguuccagacccgggccgguugccugaucggcgccgagcacgugaacaacagcuacgagugcgacauccccaucggcgccggcaucugugccagcuaccagacccagaccaauucaccccggagggcaaggagcguggccagccagagcaucaucgccuacaccaugagccugggcguggagaacagcguggccuacagcaacaacagcaucgccauccccaccaacuucaccaucagcgugaccaccgagauucugcccgugagcaugaccaagaccagcguggacugcaccauguacaucugcggcgacagcaccgagugcagcaaccugcugcugcaguacggcagcuucugcacccagcugaaccgggcccugaccggcaucgccguggagcaggacaagaacacccaggagguguucgcccaggugaagcagaucuacaagaccccucccaucaaggacuucggcggcuucaacuucagccagauccugcccgaccccagcaagcccagcaagcggagcuucaucgaggaccugcuguucaacaaggugacccuagccgacgccggcuucaucaagcaguacggcgacugccucggcgacauagccgcccgggaccugaucugcgcccagaaguucaacggccugaccgugcugccuccccugcugaccgacgagaugaucgcccaguacaccagcgcccuguuagccggaaccaucaccagcggcuggacuuucggcgcuggagccgcucugcagauccccuucgccaugcagauggccuaccgguucaacggcaucggcgugacccagaacgugcuguacgagaaccagaagcugaucgccaaccaguucaacagcgccaucggcaagauccaggacagccugagcagcaccgcuagcgcccugggcaagcugcaggacguggugaaccagaacgcccaggcccugaacacccuggugaagcagcugagcagcaacuucggcgccaucagcagcgugcugaacgacauccugagccggcuggacccucccgaggccgaggugcagaucgaccggcugaucacuggccggcugcagagccugcagaccuacgugacccagcagcugauccgggccgccgagauucgggccagcgccaaccuggccgccaccaagaugagcgagugcgugcugggccagagcaagcggguggacuucugcggcaagggcuaccaccugaugagcuuuccccagagcgcaccccacggagugguguuccugcacgugaccuacgugcccgcccaggagaagaacuucaccaccgccccagccaucugccacgacggcaaggcccacuuuccccgggagggcguguucgugagcaacggcacccacugguucgugacccagcggaacuucuacgagccccagaucaucaccaccgacaacaccuucgugagcggcaacugcgacguggugaucggcaucgugaacaacaccguguacgauccccugcagcccgagcuggacagcuucaaggaggagcuggacaaguacuucaagaaucacaccagccccgacguggaccugggcgacaucagcggcaucaacgccagcguggugaacauccagaaggagaucgaucggcugaacgagguggccaagaaccugaacgagagccugaucgaccugcaggagcugggcaaguacgagcaguacaucaaguggcccugguacaucuggcugggcuucaucgccggccugaucgccaucgugauggugaccaucaugcugugcugcaugaccagcugcugcagcugccugaagggcuguugcagcugcggcagcugcugcaaguucgacgaggacgacagcgagcccgugcugaagggcgugaagcugcacuacaccugaugacucgagcugguacugcaugcacgcaaugcuagcugccccuuucccguccuggguaccccgagucucccccgaccucgggucccagguaugcucccaccuccaccugccccacucaccaccucugcuaguuccagacaccucccaagcacgcagcaaugcagcucaaaacgcuuagccuagccacacccccacgggaaacagcagugauuaaccuuuagcaauaaacgaaaguuuaacuaagcuauacuaaccccaggguuggucaauuucgugccagccacacccuggagcuagcaaaaaaaaaaaaaaaaaaaaaaaaaaaaaaaaaaaaaaaaaaaaaaaaaaaaaaaaaaaaaaaaaaaaaaaaaaaaaaaaaaaaaaaaaaaaaaaaaaaa

SEQ ID NO: 26428 - RNA, 4273 nt, Artificial Sequence
  SARS-CoV-2/Wuhan/WIV05/2019__EPI_ISL_402128 spike protein mRNA gc (1-1273)(K986P_V987P_K986P_V987P_E484K_D614G)
agaauaaacuaguauucuucugguccccacagacucagagagaacccgccaccauguucguguuccuggugcugcugccccuggugagcagccagugcgugaaccugaccacccggacccagcugccaccagccuacaccaacagcuucacccggggcgucuacuaccccgacaagguguuccggagcagcguccugcacagcacccaggaccuguuccugcccuucuucagcaacgugaccugguuccacgccauccacgugagcggcaccaacggcaccaagcgguucgacaaccccgugcugcccuucaacgacggcguguacuucgccagcaccgagaagagcaacaucauccggggcuggaucuucggcaccacccuggacagcaagacccagagccugcugaucgugaauaacgccaccaacguggugaucaaggugugcgaguuccaguucugcaacgaccccuuccugggcguguacuaccacaagaacaacaagagcuggauggagagcgaguuccggguguacagcagcgccaacaacugcaccuucgaguacgugagccagcccuuccugauggaccuggagggcaagcagggcaacuucaagaaccugcgggaguucguguucaagaacaucgacggcuacuucaagaucuacagcaagcacaccccaaucaaccuggugcgggaucugccccagggcuucucagcccuggagccccugguggaccugcccaucggcaucaacaucacccgguuccagacccugcuggcccugcaccggagcuaccugaccccaggcgacagcagcagcggguggacagcaggcgcggcugcuuacuacgugggcuaccugcagccccggaccuuccugcugaaguacaacgagaacggcaccaucaccgacgccguggacugcgcccuggacccucugagcgagaccaagugcacccugaagagcuucaccguggagaagggcaucuaccagaccagcaacuuccgggugcagcccaccgagagcaucgugcgguuccccaacaucaccaaccugugccccuucggcgagguguucaacgccacccgguucgccagcguguacgccuggaaccggaagcggaucagcaacugcguggccgacuacagcgugcuguacaacagcgccagcuucagcaccuucaagugcuacggcgugagccccaccaagcugaacgaccugugcuucaccaacguguacgccgacagcuucgugauccguggcgacgaggugcggcagaucgcacccggccagacaggcaagaucgccgacuacaacuacaagcugcccgacgacuucaccggcugcgugaucgccuggaacagcaacaaccucgacagcaaggugggcggcaacuacaacuaccuguaccggcuguuccggaagagcaaccugaagcccuucgagcgggacaucagcaccgagaucuaccaagccggcuccaccccuugcaacggcgugaagggcuucaacugcuacuucccucugcagagcuacggcuuccagcccaccaacggcgugggcuaccagcccuaccgggugguggugcugagcuucgagcugcugcacgccccagccaccguguguggccccaagaagagcaccaaccuggugaagaacaagugcgugaacuucaacuucaacggccuuaccggcaccggcgugcugaccgagagcaacaagaaauuccugcccuuucagcaguucggccgggacaucgccgacaccaccgacgcugugcgggauccccagacccuggagauccuggacaucaccccuugcagcuucggcggcgugagcgugaucaccccaggcaccaacaccagcaaccagguggccgugcuguaccagggcgugaacugcaccgaggugcccguggccauccacgccgaccagcugacacccaccuggcgggucuacagcaccggcagcaacguguuccagacccgggccgguugccugaucggcgccgagcacgugaacaacagcuacgagugcgacauccccaucggcgccggcaucugugccagcuaccagacccagaccaauucaccccggagggcaaggagcguggccagccagagcaucaucgccuacaccaugagccugggcgccgagaacagcguggccuacagcaacaacagcaucgccauccccaccaacuucaccaucagcgugaccaccgagauucugcccgugagcaugaccaagaccagcguggacugcaccauguacaucugcggcgacagcaccgagugcagcaaccugcugcugcaguacggcagcuucugcacccagcugaaccgggcccugaccggcaucgccguggagcaggacaagaacacccaggagguguucgcccaggugaagcagaucuacaagaccccucccaucaaggacuucggcggcuucaacuucagccagauccugcccgaccccagcaagcccagcaagcggagcuucaucgaggaccugcuguucaacaaggugacccuagccgacgccggcuucaucaagcaguacggcgacugccucggcgacauagccgcccgggaccugaucugcgcccagaaguucaacggccugaccgugcugccuccccugcugaccgacgagaugaucgcccaguacaccagcgcccuguuagccggaaccaucaccagcggcuggacuuucggcgcuggagccgcucugcagauccccuucgccaugcagauggccuaccgguucaacggcaucggcgugacccagaacgugcuguacgagaaccagaagcugaucgccaaccaguucaacagcgccaucggcaagauccaggacagccugagcagcaccgcuagcgcccugggcaagcugcaggacguggugaaccagaacgcccaggcccugaacacccuggugaagcagcugagcagcaacuucggcgccaucagcagcgugcugaacgacauccugagccggcuggacccucccgaggccgaggugcagaucgaccggcugaucacuggccggcugcagagccugcagaccuacgugacccagcagcugauccgggccgccgagauucgggccagcgccaaccuggccgccaccaagaugagcgagugcgugcugggccagagcaagcggguggacuucugcggcaagggcuaccaccugaugagcuuuccccagagcgcaccccacggagugguguuccugcacgugaccuacgugcccgcccaggagaagaacuucaccaccgccccagccaucugccacgacggcaaggcccacuuuccccgggagggcguguucgugagcaacggcacccacugguucgugacccagcggaacuucuacgagccccagaucaucaccaccgacaacaccuucgugagcggcaacugcgacguggugaucggcaucgugaacaacaccguguacgauccccugcagcccgagcuggacagcuucaaggaggagcuggacaaguacuucaagaaucacaccagccccgacguggaccugggcgacaucagcggcaucaacgccagcguggugaacauccagaaggagaucgaucggcugaacgagguggccaagaaccugaacgagagccugaucgaccugcaggagcugggcaaguacgagcaguacaucaaguggcccugguacaucuggcugggcuucaucgccggccugaucgccaucgugauggugaccaucaugcugugcugcaugaccagcugcugcagcugccugaagggcuguugcagcugcggcagcugcugcaaguucgacgaggacgacagcgagcccgugcugaagggcgugaagcugcacuacaccugaugacucgagcugguacugcaugcacgcaaugcuagcugccccuuucccguccuggguaccccgagucucccccgaccucgggucccagguaugcucccaccuccaccugccccacucaccaccucugcuaguuccagacaccucccaagcacgcagcaaugcagcucaaaacgcuuagccuagccacacccccacgggaaacagcagugauuaaccuuuagcaauaaacgaaaguuuaacuaagcuauacuaaccccaggguuggucaauuucgugccagccacacccuggagcuagcaaaaaaaaaaaaaaaaaaaaaaaaaaaaaaaaaaaaaaaaaaaaaaaaaaaaaaaaaaaaaaaaaaaaaaaaaaaaaaaaaaaaaaaaaaaaaaaaaaaa

SEQ ID NO: 26429 - RNA, 4273 nt, Artificial Sequence
  SARS-CoV-2/Wuhan/WIV05/2019__EPI_ISL_402128 spike protein mRNA gc (1-1273)(K986P_V987P_K986P_V987P_L18F_T20N_P26S_D138Y_R190S_K417T _E484K_N501Y_D614G_H655Y_T1027I)
agaauaaacuaguauucuucugguccccacagacucagagagaacccgccaccauguucguguuccuggugcugcugccccuggugagcagccagugcgugaacuucaccaaccggacccagcugccaagcgccuacaccaacagcuucacccggggcgucuacuaccccgacaagguguuccggagcagcguccugcacagcacccaggaccuguuccugcccuucuucagcaacgugaccugguuccacgccauccacgugagcggcaccaacggcaccaagcgguucgacaaccccgugcugcccuucaacgacggcguguacuucgccagcaccgagaagagcaacaucauccggggcuggaucuucggcaccacccuggacagcaagacccagagccugcugaucgugaauaacgccaccaacguggugaucaaggugugcgaguuccaguucugcaacuaccccuuccugggcguguacuaccacaagaacaacaagagcuggauggagagcgaguuccggguguacagcagcgccaacaacugcaccuucgaguacgugagccagcccuuccugauggaccuggagggcaagcagggcaacuucaagaaccugagcgaguucguguucaagaacaucgacggcuacuucaagaucuacagcaagcacaccccaaucaaccuggugcgggaucugccccagggcuucucagcccuggagccccugguggaccugcccaucggcaucaacaucacccgguuccagacccugcuggcccugcaccggagcuaccugaccccaggcgacagcagcagcggguggacagcaggcgcggcugcuuacuacgugggcuaccugcagccccggaccuuccugcugaaguacaacgagaacggcaccaucaccgacgccguggacugcgcccuggacccucugagcgagaccaagugcacccugaagagcuucaccguggagaagggcaucuaccagaccagcaacuuccgggugcagcccaccgagagcaucgugcgguuccccaacaucaccaaccugugccccuucggcgagguguucaacgccacccgguucgccagcguguacgccuggaaccggaagcggaucagcaacugcguggccgacuacagcgugcuguacaacagcgccagcuucagcaccuucaagugcuacggcgugagccccaccaagcugaacgaccugugcuucaccaacguguacgccgacagcuucgugauccguggcgacgaggugcggcagaucgcacccggccagacaggcaccaucgccgacuacaacuacaagcugcccgacgacuucaccggcugcgugaucgccuggaacagcaacaaccucgacagcaaggugggcggcaacuacaacuaccuguaccggcuguuccggaagagcaaccugaagcccuucgagcgggacaucagcaccgagaucuaccaagccggcuccaccccuugcaacggcgugaagggcuucaacugcuacuucccucugcagagcuacggcuuccagcccaccuacggcgugggcuaccagcccuaccgggugguggugcugagcuucgagcugcugcacgccccagccaccguguguggccccaagaagagcaccaaccuggugaagaacaagugcgugaacuucaacuucaacggccuuaccggcaccggcgugcugaccgagagcaacaagaaauuccugcccuuucagcaguucggccgggacaucgccgacaccaccgacgcugugcgggauccccagacccuggagauccuggacaucaccccuugcagcuucggcggcgugagcgugaucaccccaggcaccaacaccagcaaccagguggccgugcuguaccagggcgugaacugcaccgaggugcccguggccauccacgccgaccagcugacacccaccuggcgggucuacagcaccggcagcaacguguuccagacccgggccgguugccugaucggcgccgaguacgugaacaacagcuacgagugcgacauccccaucggcgccggcaucugugccagcuaccagacccagaccaauucaccccggagggcaaggagcguggccagccagagcaucaucgccuacaccaugagccugggcgccgagaacagcguggccuacagcaacaacagcaucgccauccccaccaacuucaccaucagcgugaccaccgagauucugcccgugagcaugaccaagaccagcguggacugcaccauguacaucugcggcgacagcaccgagugcagcaaccugcugcugcaguacggcagcuucugcacccagcugaaccgggcccugaccggcaucgccguggagcaggacaagaacacccaggagguguucgcccaggugaagcagaucuacaagaccccucccaucaaggacuucggcggcuucaacuucagccagauccugcccgaccccagcaagcccagcaagcggagcuucaucgaggaccugcuguucaacaaggugacccuagccgacgccggcuucaucaagcaguacggcgacugccucggcgacauagccgcccgggaccugaucugcgcccagaaguucaacggccugaccgugcugccuccccugcugaccgacgagaugaucgcccaguacaccagcgcccuguuagccggaaccaucaccagcggcuggacuuucggcgcuggagccgcucugcagauccccuucgccaugcagauggccuaccgguucaacggcaucggcgugacccagaacgugcuguacgagaaccagaagcugaucgccaaccaguucaacagcgccaucggcaagauccaggacagccugagcagcaccgcuagcgcccugggcaagcugcaggacguggugaaccagaacgcccaggcccugaacacccuggugaagcagcugagcagcaacuucggcgccaucagcagcgugcugaacgacauccugagccggcuggacccucccgaggccgaggugcagaucgaccggcugaucacuggccggcugcagagccugcagaccuacgugacccagcagcugauccgggccgccgagauucgggccagcgccaaccuggccgccaucaagaugagcgagugcgugcugggccagagcaagcggguggacuucugcggcaagggcuaccaccugaugagcuuuccccagagcgcaccccacggagugguguuccugcacgugaccuacgugcccgcccaggagaagaacuucaccaccgccccagccaucugccacgacggcaaggcccacuuuccccgggagggcguguucgugagcaacggcacccacugguucgugacccagcggaacuucuacgagccccagaucaucaccaccgacaacaccuucgugagcggcaacugcgacguggugaucggcaucgugaacaacaccguguacgauccccugcagcccgagcuggacagcuucaaggaggagcuggacaaguacuucaagaaucacaccagccccgacguggaccugggcgacaucagcggcaucaacgccagcguggugaacauccagaaggagaucgaucggcugaacgagguggccaagaaccugaacgagagccugaucgaccugcaggagcugggcaaguacgagcaguacaucaaguggcccugguacaucuggcugggcuucaucgccggccugaucgccaucgugauggugaccaucaugcugugcugcaugaccagcugcugcagcugccugaagggcuguugcagcugcggcagcugcugcaaguucgacgaggacgacagcgagcccgugcugaagggcgugaagcugcacuacaccugaugacucgagcugguacugcaugcacgcaaugcuagcugccccuuucccguccuggguaccccgagucucccccgaccucgggucccagguaugcucccaccuccaccugccccacucaccaccucugcuaguuccagacaccucccaagcacgcagcaaugcagcucaaaacgcuuagccuagccacacccccacgggaaacagcagugauuaaccuuuagcaauaaacgaaaguuuaacuaagcuauacuaaccccaggguuggucaauuucgugccagccacacccuggagcuagcaaaaaaaaaaaaaaaaaaaaaaaaaaaaaaaaaaaaaaaaaaaaaaaaaaaaaaaaaaaaaaaaaaaaaaaaaaaaaaaaaaaaaaaaaaaaaaaaaaaa

SEQ ID NO: 26430 - RNA, 4273 nt, Artificial Sequence
  SARS-CoV-2/Wuhan/WIV05/2019__EPI_ISL_402128 spike protein mRNA gc (1-1273)(K986P_V987P_K986P_V987P_S13I_W152C_L452R_D614G)
agaauaaacuaguauucuucugguccccacagacucagagagaacccgccaccauguucguguuccuggugcugcugccccuggugagcauccagugcgugaaccugaccacccggacccagcugccaccagccuacaccaacagcuucacccggggcgucuacuaccccgacaagguguuccggagcagcguccugcacagcacccaggaccuguuccugcccuucuucagcaacgugaccugguuccacgccauccacgugagcggcaccaacggcaccaagcgguucgacaaccccgugcugcccuucaacgacggcguguacuucgccagcaccgagaagagcaacaucauccggggcuggaucuucggcaccacccuggacagcaagacccagagccugcugaucgugaauaacgccaccaacguggugaucaaggugugcgaguuccaguucugcaacgaccccuuccugggcguguacuaccacaagaacaacaagagcugcauggagagcgaguuccggguguacagcagcgccaacaacugcaccuucgaguacgugagccagcccuuccugauggaccuggagggcaagcagggcaacuucaagaaccugcgggaguucguguucaagaacaucgacggcuacuucaagaucuacagcaagcacaccccaaucaaccuggugcgggaucugccccagggcuucucagcccuggagccccugguggaccugcccaucggcaucaacaucacccgguuccagacccugcuggcccugcaccggagcuaccugaccccaggcgacagcagcagcggguggacagcaggcgcggcugcuuacuacgugggcuaccugcagccccggaccuuccugcugaaguacaacgagaacggcaccaucaccgacgccguggacugcgcccuggacccucugagcgagaccaagugcacccugaagagcuucaccguggagaagggcaucuaccagaccagcaacuuccgggugcagcccaccgagagcaucgugcgguuccccaacaucaccaaccugugccccuucggcgagguguucaacgccacccgguucgccagcguguacgccuggaaccggaagcggaucagcaacugcguggccgacuacagcgugcuguacaacagcgccagcuucagcaccuucaagugcuacggcgugagccccaccaagcugaacgaccugugcuucaccaacguguacgccgacagcuucgugauccguggcgacgaggugcggcagaucgcacccggccagacaggcaagaucgccgacuacaacuacaagcugcccgacgacuucaccggcugcgugaucgccuggaacagcaacaaccucgacagcaaggugggcggcaacuacaacuaccgcuaccggcuguuccggaagagcaaccugaagcccuucgagcgggacaucagcaccgagaucuaccaagccggcuccaccccuugcaacggcguggagggcuucaacugcuacuucccucugcagagcuacggcuuccagcccaccaacggcgugggcuaccagcccuaccgggugguggugcugagcuucgagcugcugcacgccccagccaccguguguggccccaagaagagcaccaaccuggugaagaacaagugcgugaacuucaacuucaacggccuuaccggcaccggcgugcugaccgagagcaacaagaaauuccugcccuuucagcaguucggccgggacaucgccgacaccaccgacgcugugcgggauccccagacccuggagauccuggacaucaccccuugcagcuucggcggcgugagcgugaucaccccaggcaccaacaccagcaaccagguggccgugcuguaccagggcgugaacugcaccgaggugcccguggccauccacgccgaccagcugacacccaccuggcgggucuacagcaccggcagcaacguguuccagacccgggccgguugccugaucggcgccgagcacgugaacaacagcuacgagugcgacauccccaucggcgccggcaucugugccagcuaccagacccagaccaauucaccccggagggcaaggagcguggccagccagagcaucaucgccuacaccaugagccugggcgccgagaacagcguggccuacagcaacaacagcaucgccauccccaccaacuucaccaucagcgugaccaccgagauucugcccgugagcaugaccaagaccagcguggacugcaccauguacaucugcggcgacagcaccgagugcagcaaccugcugcugcaguacggcagcuucugcacccagcugaaccgggcccugaccggcaucgccguggagcaggacaagaacacccaggagguguucgcccaggugaagcagaucuacaagaccccucccaucaaggacuucggcggcuucaacuucagccagauccugcccgaccccagcaagcccagcaagcggagcuucaucgaggaccugcuguucaacaaggugacccuagccgacgccggcuucaucaagcaguacggcgacugccucggcgacauagccgcccgggaccugaucugcgcccagaaguucaacggccugaccgugcugccuccccugcugaccgacgagaugaucgcccaguacaccagcgcccuguuagccggaaccaucaccagcggcuggacuuucggcgcuggagccgcucugcagauccccuucgccaugcagauggccuaccgguucaacggcaucggcgugacccagaacgugcuguacgagaaccagaagcugaucgccaaccaguucaacagcgccaucggcaagauccaggacagccugagcagcaccgcuagcgcccugggcaagcugcaggacguggugaaccagaacgcccaggcccugaacacccuggugaagcagcugagcagcaacuucggcgccaucagcagcgugcugaacgacauccugagccggcuggacccucccgaggccgaggugcagaucgaccggcugaucacuggccggcugcagagccugcagaccuacgugacccagcagcugauccgggccgccgagauucgggccagcgccaaccuggccgccaccaagaugagcgagugcgugcugggccagagcaagcggguggacuucugcggcaagggcuaccaccugaugagcuuuccccagagcgcaccccacggagugguguuccugcacgugaccuacgugcccgcccaggagaagaacuucaccaccgccccagccaucugccacgacggcaaggcccacuuuccccgggagggcguguucgugagcaacggcacccacugguucgugacccagcggaacuucuacgagccccagaucaucaccaccgacaacaccuucgugagcggcaacugcgacguggugaucggcaucgugaacaacaccguguacgauccccugcagcccgagcuggacagcuucaaggaggagcuggacaaguacuucaagaaucacaccagccccgacguggaccugggcgacaucagcggcaucaacgccagcguggugaacauccagaaggagaucgaucggcugaacgagguggccaagaaccugaacgagagccugaucgaccugcaggagcugggcaaguacgagcaguacaucaaguggcccugguacaucuggcugggcuucaucgccggccugaucgccaucgugauggugaccaucaugcugugcugcaugaccagcugcugcagcugccugaagggcuguugcagcugcggcagcugcugcaaguucgacgaggacgacagcgagcccgugcugaagggcgugaagcugcacuacaccugaugacucgagcugguacugcaugcacgcaaugcuagcugccccuuucccguccuggguaccccgagucucccccgaccucgggucccagguaugcucccaccuccaccugccccacucaccaccucugcuaguuccagacaccucccaagcacgcagcaaugcagcucaaaacgcuuagccuagccacacccccacgggaaacagcagugauuaaccuuuagcaauaaacgaaaguuuaacuaagcuauacuaaccccaggguuggucaauuucgugccagccacacccuggagcuagcaaaaaaaaaaaaaaaaaaaaaaaaaaaaaaaaaaaaaaaaaaaaaaaaaaaaaaaaaaaaaaaaaaaaaaaaaaaaaaaaaaaaaaaaaaaaaaaaaaaa

SEQ ID NO: 26431 - RNA, 4273 nt, Artificial Sequence
  SARS-CoV-2/Wuhan/WIV05/2019__EPI_ISL_402128 spike protein mRNA gc (1-1273)(K986P_V987P)
agaauaaacuaguauucuucugguccccacagacucagagagaacccgccaccauguucguguuccuggugcugcugccccuggugagcagccagugcgugaaccugaccacccggacccagcugcccccugccuacaccaacagcuucacccggggcguguacuaccccgacaagguguuccggagcagcgugcugcacagcacccaggaccuguuccugcccuucuucagcaacgugaccugguuccacgccauccacgugagcggcaccaacggcaccaagcgguucgacaacccagugcugcccuucaacgacggcguguacuucgccagcaccgagaagucaaacaucauccggggcuggaucuucggcaccacccuggacagcaagacacagagccugcugaucgugaacaacgccaccaacguggugaucaaggugugcgaguuucaguucugcaacgaccccuuccugggcguguacuaccacaagaacaacaagagcuggauggagagcgaguuccgggucuacagcagcgcuaacaauugcaccuucgaguacgugagccagcccuuccugauggaccucgagggcaagcagggcaacuucaagaaccugcgggaguucguguucaagaacaucgauggcuacuucaagaucuacagcaagcacacccccaucaaccuggugcgggaccugccccagggauucagcgcccuggagccucugguggaccugcccaucggcaucaacaucaccagguuccagacccugcuggcccugcaccggagcuaccugacccccggcgacagcagcagcggcuggaccgccggcgccgccgcauacuacgugggcuaccugcagccacggaccuuccugcugaaguacaacgagaacggcaccaucaccgacgccguggacugcgcccuggacccccugagcgagaccaagugcacccuaaagagcuucaccguggagaagggcaucuaccagaccagcaacuuccgggugcagcccacugagagcaucgugcgguuccccaacauuaccaaccugugucccuucggcgagguguucaacgccacccgguucgccagcguguacgccuggaaccggaagcggaucagcaacugcguggccgacuacagcgugcuguacaacagcgccagcuucagcaccuucaagugcuacggcgugagcccuaccaagcugaacgaccugugcuucaccaacguguacgcugacagcuucgugauccggggcgacgaggugcggcagaucgcccccggccagaccggcaagaucgccgacuacaacuacaagcugcccgacgacuucaccggcugcgugaucgccuggaacagcaacaaccuggacagcaaggugggcggcaacuacaacuaccuguaccggcuguuccguaagagcaaccugaagccauucgagcgggacaucagcaccgagaucuaccaggccggcagcacccccugcaacgguguggagggcuuuaacugcuacuucccccugcagagcuacggcuuccagcccaccaacggcgugggcuaccagcccuaccgggugguggugcugagcuucgagcugcugcacgcccccgccaccgugugcggcccuaaaaagagcaccaaccuggugaagaacaagugcgugaacuucaauuucaacggccugaccggcaccggcgugcugaccgagagcaacaagaaguuccugcccuuccagcaguucggccgggauaucgccgacaccaccgacgcagugcgggacccccagacccuggagauccuggacaucaccccaugcagcuucggcggcgugagcgucaucacccccggcacaaacaccagcaaccagguggccgugcuguaccaggacgugaacugcaccgaggugcccguggccauccacgccgaccagcugacccccaccuggcggguguacagcaccggaagcaacguguuccagacccgggccggcugccugaucggcgccgagcacgugaacaacuccuacgagugcgacauccccaucggcgcuggcaucugcgccagcuaccagacccagaccaacagcccccggcgggcccggagcguggccagccagagcaucaucgccuacaccaugagcuuaggcgccgagaacagcguggccuacagcaacaacagcaucgcgaucccuaccaacuucaccaucagcgugaccaccgagauacugcccgugagcaugaccaagaccagcguggacuguaccauguacaucugcggcgacagcaccgagugcagcaaccugcugcugcaguacggcagcuucugcacccagcugaaccgggcccugaccggcaucgccguggagcaggacaagaacacccaagagguguucgcccaggugaagcagaucuacaagacucccccaaucaaggacuucggcggcuucaacuucagccagauccugcccgaccccagcaagcccagcaagcggagcuucaucgaggaccugcuguucaacaaggugacccuggccgacgccggcuucaucaagcaguacggcgauugccugggcgacaucgccgcucgggaccugaucugcgcccagaaguucaacgggcugaccgugcugcccccucugcugaccgacgagaugaucgcccaguacaccagcgcccugcuugccggcaccaucaccagcggcuggaccuucggcgccggcgcagcccugcagauccccuucgccaugcagauggccuaccgguucaacggcaucggcgugacccagaacgugcuguacgagaaccagaagcugaucgccaaccaguucaacagcgccaucggcaagauccaggacagccugagcagcaccgccagcgcccugggcaagcugcaggacguggugaaccagaacgcucaggcccugaacacccuggugaagcagcugagcagcaacuucggcgccaucagcucagugcugaaugacauccugagcaggcuggaucccccagaggccgaggugcagaucgaccggcugaucaccggccggcugcagagccugcagaccuacgugacccagcagcugauccgggccgccgagauccgggccagcgccaaccuggcagccaccaagaugagcgagugcgugcugggccagagcaagcggguggacuuuugcggcaagggcuaccaccugaugagcuucccccagagcgcuccccacggcgugguguuccuccacgugacauacguccccgcccaggagaagaacuucaccaccgcccccgccauuugccacgacggcaaggcccacuucccccgggagggcguguucgugagcaacggaacccacugguucgugacccagcggaacuucuacgagccucagaucaucaccaccgacaacaccuucgugagcggcaacugcgacguggugaucggcaucgugaacaacaccguguacgacccccugcagcccgagcuggacagcuucaaggaggagcuggacaaguacuucaagaaccacaccagcccagacguggaccugggcgacaucagcggcaucaacgccagcguggugaacauccagaaggagaucgaccggcugaacgagguggccaagaaccugaacgagagccugaucgaccugcaggagcugggcaaguacgagcaguacaucaaguggcccugguacaucuggcugggcuucaucgccggccugaucgccaucgugauggugaccaucaugcugugcugcaugaccagcugcuguagcugccugaagggcugcugcagcugcggcagcugcugcaaguucgacgaggacgacagcgagcccgugcugaagggcgugaagcugcacuacaccugaugacucgagcugguacugcaugcacgcaaugcuagcugccccuuucccguccuggguaccccgagucucccccgaccucgggucccagguaugcucccaccuccaccugccccacucaccaccucugcuaguuccagacaccucccaagcacgcagcaaugcagcucaaaacgcuuagccuagccacacccccacgggaaacagcagugauuaaccuuuagcaauaaacgaaaguuuaacuaagcuauacuaaccccaggguuggucaauuucgugccagccacacccuggagcuagcaaaaaaaaaaaaaaaaaaaaaaaaaaaaaaaaaaaaaaaaaaaaaaaaaaaaaaaaaaaaaaaaaaaaaaaaaaaaaaaaaaaaaaaaaaaaaaaaaaaa

SEQ ID NO: 26432 - RNA, 4273 nt, Artificial Sequence
  SARS-CoV-2/Wuhan/WIV05/2019__EPI_ISL_402128 spike protein mRNA gc (1-1273)(K986P_V987P_ D614G)
agaauaaacuaguauucuucugguccccacagacucagagagaacccgccaccauguucguguuccuggugcugcugccccuggugagcagccagugcgugaaccugaccacccggacccagcugcccccugccuacaccaacagcuucacccggggcguguacuaccccgacaagguguuccggagcagcgugcugcacagcacccaggaccuguuccugcccuucuucagcaacgugaccugguuccacgccauccacgugagcggcaccaacggcaccaagcgguucgacaacccagugcugcccuucaacgacggcguguacuucgccagcaccgagaagucaaacaucauccggggcuggaucuucggcaccacccuggacagcaagacacagagccugcugaucgugaacaacgccaccaacguggugaucaaggugugcgaguuucaguucugcaacgaccccuuccugggcguguacuaccacaagaacaacaagagcuggauggagagcgaguuccgggucuacagcagcgcuaacaauugcaccuucgaguacgugagccagcccuuccugauggaccucgagggcaagcagggcaacuucaagaaccugcgggaguucguguucaagaacaucgauggcuacuucaagaucuacagcaagcacacccccaucaaccuggugcgggaccugccccagggauucagcgcccuggagccucugguggaccugcccaucggcaucaacaucaccagguuccagacccugcuggcccugcaccggagcuaccugacccccggcgacagcagcagcggcuggaccgccggcgccgccgcauacuacgugggcuaccugcagccacggaccuuccugcugaaguacaacgagaacggcaccaucaccgacgccguggacugcgcccuggacccccugagcgagaccaagugcacccuaaagagcuucaccguggagaagggcaucuaccagaccagcaacuuccgggugcagcccacugagagcaucgugcgguuccccaacauuaccaaccugugucccuucggcgagguguucaacgccacccgguucgccagcguguacgccuggaaccggaagcggaucagcaacugcguggccgacuacagcgugcuguacaacagcgccagcuucagcaccuucaagugcuacggcgugagcccuaccaagcugaacgaccugugcuucaccaacguguacgcugacagcuucgugauccggggcgacgaggugcggcagaucgcccccggccagaccggcaagaucgccgacuacaacuacaagcugcccgacgacuucaccggcugcgugaucgccuggaacagcaacaaccuggacagcaaggugggcggcaacuacaacuaccuguaccggcuguuccguaagagcaaccugaagccauucgagcgggacaucagcaccgagaucuaccaggccggcagcacccccugcaacgguguggagggcuuuaacugcuacuucccccugcagagcuacggcuuccagcccaccaacggcgugggcuaccagcccuaccgggugguggugcugagcuucgagcugcugcacgcccccgccaccgugugcggcccuaaaaagagcaccaaccuggugaagaacaagugcgugaacuucaauuucaacggccugaccggcaccggcgugcugaccgagagcaacaagaaguuccugcccuuccagcaguucggccgggauaucgccgacaccaccgacgcagugcgggacccccagacccuggagauccuggacaucaccccaugcagcuucggcggcgugagcgucaucacccccggcacaaacaccagcaaccagguggccgugcuguaccagggagugaacugcaccgaggugcccguggccauccacgccgaccagcugacccccaccuggcggguguacagcaccggcagcaacguguuccagacccgggccggcugccugaucggcgccgagcacgugaacaacuccuacgagugcgacauccccaucggcgcuggcaucugcgccagcuaccagacccagaccaacagcccccggcgggcccggagcguggccagccagagcaucaucgccuacaccaugagcuuaggcgccgagaacagcguggccuacagcaacaacagcaucgcgaucccuaccaacuucaccaucagcgugaccaccgagauacugcccgugagcaugaccaagaccagcguggacuguaccauguacaucugcggcgacagcaccgagugcagcaaccugcugcugcaguacggcagcuucugcacccagcugaaccgggcccugaccggcaucgccguggagcaggacaagaacacccaagagguguucgcccaggugaagcagaucuacaagacucccccaaucaaggacuucggcggcuucaacuucagccagauccugcccgaccccagcaagcccagcaagcggagcuucaucgaggaccugcuguucaacaaggugacccuggccgacgccggcuucaucaagcaguacggcgacugccugggggauaucgccgcucgggaccugaucugcgcccagaaguucaacggccugaccgugcugcccccucugcugaccgacgagaugaucgcccaguacaccagcgcccugcuugccggcaccaucaccagcggcuggaccuucggcgccggcgcagcccugcagauccccuucgccaugcagauggccuaccgguucaacggcaucggcgugacccagaacgugcuguacgagaaccagaagcugaucgccaaccaguucaacagcgccaucggcaagauccaggacagccugagcagcaccgccagcgcccugggcaagcugcaggacguggugaaccagaacgcucaggcccugaacacccuggugaagcagcugagcagcaacuucggcgccaucagcucagugcugaaugacauccugagcaggcuggaucccccagaggccgaggugcagaucgaccggcugaucaccggccggcugcagagccugcagaccuacgugacccagcagcugauccgggccgccgagauccgggccagcgccaaccuggcagccaccaagaugagcgagugcgugcugggccagagcaagcggguggacuuuugcggcaagggcuaccaccugaugagcuucccccagagcgcuccccacggcgugguguuccuccacgugacauacguccccgcccaggagaagaacuucaccaccgcccccgccauuugccacgacggcaaggcccacuucccccgggagggaguguucgugagcaacggcacccacugguucgugacccagcggaacuucuacgagccucagaucaucaccaccgacaacaccuucgugagcggcaacugcgacguggugaucggcaucgugaacaacaccguguacgacccccugcagcccgagcuggacagcuucaaggaggagcuggacaaguacuucaagaaccacaccagcccagacguggaccugggcgacaucagcggcaucaacgccagcguggugaacauccagaaggagaucgaccggcugaacgagguggccaagaaccugaacgagagccugaucgaccugcaggagcugggcaaguacgagcaguacaucaaguggcccugguacaucuggcugggcuucaucgccggccugaucgccaucgugauggugaccaucaugcugugcugcaugaccagcugcuguagcugccugaagggcugcugcagcugcggcagcugcugcaaguucgacgaggacgacagcgagcccgugcugaagggcgugaagcugcacuacaccugaugacucgagcugguacugcaugcacgcaaugcuagcugccccuuucccguccuggguaccccgagucucccccgaccucgggucccagguaugcucccaccuccaccugccccacucaccaccucugcuaguuccagacaccucccaagcacgcagcaaugcagcucaaaacgcuuagccuagccacacccccacgggaaacagcagugauuaaccuuuagcaauaaacgaaaguuuaacuaagcuauacuaaccccaggguuggucaauuucgugccagccacacccuggagcuagcaaaaaaaaaaaaaaaaaaaaaaaaaaaaaaaaaaaaaaaaaaaaaaaaaaaaaaaaaaaaaaaaaaaaaaaaaaaaaaaaaaaaaaaaaaaaaaaaaaaa

SEQ ID NO: 26433 - RNA, 4273 nt, Artificial Sequence
  SARS-CoV-2/Wuhan/WIV05/2019__EPI_ISL_402128 spike protein mRNA gc (1-1273)(K986P_V987P_A222V_D614G)
agaauaaacuaguauucuucugguccccacagacucagagagaacccgccaccauguucguguuccuggugcugcugccccuggugagcagccagugcgugaaccugaccacccggacccagcugcccccugccuacaccaacagcuucacccggggcguguacuaccccgacaagguguuccggagcagcgugcugcacagcacccaggaccuguuccugcccuucuucagcaacgugaccugguuccacgccauccacgugagcggcaccaacggcaccaagcgguucgacaacccagugcugcccuucaacgacggcguguacuucgccagcaccgagaagucaaacaucauccggggcuggaucuucggcaccacccuggacagcaagacacagagccugcugaucgugaacaacgccaccaacguggugaucaaggugugcgaguuucaguucugcaacgaccccuuccugggcguguacuaccacaagaacaacaagagcuggauggagagcgaguuccgggucuacagcagcgcuaacaauugcaccuucgaguacgugagccagcccuuccugauggaccucgagggcaagcagggcaacuucaagaaccugcgggaguucguguucaagaacaucgauggcuacuucaagaucuacagcaagcacacccccaucaaccuggugcgggaccugccccagggauucagcgugcuggagccucugguggaccugcccaucggcaucaacaucaccagguuccagacccugcuggcccugcaccggagcuaccugacccccggcgacagcagcagcggcuggaccgccggcgccgccgccuacuacgugggcuaccugcagccacggaccuuccugcugaaguacaacgagaacggcaccaucaccgacgcaguggacugcgcccuggacccccugagcgagaccaagugcacccuaaagagcuucaccguggagaagggcaucuaccagaccagcaacuuccgggugcagcccacugagagcaucgugcgguuccccaacauuaccaaccugugucccuucggcgagguguucaacgccacccgguucgccagcguguacgccuggaaccggaagcggaucagcaacugcguggccgacuacagcgugcuguacaacagcgccagcuucagcaccuucaagugcuacggcgugagcccuaccaagcugaacgaccugugcuucaccaacguguacgccgacagcuucgugauccggggcgacgaggugcggcagaucgcucccggccagaccggcaagaucgccgacuacaacuacaagcugcccgacgacuucaccggcugcgugaucgccuggaacagcaacaaccuggacagcaaggugggcggcaacuacaacuaccuguaccggcuguuccguaagagcaaccugaagccauucgagcgggacaucagcaccgagaucuaccaggccggcagcacccccugcaacgguguggagggcuuuaacugcuacuucccccugcagagcuacggcuuccagcccaccaacggcgugggcuaccagcccuaccgggugguggugcugagcuucgagcugcugcacgcccccgccaccgugugcggcccuaaaaagagcaccaaccuggugaagaacaagugcgugaacuucaauuucaacggccugaccggcaccggcgugcugaccgagagcaacaagaaguuccugcccuuccagcaguucggccgggauaucgccgacaccaccgacgccgugcgggacccccagacccuggagauccuggacaucaccccaugcagcuucggcggcgucagcgugaucacccccggcacaaacaccagcaaccagguggcagugcuguaccagggagugaacugcaccgaggugcccguggccauccacgccgaccagcugacccccaccuggcggguguacagcaccggcagcaacguguuccagacccgggccggcugccugaucggcgccgagcacgugaacaacuccuacgagugcgacauccccaucggcgccggcaucugcgcuagcuaccagacccagaccaacagcccccggcgggcccggagcguggccagccagagcaucaucgccuacaccaugagcuuaggcgccgagaacagcguggccuacagcaacaacagcaucgccaucccuaccaacuucaccaucagcgugaccaccgagauacugcccgugagcaugaccaagaccagcguggacuguaccauguacaucugcggcgacagcaccgagugcagcaaccugcugcugcaguacggcagcuucugcacccagcugaaccgggcgcugaccggcaucgccguggagcaggacaagaacacccaagagguguucgcccaggugaagcagaucuacaagacucccccaaucaaggacuucggcggcuucaacuucagccagauccugcccgaccccagcaagcccagcaagcggagcuucaucgaggaccugcuguucaacaaggugacccuggccgacgccggcuucaucaagcaguacggcgacugccugggggauaucgccgcccgggaccugaucugcgcucagaaguucaacggccugaccgugcugcccccucugcugaccgacgagaugaucgcccaguacaccagcgcccugcuugccggcaccaucaccagcggcuggaccuucggcgccggcgccgcacugcagauccccuucgccaugcagauggccuaccgguucaacggcaucggcgugacccagaacgugcuguacgagaaccagaagcugaucgccaaccaguucaacagcgccaucggcaagauccaggacagccugagcagcaccgccagcgcccugggcaagcugcaggacguggugaaccagaacgcccaggcucugaacacccuggugaagcagcugagcagcaacuucggcgccaucagcucagugcugaaugacauccugagcaggcuggaucccccagaggccgaggugcagaucgaccggcugaucaccggccggcugcagagccugcagaccuacgugacccagcagcugauccgggccgccgagauccgggccagcgccaaccuggccgcaaccaagaugagcgagugcgugcugggccagagcaagcggguggacuuuugcggcaagggcuaccaccugaugagcuucccccagagcgcuccccacggcgugguguuccuccacgucacauacgugcccgcccaggagaagaacuucaccaccgcccccgccauuugccacgacggcaaggcccacuucccccgggagggaguguucgugagcaacggcacccacugguucgugacccagcggaacuucuacgagccucagaucaucaccaccgacaacaccuucgugagcggcaacugcgacguggugaucggcaucgugaacaacaccguguacgacccccugcagcccgagcuggacagcuucaaggaggagcuggacaaguacuucaagaaccacaccagcccagacguggaccugggcgacaucagcggcaucaacgccagcguggugaacauccagaaggagaucgaccggcugaacgagguggccaagaaccugaacgagagccugaucgaccugcaggagcugggcaaguacgagcaguacaucaaguggcccugguacaucuggcugggcuucaucgccggccugaucgccaucgugauggugaccaucaugcugugcugcaugaccagcugcuguagcugccugaagggcugcugcagcugcggcagcugcugcaaguucgacgaggacgacagcgagcccgugcugaagggcgugaagcugcacuacaccugaugacucgagcugguacugcaugcacgcaaugcuagcugccccuuucccguccuggguaccccgagucucccccgaccucgggucccagguaugcucccaccuccaccugccccacucaccaccucugcuaguuccagacaccucccaagcacgcagcaaugcagcucaaaacgcuuagccuagccacacccccacgggaaacagcagugauuaaccuuuagcaauaaacgaaaguuuaacuaagcuauacuaaccccaggguuggucaauuucgugccagccacacccuggagcuagcaaaaaaaaaaaaaaaaaaaaaaaaaaaaaaaaaaaaaaaaaaaaaaaaaaaaaaaaaaaaaaaaaaaaaaaaaaaaaaaaaaaaaaaaaaaaaaaaaaaa

SEQ ID NO: 26434 - RNA, 4273 nt, Artificial Sequence
  SARS-CoV-2/Wuhan/WIV05/2019__EPI_ISL_402128 spike protein mRNA gc (1-1273)(K986P_V987P_N439K_D614G)
agaauaaacuaguauucuucugguccccacagacucagagagaacccgccaccauguucguguuccuggugcugcugccccuggugagcagccagugcgugaaccugaccacccggacccagcugcccccugccuacaccaacagcuucacccggggcguguacuaccccgacaagguguuccggagcagcgugcugcacagcacccaggaccuguuccugcccuucuucagcaacgugaccugguuccacgccauccacgugagcggcaccaacggcaccaagcgguucgacaacccagugcugcccuucaacgacggcguguacuucgccagcaccgagaagucaaacaucauccggggcuggaucuucggcaccacccuggacagcaagacacagagccugcugaucgugaacaacgccaccaacguggugaucaaggugugcgaguuucaguucugcaacgaccccuuccugggcguguacuaccacaagaacaacaagagcuggauggagagcgaguuccgggucuacagcagcgcuaacaauugcaccuucgaguacgugagccagcccuuccugauggaccucgagggcaagcagggcaacuucaagaaccugcgggaguucguguucaagaacaucgauggcuacuucaagaucuacagcaagcacacccccaucaaccuggugcgggaccugccccagggauucagcgcccuggagccucugguggaccugcccaucggcaucaacaucaccagguuccagacccugcuggcccugcaccggagcuaccugacccccggcgacagcagcagcggcuggaccgccggcgccgccgcauacuacgugggcuaccugcagccacggaccuuccugcugaaguacaacgagaacggcaccaucaccgacgccguggacugcgcccuggacccccugagcgagaccaagugcacccuaaagagcuucaccguggagaagggcaucuaccagaccagcaacuuccgggugcagcccacugagagcaucgugcgguuccccaacauuaccaaccugugucccuucggcgagguguucaacgccacccgguucgccagcguguacgccuggaaccggaagcggaucagcaacugcguggccgacuacagcgugcuguacaacagcgccagcuucagcaccuucaagugcuacggcgugagcccuaccaagcugaacgaccugugcuucaccaacguguacgcugacagcuucgugauccggggcgacgaggugcggcagaucgcccccggccagaccggcaagaucgccgacuacaacuacaagcugcccgacgacuucaccggcugcgugaucgccuggaacagcaagaaccuggacagcaaggugggcggcaacuacaacuaccuguaccggcuguuccguaagagcaaccugaagccauucgagcgggacaucagcaccgagaucuaccaggccggcagcacccccugcaacgguguggagggcuuuaacugcuacuucccccugcagagcuacggcuuccagcccaccaacggcgugggcuaccagcccuaccgggugguggugcugagcuucgagcugcugcacgcccccgccaccgugugcggcccuaaaaagagcaccaaccuggugaagaacaagugcgugaacuucaacuucaauggccugaccggcaccggcgugcugaccgagagcaacaagaaguuccugcccuuccagcaguucggccgggauaucgccgacaccaccgacgcagugcgggacccccagacccuggagauccuggacaucaccccaugcagcuucggcggcgugagcgucaucacccccggcacaaacaccagcaaccagguggccgugcuguaccagggagugaacugcaccgaggugcccguggccauccacgccgaccagcugacccccaccuggcggguguacagcaccggcagcaacguguuccagacccgggccggcugccugaucggcgccgagcacgugaacaacuccuacgagugcgacauccccaucggcgcuggcaucugcgccagcuaccagacccagaccaacagcccccggcgggcccggagcguggccagccagagcaucaucgccuacaccaugagcuuaggcgccgagaacagcguggccuacagcaacaacagcaucgcgaucccuaccaacuucaccaucagcgugaccaccgagauacugcccgugagcaugaccaagaccagcguggacuguaccauguacaucugcggcgacagcaccgagugcagcaaccugcugcugcaguacggcagcuucugcacccagcugaaccgggcccugaccggcaucgccguggagcaggacaagaacacccaagagguguucgcccaggugaagcagaucuacaagacucccccaaucaaggacuucggcggcuucaacuucagccagauccugcccgaccccagcaagcccagcaagcggagcuucaucgaggaccugcuguucaacaaggugacccuggccgacgccggcuucaucaagcaguacggcgacugccugggggauaucgccgcucgggaccugaucugcgcccagaaguucaacggccugaccgugcugcccccucugcugaccgacgagaugaucgcccaguacaccagcgcccugcuugccggcaccaucaccagcggcuggaccuucggcgccggcgcagcccugcagauccccuucgccaugcagauggccuaccgguucaacggcaucggcgugacccagaacgugcuguacgagaaccagaagcugaucgccaaccaguucaacagcgccaucggcaagauccaggacagccugagcagcaccgccagcgcccugggcaagcugcaggacguggugaaccagaacgcucaggcccugaacacccuggugaagcagcugagcagcaacuucggcgccaucagcucagugcugaacgacauccugagcaggcuggaucccccagaggccgaggugcagaucgaccggcugaucaccggccggcugcagagccugcagaccuacgugacccagcagcugauccgggccgccgagauccgggccagcgccaaucuggcagccaccaagaugagcgagugcgugcugggccagagcaagcggguggacuuuugcggcaagggcuaccaccugaugagcuucccccagagcgcuccccacggcgugguguuccuccacgugacauacguccccgcccaggagaagaacuucaccaccgcccccgccauuugccacgacggcaaggcccacuucccccgggagggaguguucgugagcaacggcacccacugguucgugacccagcggaacuucuacgagccucagaucaucaccaccgacaacaccuucgugagcggcaacugcgacguggugaucggcaucgugaacaacaccguguacgacccccugcagcccgagcuggacagcuucaaggaggagcuggacaaguacuucaagaaccacaccagcccagacguggaccugggcgacaucagcggcaucaacgccagcguggugaacauccagaaggagaucgaccggcugaacgagguggccaagaaccugaacgagagccugaucgaccugcaggagcugggcaaguacgagcaguacaucaaguggcccugguacaucuggcugggcuucaucgccggccugaucgccaucgugauggugaccaucaugcugugcugcaugaccagcugcuguagcugccugaagggcugcugcagcugcggcagcugcugcaaguucgacgaggacgacagcgagcccgugcugaagggcgugaagcugcacuacaccugaugacucgagcugguacugcaugcacgcaaugcuagcugccccuuucccguccuggguaccccgagucucccccgaccucgggucccagguaugcucccaccuccaccugccccacucaccaccucugcuaguuccagacaccucccaagcacgcagcaaugcagcucaaaacgcuuagccuagccacacccccacgggaaacagcagugauuaaccuuuagcaauaaacgaaaguuuaacuaagcuauacuaaccccaggguuggucaauuucgugccagccacacccuggagcuagcaaaaaaaaaaaaaaaaaaaaaaaaaaaaaaaaaaaaaaaaaaaaaaaaaaaaaaaaaaaaaaaaaaaaaaaaaaaaaaaaaaaaaaaaaaaaaaaaaaaa

SEQ ID NO: 26435 - RNA, 4273 nt, Artificial Sequence
  SARS-CoV-2/Wuhan/WIV05/2019__EPI_ISL_402128 spike protein mRNA gc (1-1273)(K986P_V987P_S477N_D614G)
agaauaaacuaguauucuucugguccccacagacucagagagaacccgccaccauguucguguuccuggugcugcugccccuggugagcagccagugcgugaaccugaccacccggacccagcugcccccugccuacaccaacagcuucacccggggcguguacuaccccgacaagguguuccggagcagcgugcugcacagcacccaggaccuguuccugcccuucuucagcaacgugaccugguuccacgccauccacgugagcggcaccaacggcaccaagcgguucgacaacccagugcugcccuucaacgacggcguguacuucgccagcaccgagaagucaaacaucauccggggcuggaucuucggcaccacccuggacagcaagacacagagccugcugaucgugaacaacgccaccaacguggugaucaaggugugcgaguuucaguucugcaacgaccccuuccugggcguguacuaccacaagaacaacaagagcuggauggagagcgaguuccgggucuacagcagcgcuaacaauugcaccuucgaguacgugagccagcccuuccugauggaccucgagggcaagcagggcaacuucaagaaccugcgggaguucguguucaagaacaucgauggcuacuucaagaucuacagcaagcacacccccaucaaccuggugcgggaccugccccagggauucagcgcccuggagccucugguggaccugcccaucggcaucaacaucaccagguuccagacccugcuggcccugcaccggagcuaccugacccccggcgacagcagcagcggcuggaccgccggcgccgccgcauacuacgugggcuaccugcagccacggaccuuccugcugaaguacaacgagaacggcaccaucaccgacgccguggacugcgcccuggacccccugagcgagaccaagugcacccuaaagagcuucaccguggagaagggcaucuaccagaccagcaacuuccgggugcagcccacugagagcaucgugcgguuccccaacauuaccaaccugugucccuucggcgagguguucaacgccacccgguucgccagcguguacgccuggaaccggaagcggaucagcaacugcguggccgacuacagcgugcuguacaacagcgccagcuucagcaccuucaagugcuacggcgugagcccuaccaagcugaacgaccugugcuucaccaacguguacgcugacagcuucgugauccggggcgacgaggugcggcagaucgcccccggccagaccggcaagaucgccgacuacaacuacaagcugcccgacgacuucaccggcugcgugaucgccuggaacagcaacaaccuggacagcaaggugggcggcaacuacaacuaccuguaccggcuguuccguaagagcaaccugaagccauucgagcgggacaucagcaccgagaucuaccaggccggcaacacccccugcaacgguguggagggcuuuaacugcuacuucccccugcagagcuacggcuuccagcccaccaacggcgugggcuaccagcccuaccgggugguggugcugagcuucgagcugcugcacgcccccgccaccgugugcggcccuaaaaagagcaccaaccuggugaagaacaagugcgugaauuucaacuucaacggccugaccggcaccggcgugcugaccgagagcaacaagaaguuccugcccuuccagcaguucggccgggauaucgccgacaccaccgacgcagugcgggacccccagacccuggagauccuggacaucaccccaugcagcuucggcggcgugagcgucaucacccccggcacaaacaccagcaaccagguggccgugcuguaccagggagugaacugcaccgaggugcccguggccauccacgccgaccagcugacccccaccuggcggguguacagcaccggcagcaacguguuccagacccgggccggcugccugaucggcgccgagcacgugaacaacagcuacgagugcgacauccccaucggcgcuggcaucugcgccuccuaccagacccagaccaacagcccccggcgggcccggagcguggccagccagagcaucaucgccuacaccaugagcuuaggcgccgagaacagcguggccuacagcaacaacagcaucgcgaucccuaccaacuucaccaucagcgugaccaccgagauacugcccgugagcaugaccaagaccagcguggacuguaccauguacaucugcggcgacagcaccgagugcagcaaccugcugcugcaguacggcagcuucugcacccagcugaaccgggcccugaccggcaucgccguggagcaggacaagaacacccaagagguguucgcccaggugaagcagaucuacaagacucccccaaucaaggacuucggcggcuucaacuucagccagauccugcccgaccccagcaagcccagcaagcggagcuucaucgaggaccugcuguucaacaaggugacccuggccgacgccggcuucaucaagcaguacggcgacugccugggggauaucgccgcucgggaccugaucugcgcccagaaguucaacggccugaccgugcugcccccucugcugaccgacgagaugaucgcccaguacaccagcgcccugcuugccggcaccaucaccagcggcuggaccuucggcgccggcgcagcccugcagauccccuucgccaugcagauggccuaccgguucaacggcaucggcgugacccagaacgugcuguacgagaaccagaagcugaucgccaaccaguucaacagcgccaucggcaagauccaggacagccugagcagcaccgccagcgcccugggcaagcugcaggacguggugaaccagaacgcucaggcccugaacacccuggugaagcagcugagcagcaauuucggcgccaucagcagcgugcugaacgacauccugucaaggcuggaucccccagaggccgaggugcagaucgaccggcugaucaccggccggcugcagagccugcagaccuacgugacccagcagcugauccgggccgccgagauccgggccagcgccaaccuggcagccaccaagaugagcgagugcgugcugggccagagcaagcggguggacuuuugcggcaagggcuaccaccugaugagcuucccccagagcgcuccccacggcgugguguuccuccacgugacauacguccccgcccaggagaagaacuucaccaccgcccccgccauuugccacgacggcaaggcccacuucccccgggagggaguguucgugagcaacggcacccacugguucgugacccagcggaacuucuacgagccucagaucaucaccaccgacaacaccuucgugagcggcaacugcgacguggugaucggcaucgugaacaacaccguguacgacccccugcagcccgagcuggacagcuucaaggaggagcuggacaaguacuucaagaaccacaccagcccagacguggaccugggcgacaucagcggcaucaacgccagcguggugaacauccagaaggagaucgaccggcugaacgagguggccaagaaccugaacgagagccugaucgaccugcaggagcugggcaaguacgagcaguacaucaaguggcccugguacaucuggcugggcuucaucgccggccugaucgccaucgugauggugaccaucaugcugugcugcaugaccagcugcuguagcugccugaagggcugcugcagcugcggcagcugcugcaaguucgacgaggacgacagcgagcccgugcugaagggcgugaagcugcacuacaccugaugacucgagcugguacugcaugcacgcaaugcuagcugccccuuucccguccuggguaccccgagucucccccgaccucgggucccagguaugcucccaccuccaccugccccacucaccaccucugcuaguuccagacaccucccaagcacgcagcaaugcagcucaaaacgcuuagccuagccacacccccacgggaaacagcagugauuaaccuuuagcaauaaacgaaaguuuaacuaagcuauacuaaccccaggguuggucaauuucgugccagccacacccuggagcuagcaaaaaaaaaaaaaaaaaaaaaaaaaaaaaaaaaaaaaaaaaaaaaaaaaaaaaaaaaaaaaaaaaaaaaaaaaaaaaaaaaaaaaaaaaaaaaaaaaaaa

SEQ ID NO: 26436 - RNA, 4273 nt, Artificial Sequence
  SARS-CoV-2/Wuhan/WIV05/2019__EPI_ISL_402128 spike protein mRNA gc (1-1273)(K986P_V987P_N501Y_D614G)
agaauaaacuaguauucuucugguccccacagacucagagagaacccgccaccauguucguguuccuggugcugcugccccuggugagcagccagugcgugaaccugaccacccggacccagcugcccccugccuacaccaacagcuucacccggggcguguacuaccccgacaagguguuccggagcagcgugcugcacagcacccaggaccuguuccugcccuucuucagcaacgugaccugguuccacgccauccacgugagcggcaccaacggcaccaagcgguucgacaacccagugcugcccuucaacgacggcguguacuucgccagcaccgagaagucaaacaucauccggggcuggaucuucggcaccacccuggacagcaagacacagagccugcugaucgugaacaacgccaccaacguggugaucaaggugugcgaguuucaguucugcaacgaccccuuccugggcguguacuaccacaagaacaacaagagcuggauggagagcgaguuccgggucuacagcagcgcuaacaauugcaccuucgaguacgugagccagcccuuccugauggaccucgagggcaagcagggcaacuucaagaaccugcgggaguucguguucaagaacaucgauggcuacuucaagaucuacagcaagcacacccccaucaaccuggugcgggaccugccccagggauucagcgcccuggagccucugguggaccugcccaucggcaucaacaucaccagguuccagacccugcuggcccugcaccggagcuaccugacccccggcgacagcagcagcggcuggaccgccggcgccgccgcauacuacgugggcuaccugcagccacggaccuuccugcugaaguacaacgagaacggcaccaucaccgacgccguggacugcgcccuggacccccugagcgagaccaagugcacccuaaagagcuucaccguggagaagggcaucuaccagaccagcaacuuccgggugcagcccacugagagcaucgugcgguuccccaacauuaccaaccugugucccuucggcgagguguucaacgccacccgguucgccagcguguacgccuggaaccggaagcggaucagcaacugcguggccgacuacagcgugcuguacaacagcgccagcuucagcaccuucaagugcuacggcgugagcccuaccaagcugaacgaccugugcuucaccaacguguacgcugacagcuucgugauccggggcgacgaggugcggcagaucgcccccggccagaccggcaagaucgccgacuacaacuacaagcugcccgacgacuucaccggcugcgugaucgccuggaacagcaacaaccuggacagcaaggugggcggcaacuacaacuaccuguaccggcuguuccguaagagcaaccugaagccauucgagcgggacaucagcaccgagaucuaccaggccggcagcacccccugcaacgguguggagggcuuuaacugcuacuucccccugcagagcuacggcuuccagcccaccuacggcgugggcuaccagcccuaccgggugguggugcugagcuucgagcugcugcacgcccccgccaccgugugcggcccuaaaaagagcaccaaccuggugaagaacaagugcgugaacuucaacuucaauggccugaccggcaccggcgugcugaccgagagcaacaagaaguuccugcccuuccagcaguucggccgggauaucgccgacaccaccgacgcagugcgggacccccagacccuggagauccuggacaucaccccaugcagcuucggcggcgugagcgucaucacccccggcacaaacaccagcaaccagguggccgugcuguaccagggagugaacugcaccgaggugcccguggccauccacgccgaccagcugacccccaccuggcggguguacagcaccggcagcaacguguuccagacccgggccggcugccugaucggcgccgagcacgugaacaacuccuacgagugcgacauccccaucggcgcuggcaucugcgccagcuaccagacccagaccaacagcccccggcgggcccggagcguggccagccagagcaucaucgccuacaccaugagcuuaggcgccgagaacagcguggccuacagcaacaacagcaucgcgaucccuaccaacuucaccaucagcgugaccaccgagauacugcccgugagcaugaccaagaccagcguggacuguaccauguacaucugcggcgacagcaccgagugcagcaaccugcugcugcaguacggcagcuucugcacccagcugaaccgggcccugaccggcaucgccguggagcaggacaagaacacccaagagguguucgcccaggugaagcagaucuacaagacucccccaaucaaggacuucggcggcuucaacuucagccagauccugcccgaccccagcaagcccagcaagcggagcuucaucgaggaccugcuguucaacaaggugacccuggccgacgccggcuucaucaagcaguacggcgacugccugggggauaucgccgcucgggaccugaucugcgcccagaaguucaacggccugaccgugcugcccccucugcugaccgacgagaugaucgcccaguacaccagcgcccugcuugccggcaccaucaccagcggcuggaccuucggcgccggcgcagcccugcagauccccuucgccaugcagauggccuaccgguucaacggcaucggcgugacccagaacgugcuguacgagaaccagaagcugaucgccaaccaguucaacagcgccaucggcaagauccaggacagccugagcagcaccgccagcgcccugggcaagcugcaggacguggugaaccagaacgcucaggcccugaacacccuggugaagcagcugagcagcaacuucggcgccaucagcucagugcugaacgacauccugagcaggcuggaucccccagaggccgaggugcagaucgaccggcugaucaccggccggcugcagagccugcagaccuacgugacccagcagcugauccgggccgccgagauccgggccagcgccaaucuggcagccaccaagaugagcgagugcgugcugggccagagcaagcggguggacuuuugcggcaagggcuaccaccugaugagcuucccccagagcgcuccccacggcgugguguuccuccacgugacauacguccccgcccaggagaagaacuucaccaccgcccccgccauuugccacgacggcaaggcccacuucccccgggagggaguguucgugagcaacggcacccacugguucgugacccagcggaacuucuacgagccucagaucaucaccaccgacaacaccuucgugagcggcaacugcgacguggugaucggcaucgugaacaacaccguguacgacccccugcagcccgagcuggacagcuucaaggaggagcuggacaaguacuucaagaaccacaccagcccagacguggaccugggcgacaucagcggcaucaacgccagcguggugaacauccagaaggagaucgaccggcugaacgagguggccaagaaccugaacgagagccugaucgaccugcaggagcugggcaaguacgagcaguacaucaaguggcccugguacaucuggcugggcuucaucgccggccugaucgccaucgugauggugaccaucaugcugugcugcaugaccagcugcuguagcugccugaagggcugcugcagcugcggcagcugcugcaaguucgacgaggacgacagcgagcccgugcugaagggcgugaagcugcacuacaccugaugacucgagcugguacugcaugcacgcaaugcuagcugccccuuucccguccuggguaccccgagucucccccgaccucgggucccagguaugcucccaccuccaccugccccacucaccaccucugcuaguuccagacaccucccaagcacgcagcaaugcagcucaaaacgcuuagccuagccacacccccacgggaaacagcagugauuaaccuuuagcaauaaacgaaaguuuaacuaagcuauacuaaccccaggguuggucaauuucgugccagccacacccuggagcuagcaaaaaaaaaaaaaaaaaaaaaaaaaaaaaaaaaaaaaaaaaaaaaaaaaaaaaaaaaaaaaaaaaaaaaaaaaaaaaaaaaaaaaaaaaaaaaaaaaaaa

SEQ ID NO: 26437 - RNA, 4267 nt, Artificial Sequence
  SARS-CoV-2/Wuhan/WIV05/2019__EPI_ISL_402128 spike protein mRNA gc (1-1273)(K986P_V987P_H69del_V70del_D614G)
agaauaaacuaguauucuucugguccccacagacucagagagaacccgccaccauguucguguuccuggugcugcugccccuggugagcagccagugcgugaaccugaccacccggacccagcugcccccugccuacaccaacagcuucacccggggcguguacuaccccgacaagguguuccggagcagcgugcugcacagcacccaggaccuguuccugcccuucuucagcaacgugaccugguuccacgccaucagcggcaccaacggcaccaagcgguucgacaacccagugcugcccuucaacgacggcguguacuucgccagcaccgagaagucaaacaucauccggggcuggaucuucggcaccacccuggacagcaagacacagagccugcugaucgugaacaacgccaccaacguggugaucaaggugugcgaguuucaguucugcaacgaccccuuccugggcguguacuaccacaagaacaacaagagcuggauggagagcgaguuccggguguacagcagcgcuaacaauugcaccuucgaguacgucagccagcccuuccugauggaccucgagggcaagcagggcaacuucaagaaccugcgggaguucguguucaagaacaucgauggcuacuucaagaucuacagcaagcacacccccaucaaccuggugcgggaccugccccagggauucagcgcccuggagccucugguggaccugcccaucggcaucaacaucaccagguuccagacccugcuggcccugcaccggagcuaccugacccccggcgacagcagcagcggcuggaccgccggcgccgccgcauacuacgugggcuaccugcagccacggaccuuccugcugaaguacaacgagaacggcaccaucaccgacgccguggacugcgcccuggacccccugagcgagaccaagugcacccuaaagagcuucaccguggagaagggcaucuaccagaccagcaacuuccgggugcagcccacugagagcaucgugcgguuccccaacauuaccaaccugugucccuucggcgagguguucaacgccacccgguucgccagcguguacgccuggaaccggaagcggaucagcaacugcguggccgacuacagcgugcuguacaacagcgccagcuucagcaccuucaagugcuacggcgugagcccuaccaagcugaacgaccugugcuucaccaacguguacgcugacagcuucgugauccggggcgacgaggugcggcagaucgcccccggccagaccggcaagaucgccgacuacaacuacaagcugcccgacgacuucaccggcugcgugaucgccuggaacagcaacaaccuggacagcaaggugggcggcaacuacaacuaccuguaccggcuguuccguaagagcaaccugaagccauucgagcgggacaucagcaccgagaucuaccaggccggcagcacccccugcaacgguguggagggcuuuaacugcuacuucccccugcagagcuacggcuuccagcccaccaacggcgugggcuaccagcccuaccgggugguggugcugagcuucgagcugcugcacgcccccgccaccgugugcggcccuaaaaagagcaccaaccuggugaagaacaagugcgugaacuucaauuucaacggccugaccggcaccggcgugcugaccgagagcaacaagaaguuccugcccuuccagcaguucggccgggauaucgccgacaccaccgacgcagugcgggacccccagacccuggagauccuggacaucaccccaugcagcuucggcggcgugagcgugaucacccccggcacaaacaccagcaaccaggucgccgugcuguaccagggagugaacugcaccgaggugcccguggccauccacgccgaccagcugacccccaccuggcggguguacagcaccggcagcaacguguuccagacccgggccggcugccugaucggcgccgagcacgugaacaacuccuacgagugcgacauccccaucggcgcuggcaucugcgccagcuaccagacccagaccaacagcccccggcgggcccggagcguggccagccagagcaucaucgccuacaccaugagcuuaggcgccgagaacagcguggccuacagcaacaacagcaucgcgaucccuaccaacuucaccaucagcgugaccaccgagauacugcccgugagcaugaccaagaccagcguggacuguaccauguacaucugcggcgacagcaccgagugcagcaaccugcugcugcaguacggcagcuucugcacccagcugaaccgggcccugaccggcaucgccguggagcaggacaagaacacccaagagguguucgcccaggugaagcagaucuacaagacucccccaaucaaggacuucggcggcuucaacuucagccagauccugcccgaccccagcaagcccagcaagcggagcuucaucgaggaccugcuguucaacaaggugacccuggccgacgccggcuucaucaagcaguacggcgacugccugggggauaucgccgcucgggaccugaucugcgcccagaaguucaacggccugaccgugcugcccccucugcugaccgacgagaugaucgcccaguacaccagcgcccugcuugccggcaccaucaccagcggcuggaccuucggcgccggcgcagcccugcagauccccuucgccaugcagauggccuaccgguucaacggcaucggcgugacccagaacgugcuguacgagaaccagaagcugaucgccaaccaguucaacagcgccaucggcaagauccaggacagccugagcagcaccgccagcgcccugggcaagcugcaggacguggugaaccagaacgcucaggcccugaacacccuggugaagcagcugagcagcaacuucggcgccaucagcucagugcugaaugacauccugagcaggcuggaucccccagaggccgaggugcagaucgaccggcugaucaccggccggcugcagagccugcagaccuacgugacccagcagcugauccgggccgccgagauccgggccagcgccaaccuggcagccaccaagaugagcgagugcgugcugggccagagcaagcggguggacuuuugcggcaagggcuaccaccugaugagcuucccccagagcgcuccccacggcgugguguuccuccacgugacauacgugcccgcccaggagaagaacuucaccaccgcccccgccauuugccacgacggcaaggcccacuucccccgggagggagucuucgugagcaacggcacccacugguucgugacccagcggaacuucuacgagccucagaucaucaccaccgacaacaccuucgugagcggcaacugcgacguggugaucggcaucgugaacaacaccguguacgacccccugcagcccgagcuggacagcuucaaggaggagcuggacaaguacuucaagaaccacaccagcccagacguggaccugggcgacaucagcggcaucaacgccagcguggugaacauccagaaggagaucgaccggcugaacgagguggccaagaaccugaacgagagccugaucgaccugcaggagcugggcaaguacgagcaguacaucaaguggcccugguacaucuggcugggcuucaucgccggccugaucgccaucgugauggugaccaucaugcugugcugcaugaccagcugcuguagcugccugaagggcugcugcagcugcggcagcugcugcaaguucgacgaggacgacagcgagcccgugcugaagggcgugaagcugcacuacaccugaugacucgagcugguacugcaugcacgcaaugcuagcugccccuuucccguccuggguaccccgagucucccccgaccucgggucccagguaugcucccaccuccaccugccccacucaccaccucugcuaguuccagacaccucccaagcacgcagcaaugcagcucaaaacgcuuagccuagccacacccccacgggaaacagcagugauuaaccuuuagcaauaaacgaaaguuuaacuaagcuauacuaaccccaggguuggucaauuucgugccagccacacccuggagcuagcaaaaaaaaaaaaaaaaaaaaaaaaaaaaaaaaaaaaaaaaaaaaaaaaaaaaaaaaaaaaaaaaaaaaaaaaaaaaaaaaaaaaaaaaaaaaaaaaaaaa

SEQ ID NO: 26438 - RNA, 4273 nt, Artificial Sequence
  SARS-CoV-2/Wuhan/WIV05/2019__EPI_ISL_402128 spike protein mRNA gc (1-1273)(K986P_V987P_Y453F_D614G)
agaauaaacuaguauucuucugguccccacagacucagagagaacccgccaccauguucguguuccuggugcugcugccccuggugagcagccagugcgugaaccugaccacccggacccagcugcccccugccuacaccaacagcuucacccggggcguguacuaccccgacaagguguuccggagcagcgugcugcacagcacccaggaccuguuccugcccuucuucagcaacgugaccugguuccacgccauccacgugagcggcaccaacggcaccaagcgguucgacaacccagugcugcccuucaacgacggcguguacuucgccagcaccgagaagucaaacaucauccggggcuggaucuucggcaccacccuggacagcaagacacagagccugcugaucgugaacaacgccaccaacguggugaucaaggugugcgaguuucaguucugcaacgaccccuuccugggcguguacuaccacaagaacaacaagagcuggauggagagcgaguuccgggucuacagcagcgcuaacaauugcaccuucgaguacgugagccagcccuuccugauggaccucgagggcaagcagggcaacuucaagaaccugcgggaguucguguucaagaacaucgauggcuacuucaagaucuacagcaagcacacccccaucaaccuggugcgggaccugccccagggauucagcgcccuggagccucugguggaccugcccaucggcaucaacaucaccagguuccagacccugcuggcccugcaccggagcuaccugacccccggcgacagcagcagcggcuggaccgccggcgccgccgcauacuacgugggcuaccugcagccacggaccuuccugcugaaguacaacgagaacggcaccaucaccgacgccguggacugcgcccuggacccccugagcgagaccaagugcacccuaaagagcuucaccguggagaagggcaucuaccagaccagcaacuuccgggugcagcccacugagagcaucgugcgguuccccaacauuaccaaccugugucccuucggcgagguguucaacgccacccgguucgccagcguguacgccuggaaccggaagcggaucagcaacugcguggccgacuacagcgugcuguacaacagcgccagcuucagcaccuucaagugcuacggcgugagcccuaccaagcugaacgaccugugcuucaccaacguguacgcugacagcuucgugauccggggcgacgaggugcggcagaucgcccccggccagaccggcaagaucgccgacuacaacuacaagcugcccgacgacuucaccggcugcgugaucgccuggaacagcaacaaccuggacagcaaggugggcggcaacuacaacuaccuguuccggcuguuccguaagagcaaccugaagccauuugagcgggacaucagcaccgagaucuaccaggccggcagcacccccugcaacgguguggagggcuucaacugcuacuucccccugcagagcuacggcuuccagcccaccaacggcgugggcuaccagcccuaccgggugguggugcugagcuucgagcugcugcacgcccccgccaccgugugcggcccuaaaaagagcaccaaccuggugaagaacaagugcgugaacuucaauuucaacggccugaccggcaccggcgugcugaccgagagcaacaagaaguuccugcccuuccagcaguucggccgggauaucgccgacaccaccgacgcagugcgggacccccagacccuggagauccuggacaucaccccaugcagcuucggcggcgugagcgucaucacccccggcacaaacaccagcaaccagguggccgugcuguaccagggagugaacugcaccgaggugcccguggccauccacgccgaccagcugacccccaccuggcggguguacagcaccggcagcaacguguuccagacccgggccggcugccugaucggcgccgagcacgugaacaacuccuacgagugcgacauccccaucggcgcuggcaucugcgccagcuaccagacccagaccaacagcccccggcgggcccggagcguggccagccagagcaucaucgccuacaccaugagcuuaggcgccgagaacagcguggccuacagcaacaacagcaucgcgaucccuaccaacuucaccaucagcgugaccaccgagauacugcccgugagcaugaccaagaccagcguggacuguaccauguacaucugcggcgacagcaccgagugcagcaaccugcugcugcaguacggcagcuucugcacccagcugaaccgggcccugaccggcaucgccguggagcaggacaagaacacccaagagguguucgcccaggugaagcagaucuacaagacucccccaaucaaggacuucggcggcuucaacuucagccagauccugcccgaccccagcaagcccagcaagcggagcuucaucgaggaccugcuguucaacaaggugacccuggccgacgccggcuucaucaagcaguacggcgacugccugggggauaucgccgcucgggaccugaucugcgcccagaaguucaacggccugaccgugcugcccccucugcugaccgacgagaugaucgcccaguacaccagcgcccugcuugccggcaccaucaccagcggcuggaccuucggcgccggcgcagcccugcagauccccuucgccaugcagauggccuaccgguucaacggcaucggcgugacccagaacgugcuguacgagaaccagaagcugaucgccaaccaguucaacagcgccaucggcaagauccaggacagccugagcagcaccgccagcgcccugggcaagcugcaggacguggugaaccagaacgcucaggcccugaacacccuggugaagcagcugagcagcaacuuuggcgccaucagcucagugcugaaugacauccugagcaggcuggaucccccagaggccgaggugcagaucgaccggcugaucaccggccggcugcagagccugcagaccuacgugacccagcagcugauccgggccgccgagauccgggccagcgccaaccuggcagccaccaagaugagcgagugcgugcugggccagagcaagcggguggacuucugcggcaagggcuaccaccugaugagcuucccccagagcgcuccccacggcgugguguuccuccacgugacauacguccccgcccaggagaagaacuucaccaccgcccccgccauuugccacgacggcaaggcccacuucccccgggagggaguguucgugagcaacggcacccacugguucgugacccagcggaacuucuacgagccucagaucaucaccaccgacaacaccuucgugagcggcaacugcgacguggugaucggcaucgugaacaacaccguguacgacccccugcagcccgagcuggacagcuucaaggaggagcuggacaaguacuucaagaaccacaccagcccagacguggaccugggcgacaucagcggcaucaacgccagcguggugaacauccagaaggagaucgaccggcugaacgagguggccaagaaccugaacgagagccugaucgaccugcaggagcugggcaaguacgagcaguacaucaaguggcccugguacaucuggcugggcuucaucgccggccugaucgccaucgugauggugaccaucaugcugugcugcaugaccagcugcuguagcugccugaagggcugcugcagcugcggcagcugcugcaaguucgacgaggacgacagcgagcccgugcugaagggcgugaagcugcacuacaccugaugacucgagcugguacugcaugcacgcaaugcuagcugccccuuucccguccuggguaccccgagucucccccgaccucgggucccagguaugcucccaccuccaccugccccacucaccaccucugcuaguuccagacaccucccaagcacgcagcaaugcagcucaaaacgcuuagccuagccacacccccacgggaaacagcagugauuaaccuuuagcaauaaacgaaaguuuaacuaagcuauacuaaccccaggguuggucaauuucgugccagccacacccuggagcuagcaaaaaaaaaaaaaaaaaaaaaaaaaaaaaaaaaaaaaaaaaaaaaaaaaaaaaaaaaaaaaaaaaaaaaaaaaaaaaaaaaaaaaaaaaaaaaaaaaaaa

SEQ ID NO: 26439 - RNA, 4273 nt, Artificial Sequence
  SARS-CoV-2/Wuhan/WIV05/2019__EPI_ISL_402128 spike protein mRNA gc (1-1273)(K986P_V987P_D614G_I692V)
agaauaaacuaguauucuucugguccccacagacucagagagaacccgccaccauguucguguuccuggugcugcugccccuggugagcagccagugcgugaaccugaccacccggacccagcugcccccugccuacaccaacagcuucacccggggcguguacuaccccgacaagguguuccggagcagcgugcugcacagcacccaggaccuguuccugcccuucuucagcaacgugaccugguuccacgccauccacgugagcggcaccaacggcaccaagcgguucgacaacccagugcugcccuucaacgacggcguguacuucgccagcaccgagaagucaaacaucauccggggcuggaucuucggcaccacccuggacagcaagacacagagccugcugaucgugaacaacgccaccaacguggugaucaaggugugcgaguuucaguucugcaacgaccccuuccugggcguguacuaccacaagaacaacaagagcuggauggagagcgaguuccgggucuacagcagcgcuaacaauugcaccuucgaguacgugagccagcccuuccugauggaccucgagggcaagcagggcaacuucaagaaccugcgggaguucguguucaagaacaucgauggcuacuucaagaucuacagcaagcacacccccaucaaccuggugcgggaccugccccagggauucagcgcccuggagccucugguggaccugcccaucggcaucaacaucaccagguuccagacccugcuggcccugcaccggagcuaccugacccccggcgacagcagcagcggcuggaccgccggcgccgccgcauacuacgugggcuaccugcagccacggaccuuccugcugaaguacaacgagaacggcaccaucaccgacgccguggacugcgcccuggacccccugagcgagaccaagugcacccuaaagagcuucaccguggagaagggcaucuaccagaccagcaacuuccgggugcagcccacugagagcaucgugcgguuccccaacauuaccaaccugugucccuucggcgagguguucaacgccacccgguucgccagcguguacgccuggaaccggaagcggaucagcaacugcguggccgacuacagcgugcuguacaacagcgccagcuucagcaccuucaagugcuacggcgugagcccuaccaagcugaacgaccugugcuucaccaacguguacgcugacagcuucgugauccggggcgacgaggugcggcagaucgcccccggccagaccggcaagaucgccgacuacaacuacaagcugcccgacgacuucaccggcugcgugaucgccuggaacagcaacaaccuggacagcaaggugggcggcaacuacaacuaccuguaccggcuguuccguaagagcaaccugaagccauucgagcgggacaucagcaccgagaucuaccaggccggcagcacccccugcaacgguguggagggcuuuaacugcuacuucccccugcagagcuacggcuuccagcccaccaacggcgugggcuaccagcccuaccgggugguggugcugagcuucgagcugcugcacgcccccgccaccgugugcggcccuaaaaagagcaccaaccuggugaagaacaagugcgugaacuucaauuucaacggccugaccggcaccggcgugcugaccgagagcaacaagaaguuccugcccuuccagcaguucggccgggauaucgccgacaccaccgacgcagugcgggacccccagacccuggagauccuggacaucaccccaugcagcuucggcggcgugagcgucaucacccccggcacaaacaccagcaaccagguggccgugcuguaccagggagugaacugcaccgaggugcccguggccauccacgccgaccagcugacccccaccuggcggguguacagcaccggcagcaacguguuccagacccgggccggcugccugaucggcgccgagcacgugaacaacuccuacgagugcgacauccccaucggcgcuggcaucugcgccagcuaccagacccagaccaacagcccccggcgggcccggagcguggccagccagagcgugaucgccuacaccaugagcuuaggcgccgagaacagcguggccuacagcaacaacagcaucgcgaucccuaccaacuucaccaucagcgugaccaccgagauccugcccgugagcaugaccaagaccagcguggacuguaccauguacauaugcggcgacagcaccgagugcagcaaccugcugcugcaguacggcagcuucugcacccagcugaaccgggcccugaccggcaucgccguggagcaggacaagaacacccaagagguguucgcccaggugaagcagaucuacaagacucccccaaucaaggacuucggcggcuucaacuucagccagauccugcccgaccccagcaagcccagcaagcggagcuucaucgaggaccugcuguucaacaaggugacccuggccgacgccggcuucaucaagcaguacggcgacugccugggggauaucgccgcucgggaccugaucugcgcccagaaguucaacggccugaccgugcugcccccucugcugaccgacgagaugaucgcccaguacaccagcgcccugcuugccggcaccaucaccagcggcuggaccuucggcgccggcgcagcccugcagauccccuucgccaugcagauggccuaccgguucaacggcaucggcgugacccagaacgugcuguacgagaaccagaagcugaucgccaaccaguucaacagcgccaucggcaagauccaggacagccugagcagcaccgccagcgcccugggcaagcugcaggacguggugaaccagaacgcucaggcccugaacacccuggugaagcagcugagcagcaacuucggcgccaucagcucagugcugaaugacauccugagcaggcuggaucccccagaggccgaggugcagaucgaccggcugaucaccggccggcugcagagccugcagaccuacgugacccagcagcugauccgggccgccgagauccgggccagcgccaaccuggcagccaccaagaugagcgagugcgugcugggccagagcaagcggguggacuuuugcggcaagggcuaccaccugaugagcuucccccagagcgcuccccacggcgugguguuccuccacgucacauacgugcccgcccaggagaagaacuucaccaccgcccccgccaucugccacgacggcaaggcccacuucccccgggagggaguguucgugagcaacggcacccacugguucgugacccagcggaacuucuacgagccucagauuaucaccaccgacaacaccuucgugagcggcaacugcgacguggugaucggcaucgugaacaacaccguguacgacccccugcagcccgagcuggacagcuucaaggaggagcuggacaaguacuucaagaaccacaccagcccagacguggaccugggcgacaucagcggcaucaacgccagcguggugaacauccagaaggagaucgaccggcugaacgagguggccaagaaccugaacgagagccugaucgaccugcaggagcugggcaaguacgagcaguacaucaaguggcccugguacaucuggcugggcuucaucgccggccugaucgccaucgugauggugaccaucaugcugugcugcaugaccagcugcuguagcugccugaagggcugcugcagcugcggcagcugcugcaaguucgacgaggacgacagcgagcccgugcugaagggcgugaagcugcacuacaccugaugacucgagcugguacugcaugcacgcaaugcuagcugccccuuucccguccuggguaccccgagucucccccgaccucgggucccagguaugcucccaccuccaccugccccacucaccaccucugcuaguuccagacaccucccaagcacgcagcaaugcagcucaaaacgcuuagccuagccacacccccacgggaaacagcagugauuaaccuuuagcaauaaacgaaaguuuaacuaagcuauacuaaccccaggguuggucaauuucgugccagccacacccuggagcuagcaaaaaaaaaaaaaaaaaaaaaaaaaaaaaaaaaaaaaaaaaaaaaaaaaaaaaaaaaaaaaaaaaaaaaaaaaaaaaaaaaaaaaaaaaaaaaaaaaaaa

SEQ ID NO: 26440 - RNA, 4273 nt, Artificial Sequence
  SARS-CoV-2/Wuhan/WIV05/2019__EPI_ISL_402128 spike protein mRNA gc (1-1273)(K986P_V987P_D614G_M1229I)
agaauaaacuaguauucuucugguccccacagacucagagagaacccgccaccauguucguguuccuggugcugcugccccuggugagcagccagugcgugaaccugaccacccggacccagcugcccccugccuacaccaacagcuucacccggggcguguacuaccccgacaagguguuccggagcagcgugcugcacagcacccaggaccuguuccugcccuucuucagcaacgugaccugguuccacgccauccacgugagcggcaccaacggcaccaagcgguucgacaacccagugcugcccuucaacgacggcguguacuucgccagcaccgagaagucaaacaucauccggggcuggaucuucggcaccacccuggacagcaagacacagagccugcugaucgugaacaacgccaccaacguggugaucaaggugugcgaguuucaguucugcaacgaccccuuccugggcguguacuaccacaagaacaacaagagcuggauggagagcgaguuccgggucuacagcagcgcuaacaauugcaccuucgaguacgugagccagcccuuccugauggaccucgagggcaagcagggcaacuucaagaaccugcgggaguucguguucaagaacaucgauggcuacuucaagaucuacagcaagcacacccccaucaaccuggugcgggaccugccccagggauucagcgcccuggagccucugguggaccugcccaucggcaucaacaucaccagguuccagacccugcuggcccugcaccggagcuaccugacccccggcgacagcagcagcggcuggaccgccggcgccgccgcauacuacgugggcuaccugcagccacggaccuuccugcugaaguacaacgagaacggcaccaucaccgacgccguggacugcgcccuggacccccugagcgagaccaagugcacccuaaagagcuucaccguggagaagggcaucuaccagaccagcaacuuccgggugcagcccacugagagcaucgugcgguuccccaacauuaccaaccugugucccuucggcgagguguucaacgccacccgguucgccagcguguacgccuggaaccggaagcggaucagcaacugcguggccgacuacagcgugcuguacaacagcgccagcuucagcaccuucaagugcuacggcgugagcccuaccaagcugaacgaccugugcuucaccaacguguacgcugacagcuucgugauccggggcgacgaggugcggcagaucgcccccggccagaccggcaagaucgccgacuacaacuacaagcugcccgacgacuucaccggcugcgugaucgccuggaacagcaacaaccuggacagcaaggugggcggcaacuacaacuaccuguaccggcuguuccguaagagcaaccugaagccauucgagcgggacaucagcaccgagaucuaccaggccggcagcacccccugcaacgguguggagggcuuuaacugcuacuucccccugcagagcuacggcuuccagcccaccaacggcgugggcuaccagcccuaccgggugguggugcugagcuucgagcugcugcacgcccccgccaccgugugcggcccuaaaaagagcaccaaccuggugaagaacaagugcgugaacuucaauuucaacggccugaccggcaccggcgugcugaccgagagcaacaagaaguuccugcccuuccagcaguucggccgggauaucgccgacaccaccgacgcagugcgggacccccagacccuggagauccuggacaucaccccaugcagcuucggcggcgugagcgucaucacccccggcacaaacaccagcaaccagguggccgugcuguaccagggagugaacugcaccgaggugcccguggccauccacgccgaccagcugacccccaccuggcggguguacagcaccggcagcaacguguuccagacccgggccggcugccugaucggcgccgagcacgugaacaacuccuacgagugcgacauccccaucggcgcuggcaucugcgccagcuaccagacccagaccaacagcccccggcgggcccggagcguggccagccagagcaucaucgccuacaccaugagcuuaggcgccgagaacagcguggccuacagcaacaacagcaucgcgaucccuaccaacuucaccaucagcgugaccaccgagauacugcccgugagcaugaccaagaccagcguggacuguaccauguacaucugcggcgacagcaccgagugcagcaaccugcugcugcaguacggcagcuucugcacccagcugaaccgggcccugaccggcaucgccguggagcaggacaagaacacccaagagguguucgcccaggugaagcagaucuacaagacucccccaaucaaggacuucggcggcuucaacuucagccagauccugcccgaccccagcaagcccagcaagcggagcuucaucgaggaccugcuguucaacaaggugacccuggccgacgccggcuucaucaagcaguacggcgacugccugggggauaucgccgcucgggaccugaucugcgcccagaaguucaacggccugaccgugcugcccccucugcugaccgacgagaugaucgcccaguacaccagcgcccugcuugccggcaccaucaccagcggcuggaccuucggcgccggcgcagcccugcagauccccuucgccaugcagauggccuaccgguucaacggcaucggcgugacccagaacgugcuguacgagaaccagaagcugaucgccaaccaguucaacagcgccaucggcaagauccaggacagccugagcagcaccgccagcgcccugggcaagcugcaggacguggugaaccagaacgcucaggcccugaacacccuggugaagcagcugagcagcaacuucggcgccaucagcucagugcugaaugacauccugagcaggcuggaucccccagaggccgaggugcagaucgaccggcugaucaccggccggcugcagagccugcagaccuacgugacccagcagcugauccgggccgccgagauccgggccagcgccaaccuggcagccaccaagaugagcgagugcgugcugggccagagcaagcggguggacuuuugcggcaagggcuaccaccugaugagcuucccccagagcgcuccccacggcgugguguuccuccacgugacauacguccccgcccaggagaagaacuucaccaccgcccccgccauuugccacgacggcaaggcccacuucccccgggagggaguguucgugagcaacggcacccacugguucgugacccagcggaacuucuacgagccucagaucaucaccaccgacaacaccuucgugagcggcaacugcgacguggugaucggcaucgugaacaacaccguguacgacccccugcagcccgagcuggacagcuucaaggaggagcuggacaaguacuucaagaaccacaccagcccagacguggaccugggcgacaucagcggcaucaacgccagcguggugaacauccagaaggagaucgaccggcugaacgagguggccaagaaccugaacgagagccugaucgaccugcaggagcugggcaaguacgagcaguacaucaaguggcccugguacaucuggcugggcuucaucgccggccugaucgccaucgugaucgugaccaucaugcugugcugcaugaccagcugcuguagcugccugaagggcugcugcagcugcggcagcugcugcaaguucgacgaggacgacagcgagcccgugcugaagggcgugaagcugcacuacaccugaugacucgagcugguacugcaugcacgcaaugcuagcugccccuuucccguccuggguaccccgagucucccccgaccucgggucccagguaugcucccaccuccaccugccccacucaccaccucugcuaguuccagacaccucccaagcacgcagcaaugcagcucaaaacgcuuagccuagccacacccccacgggaaacagcagugauuaaccuuuagcaauaaacgaaaguuuaacuaagcuauacuaaccccaggguuggucaauuucgugccagccacacccuggagcuagcaaaaaaaaaaaaaaaaaaaaaaaaaaaaaaaaaaaaaaaaaaaaaaaaaaaaaaaaaaaaaaaaaaaaaaaaaaaaaaaaaaaaaaaaaaaaaaaaaaaa

SEQ ID NO: 26441 - RNA, 4267 nt, Artificial Sequence
  SARS-CoV-2/Wuhan/WIV05/2019__EPI_ISL_402128 spike protein mRNA gc (1-1273)(K986P_V987P_H69del_V70del_A222V_Y453F_S477N_D614G_I692V)
agaauaaacuaguauucuucugguccccacagacucagagagaacccgccaccauguucguguuccuggugcugcugccccuggugagcagccagugcgugaaccugaccacccggacccagcugcccccugccuacaccaacagcuucacccggggcguguacuaccccgacaagguguuccggagcagcgugcugcacagcacccaggaccuguuccugcccuucuucagcaacgugaccugguuccacgccaucagcggcaccaacggcaccaagcgguucgacaacccagugcugcccuucaacgacggcguguacuucgccagcaccgagaagucaaacaucauccggggcuggaucuucggcaccacccuggacagcaagacacagagccugcugaucgugaacaacgccaccaacguggugaucaaggugugcgaguuucaguucugcaacgaccccuuccugggcguguacuaccacaagaacaacaagagcuggauggagagcgaguuccggguguacagcagcgcuaacaauugcaccuucgaguacgucagccagcccuuccugauggaccucgagggcaagcagggcaacuucaagaaccugcgggaguucguguucaagaacaucgauggcuacuucaagaucuacagcaagcacacccccaucaaccuggugcgggaccugccccagggauucagcgugcuggagccucugguggaccugcccaucggcaucaacaucaccagguuccagacccugcuggcccugcaccggagcuaccugacccccggcgacagcagcagcggcuggaccgccggcgccgccgccuacuacgugggcuaccugcagccacggaccuuccugcugaaguacaacgagaacggcaccaucaccgacgcaguggacugcgcccuggacccccugagcgagaccaagugcacccuaaagagcuucaccguggagaagggcaucuaccagaccagcaacuuccgggugcagcccacugagagcaucgugcgguuccccaacauuaccaaccugugucccuucggcgagguguucaacgccacccgguucgccagcguguacgccuggaaccggaagcggaucagcaacugcguggccgacuacagcgugcuguacaacagcgccagcuucagcaccuucaagugcuacggcgugagcccuaccaagcugaacgaccugugcuucaccaacguguacgccgacagcuucgugauccggggcgacgaggugcggcagaucgcucccggccagaccggcaagaucgccgacuacaacuacaagcugcccgacgacuucaccggcugcgugaucgccuggaacagcaacaaccuggacagcaaggugggcggcaacuacaacuaccuguuccggcuguuccguaagagcaaccugaagccauuugagcgggacaucagcaccgagaucuaccaggccggcaacacccccugcaacgguguggagggcuucaacugcuacuucccccugcagagcuacggcuuccagcccaccaacggcgugggcuaccagcccuaccgggugguggugcugagcuucgagcugcugcacgcccccgccaccgugugcggcccuaaaaagagcaccaaccuggugaagaacaagugcgugaauuucaacuucaacggccugaccggcaccggcgugcugaccgagagcaacaagaaguuccugcccuuccagcaguucggccgggauaucgccgacaccaccgacgccgugcgggacccccagacccuggagauccuggacaucaccccaugcagcuucggcggcgugagcgucaucacccccggcacaaacaccagcaaccagguggcagugcuguaccagggagugaacugcaccgaggugcccguggccauccacgccgaccagcugacccccaccuggcggguguacagcaccggcagcaacguguuccagacccgggccggcugccugaucggcgccgagcacgugaacaacagcuacgagugcgacauccccaucggcgccggcaucugcgcuuccuaccagacccagaccaacagcccccggcgggcccggagcguggccagccagagcgugaucgccuacaccaugagcuuaggcgccgagaacagcguggccuacagcaacaacagcaucgccaucccuaccaacuucaccaucagcgugaccaccgagauccugcccgugagcaugaccaagaccagcguggacuguaccauguacauaugcggcgacagcaccgagugcagcaaccugcugcugcaguacggcagcuucugcacccagcugaaccgggcgcugaccggcaucgccguggagcaggacaagaacacccaagagguguucgcccaggugaagcagaucuacaagacucccccaaucaaggacuucggcggcuucaacuucagccagauccugcccgaccccagcaagcccagcaagcggagcuucaucgaggaccugcuguucaacaaggugacccuggccgacgccggcuucaucaagcaguacggcgacugccugggggauaucgccgcccgggaccugaucugcgcucagaaguucaacggccugaccgugcugcccccucugcugaccgacgagaugaucgcccaguacaccagcgcccugcuugccggcaccaucaccagcggcuggaccuucggcgccggcgccgcacugcagauccccuucgccaugcagauggccuaccgguucaacggcaucggcgugacccagaacgugcuguacgagaaccagaagcugaucgccaaccaguucaacagcgccaucggcaagauccaggacagccugagcagcaccgccagcgcccugggcaagcugcaggacguggugaaccagaacgcccaggcucugaacacccuggugaagcagcugagcagcaauuuuggcgccaucagcagcgugcugaacgacauccugucaaggcuggaucccccagaggccgaggugcagaucgaccggcugaucaccggccggcugcagagccugcagaccuacgugacccagcagcugauccgggccgccgagauccgggccagcgccaaccuggccgcaaccaagaugagcgagugcgugcugggccagagcaagcggguggacuucugcggcaagggcuaccaccugaugagcuucccccagagcgcuccccacggcgugguguuccuccacgucacauacgugcccgcccaggagaagaacuucaccaccgcccccgccaucugccacgacggcaaggcccacuucccccgggagggaguguucgugagcaacggcacccacugguucgugacccagcggaacuucuacgagccucagauuaucaccaccgacaacaccuucgugagcggcaacugcgacguggugaucggcaucgugaacaacaccguguacgacccccugcagcccgagcuggacagcuucaaggaggagcuggacaaguacuucaagaaccacaccagcccagacguggaccugggcgacaucagcggcaucaacgccagcguggugaacauccagaaggagaucgaccggcugaacgagguggccaagaaccugaacgagagccugaucgaccugcaggagcugggcaaguacgagcaguacaucaaguggcccugguacaucuggcugggcuucaucgccggccugaucgccaucgugauggugaccaucaugcugugcugcaugaccagcugcuguagcugccugaagggcugcugcagcugcggcagcugcugcaaguucgacgaggacgacagcgagcccgugcugaagggcgugaagcugcacuacaccugaugacucgagcugguacugcaugcacgcaaugcuagcugccccuuucccguccuggguaccccgagucucccccgaccucgggucccagguaugcucccaccuccaccugccccacucaccaccucugcuaguuccagacaccucccaagcacgcagcaaugcagcucaaaacgcuuagccuagccacacccccacgggaaacagcagugauuaaccuuuagcaauaaacgaaaguuuaacuaagcuauacuaaccccaggguuggucaauuucgugccagccacacccuggagcuagcaaaaaaaaaaaaaaaaaaaaaaaaaaaaaaaaaaaaaaaaaaaaaaaaaaaaaaaaaaaaaaaaaaaaaaaaaaaaaaaaaaaaaaaaaaaaaaaaaaaa

SEQ ID NO: 26442 - RNA, 4267 nt, Artificial Sequence
  SARS-CoV-2/Wuhan/WIV05/2019__EPI_ISL_402128 spike protein mRNA gc (1-1273)(K986P_V987P_H69del_V70del_Y453F_D614G_I692V_M1229I)
agaauaaacuaguauucuucugguccccacagacucagagagaacccgccaccauguucguguuccuggugcugcugccccuggugagcagccagugcgugaaccugaccacccggacccagcugcccccugccuacaccaacagcuucacccggggcguguacuaccccgacaagguguuccggagcagcgugcugcacagcacccaggaccuguuccugcccuucuucagcaacgugaccugguuccacgccaucagcggcaccaacggcaccaagcgguucgacaacccagugcugcccuucaacgacggcguguacuucgccagcaccgagaagucaaacaucauccggggcuggaucuucggcaccacccuggacagcaagacacagagccugcugaucgugaacaacgccaccaacguggugaucaaggugugcgaguuucaguucugcaacgaccccuuccugggcguguacuaccacaagaacaacaagagcuggauggagagcgaguuccggguguacagcagcgcuaacaauugcaccuucgaguacgucagccagcccuuccugauggaccucgagggcaagcagggcaacuucaagaaccugcgggaguucguguucaagaacaucgauggcuacuucaagaucuacagcaagcacacccccaucaaccuggugcgggaccugccccagggauucagcgcccuggagccucugguggaccugcccaucggcaucaacaucaccagguuccagacccugcuggcccugcaccggagcuaccugacccccggcgacagcagcagcggcuggaccgccggcgccgccgcauacuacgugggcuaccugcagccacggaccuuccugcugaaguacaacgagaacggcaccaucaccgacgccguggacugcgcccuggacccccugagcgagaccaagugcacccuaaagagcuucaccguggagaagggcaucuaccagaccagcaacuuccgggugcagcccacugagagcaucgugcgguuccccaacauuaccaaccugugucccuucggcgagguguucaacgccacccgguucgccagcguguacgccuggaaccggaagcggaucagcaacugcguggccgacuacagcgugcuguacaacagcgccagcuucagcaccuucaagugcuacggcgugagcccuaccaagcugaacgaccugugcuucaccaacguguacgcugacagcuucgugauccggggcgacgaggugcggcagaucgcccccggccagaccggcaagaucgccgacuacaacuacaagcugcccgacgacuucaccggcugcgugaucgccuggaacagcaacaaccuggacagcaaggugggcggcaacuacaacuaccuguuccggcuguuccguaagagcaaccugaagccauuugagcgggacaucagcaccgagaucuaccaggccggcagcacccccugcaacgguguggagggcuucaacugcuacuucccccugcagagcuacggcuuccagcccaccaacggcgugggcuaccagcccuaccgggugguggugcugagcuucgagcugcugcacgcccccgccaccgugugcggcccuaaaaagagcaccaaccuggugaagaacaagugcgugaacuucaauuucaacggccugaccggcaccggcgugcugaccgagagcaacaagaaguuccugcccuuccagcaguucggccgggauaucgccgacaccaccgacgcagugcgggacccccagacccuggagauccuggacaucaccccaugcagcuucggcggcgugagcgugaucacccccggcacaaacaccagcaaccaggucgccgugcuguaccagggagugaacugcaccgaggugcccguggccauccacgccgaccagcugacccccaccuggcggguguacagcaccggcagcaacguguuccagacccgggccggcugccugaucggcgccgagcacgugaacaacuccuacgagugcgacauccccaucggcgcuggcaucugcgccagcuaccagacccagaccaacagcccccggcgggcccggagcguggccagccagagcgugaucgccuacaccaugagcuuaggcgccgagaacagcguggccuacagcaacaacagcaucgcgaucccuaccaacuucaccaucagcgugaccaccgagauccugcccgugagcaugaccaagaccagcguggacuguaccauguacauaugcggcgacagcaccgagugcagcaaccugcugcugcaguacggcagcuucugcacccagcugaaccgggcccugaccggcaucgccguggagcaggacaagaacacccaagagguguucgcccaggugaagcagaucuacaagacucccccaaucaaggacuucggcggcuucaacuucagccagauccugcccgaccccagcaagcccagcaagcggagcuucaucgaggaccugcuguucaacaaggugacccuggccgacgccggcuucaucaagcaguacggcgacugccugggggauaucgccgcucgggaccugaucugcgcccagaaguucaacggccugaccgugcugcccccucugcugaccgacgagaugaucgcccaguacaccagcgcccugcuugccggcaccaucaccagcggcuggaccuucggcgccggcgcagcccugcagauccccuucgccaugcagauggccuaccgguucaacggcaucggcgugacccagaacgugcuguacgagaaccagaagcugaucgccaaccaguucaacagcgccaucggcaagauccaggacagccugagcagcaccgccagcgcccugggcaagcugcaggacguggugaaccagaacgcucaggcccugaacacccuggugaagcagcugagcagcaacuuuggcgccaucagcucagugcugaaugacauccugagcaggcuggaucccccagaggccgaggugcagaucgaccggcugaucaccggccggcugcagagccugcagaccuacgugacccagcagcugauccgggccgccgagauccgggccagcgccaaccuggcagccaccaagaugagcgagugcgugcugggccagagcaagcggguggacuucugcggcaagggcuaccaccugaugagcuucccccagagcgcuccccacggcgugguguuccuccacgugacauacguccccgcccaggagaagaacuucaccaccgcccccgccaucugccacgacggcaaggcccacuucccccgggagggaguguucgugagcaacggcacccacugguucgugacccagcggaacuucuacgagccucagauuaucaccaccgacaacaccuucgugagcggcaacugcgacguggugaucggcaucgugaacaacaccguguacgacccccugcagcccgagcuggacagcuucaaggaggagcuggacaaguacuucaagaaccacaccagcccagacguggaccugggcgacaucagcggcaucaacgccagcguggugaacauccagaaggagaucgaccggcugaacgagguggccaagaaccugaacgagagccugaucgaccugcaggagcugggcaaguacgagcaguacaucaaguggcccugguacaucuggcugggcuucaucgccggccugaucgccaucgugaucgugaccaucaugcugugcugcaugaccagcugcuguagcugccugaagggcugcugcagcugcggcagcugcugcaaguucgacgaggacgacagcgagcccgugcugaagggcgugaagcugcacuacaccugaugacucgagcugguacugcaugcacgcaaugcuagcugccccuuucccguccuggguaccccgagucucccccgaccucgggucccagguaugcucccaccuccaccugccccacucaccaccucugcuaguuccagacaccucccaagcacgcagcaaugcagcucaaaacgcuuagccuagccacacccccacgggaaacagcagugauuaaccuuuagcaauaaacgaaaguuuaacuaagcuauacuaaccccaggguuggucaauuucgugccagccacacccuggagcuagcaaaaaaaaaaaaaaaaaaaaaaaaaaaaaaaaaaaaaaaaaaaaaaaaaaaaaaaaaaaaaaaaaaaaaaaaaaaaaaaaaaaaaaaaaaaaaaaaaaaa

SEQ ID NO: 26443 - RNA, 4264 nt, Artificial Sequence
  SARS-CoV-2/Wuhan/WIV05/2019__EPI_ISL_402128 spike protein mRNA gc (1-1273)(K986P_V987P_K986P_V987P_H69del_V70del_Y144del_N501Y_A570 D_D614G_P681H_T716I_S982A_D1118H)
agaauaaacuaguauucuucugguccccacagacucagagagaacccgccaccauguucguguuccuggugcugcugccccuggugagcagccagugcgugaaccugaccacccggacccagcugcccccugccuacaccaacagcuucacccggggcguguacuaccccgacaagguguuccggagcagcgugcugcacagcacccaggaccuguuccugcccuucuucagcaacgugaccugguuccacgccaucagcggcaccaacggcaccaagcgguucgacaacccagugcugcccuucaacgacggcguguacuucgccagcaccgagaagucaaacaucauccggggcuggaucuucggcaccacccuggacagcaagacacagagccugcugaucgugaacaacgccaccaacguggugaucaaggugugcgaguuucaguucugcaacgaccccuuccugggcguguaccacaagaacaacaagagcuggauggagagcgaguuccggguguacagcagcgcuaacaauugcaccuucgaguacgucagccagcccuuccugauggaccucgagggcaagcagggcaacuucaagaaccugcgggaguucguguucaagaacaucgauggcuacuucaagaucuacagcaagcacacccccaucaaccuggugcgggaccugccccagggauucagcgcccuggagccucugguggaccugcccaucggcaucaacaucaccagguuccagacccugcuggcccugcaccggagcuaccugacccccggcgacagcagcagcggcuggaccgccggcgccgccgcauacuacgugggcuaccugcagccacggaccuuccugcugaaguacaacgagaacggcaccaucaccgacgccguggacugcgcccuggacccccugagcgagaccaagugcacccuaaagagcuucaccguggagaagggcaucuaccagaccagcaacuuccgggugcagcccacugagagcaucgugcgguuccccaacauuaccaaccugugucccuucggcgagguguucaacgccacccgguucgccagcguguacgccuggaaccggaagcggaucagcaacugcguggccgacuacagcgugcuguacaacagcgccagcuucagcaccuucaagugcuacggcgugagcccuaccaagcugaacgaccugugcuucaccaacguguacgcugacagcuucgugauccggggcgacgaggugcggcagaucgcccccggccagaccggcaagaucgccgacuacaacuacaagcugcccgacgacuucaccggcugcgugaucgccuggaacagcaacaaccuggacagcaaggugggcggcaacuacaacuaccuguaccggcuguuccguaagagcaaccugaagccauucgagcgggacaucagcaccgagaucuaccaggccggcagcacccccugcaacgguguggagggcuuuaacugcuacuucccccugcagagcuacggcuuccagcccaccuacggcgugggcuaccagcccuaccgggugguggugcugagcuucgagcugcugcacgcccccgccaccgugugcggcccuaaaaagagcaccaaccuggugaagaacaagugcgugaacuucaacuucaauggccugaccggcaccggcgugcugaccgagagcaacaagaaguuccugcccuuccagcaguucggccgggauaucgacgacaccaccgacgccgugcgggacccccagacccuggagauccuggacaucaccccaugcagcuucggcggcgugagcgugaucacccccggcacaaacaccagcaaccaggucgcagugcuguaccagggagugaacugcaccgaggugcccguggccauccacgccgaccagcugacccccaccuggcggguguacagcaccggcagcaacguguuccagacccgggccggcugccugaucggcgccgagcacgugaacaacuccuacgagugcgacauccccaucggcgccggcaucugcgcuagcuaccagacccagaccaacagccaccggcgggcccggagcguggccagccagagcaucaucgccuacaccaugagcuuaggcgccgagaacagcguggccuacagcaacaacagcaucgccauccccaucaacuucaccauaagcgugaccaccgagauccugccugugagcaugaccaagaccagcguggacuguaccauguacaucugcggcgacagcaccgagugcagcaaccugcugcugcaguacggcagcuucugcacccagcugaaccgggcgcugaccggcaucgccguggagcaggacaagaacacccaagagguguucgcccaggugaagcagaucuacaagaccccacccaucaaggacuucggcggcuucaacuucagccagauccugcccgaccccagcaagcccagcaagcggagcuucaucgaggaccugcuguucaacaaggugacucuggccgacgccggcuucaucaagcaguacggcgauugccugggggacaucgccgcccgggaccugaucugcgcucagaaguucaacggccugaccgugcugccuccccugcugaccgacgagaugaucgcccaguacaccagcgcccugcuugccggcaccaucaccagcggcuggaccuucggcgccggcgccgcacugcagauccccuucgccaugcagauggccuaccgguucaacggcaucggcgugacccagaacgugcuguacgagaaccagaagcugaucgccaaccaguucaacagcgccaucggcaagauccaggacagccugagcagcaccgccagcgcccugggcaagcugcaggacguggugaaccagaacgcccaggcucugaacacccuggugaagcagcugagcagcaacuucggcgccaucagcucagugcugaacgacauccuggccaggcuggacccacccgaggccgaggugcagaucgaccggcugaucaccggccggcugcagagccugcagaccuacgugacccagcagcugauccgggccgccgagauucgggccagcgccaaucuggcagccaccaagaugagcgagugcgugcugggccagagcaagcggguggacuuuugcggcaagggcuaccaccugaugagcuucccccagagcgcuccccacggcgugguguuccuccacgugaccuacgugcccgcccaggagaagaacuucacaaccgcccccgccaucugccacgacggcaaggcccacuucccccgggagggagucuucgugagcaacggcacccacugguucgugacccagcggaacuucuacgagccccagaucaucaccacccacaacaccuucgugagcggcaacugcgacguggugaucggcaucgugaacaacaccguguacgacccucugcagcccgagcuggacagcuucaaggaggagcuggacaaguacuucaagaaccacaccagccccgacguggaucugggcgacaucagcggcaucaacgccagcguggugaacauccagaaggagaucgaccggcugaacgagguggccaagaaccugaacgagagccugaucgaccugcaggagcugggcaaguacgagcaguacaucaaguggccaugguacaucuggcugggcuucaucgccggccugaucgccaucgugauggugaccaucaugcugugcugcaugaccagcugcuguagcugccugaagggcugcugcagcugcggcagcugcugcaaguucgacgaggacgacagcgagcccgugcugaagggcgugaagcugcacuacaccugaugacucgagcugguacugcaugcacgcaaugcuagcugccccuuucccguccuggguaccccgagucucccccgaccucgggucccagguaugcucccaccuccaccugccccacucaccaccucugcuaguuccagacaccucccaagcacgcagcaaugcagcucaaaacgcuuagccuagccacacccccacgggaaacagcagugauuaaccuuuagcaauaaacgaaaguuuaacuaagcuauacuaaccccaggguuggucaauuucgugccagccacacccuggagcuagcaaaaaaaaaaaaaaaaaaaaaaaaaaaaaaaaaaaaaaaaaaaaaaaaaaaaaaaaaaaaaaaaaaaaaaaaaaaaaaaaaaaaaaaaaaaaaaaaaaaa

SEQ ID NO: 26444 - RNA, 4273 nt, Artificial Sequence
  SARS-CoV-2/Wuhan/WIV05/2019__EPI_ISL_402128 spike protein mRNA gc (1-1273)(K986P_V987P_K986P_V987P_K417N_E484K_N501Y_D614G)
agaauaaacuaguauucuucugguccccacagacucagagagaacccgccaccauguucguguuccuggugcugcugccccuggugagcagccagugcgugaaccugaccacccggacccagcugcccccugccuacaccaacagcuucacccggggcguguacuaccccgacaagguguuccggagcagcgugcugcacagcacccaggaccuguuccugcccuucuucagcaacgugaccugguuccacgccauccacgugagcggcaccaacggcaccaagcgguucgacaacccagugcugcccuucaacgacggcguguacuucgccagcaccgagaagucaaacaucauccggggcuggaucuucggcaccacccuggacagcaagacacagagccugcugaucgugaacaacgccaccaacguggugaucaaggugugcgaguuucaguucugcaacgaccccuuccugggcguguacuaccacaagaacaacaagagcuggauggagagcgaguuccgggucuacagcagcgcuaacaauugcaccuucgaguacgugagccagcccuuccugauggaccucgagggcaagcagggcaacuucaagaaccugcgggaguucguguucaagaacaucgauggcuacuucaagaucuacagcaagcacacccccaucaaccuggugcgggaccugccccagggauucagcgcccuggagccucugguggaccugcccaucggcaucaacaucaccagguuccagacccugcuggcccugcaccggagcuaccugacccccggcgacagcagcagcggcuggaccgccggcgccgccgcauacuacgugggcuaccugcagccacggaccuuccugcugaaguacaacgagaacggcaccaucaccgacgccguggacugcgcccuggacccccugagcgagaccaagugcacccuaaagagcuucaccguggagaagggcaucuaccagaccagcaacuuccgggugcagcccacugagagcaucgugcgguuccccaacauuaccaaccugugucccuucggcgagguguucaacgccacccgguucgccagcguguacgccuggaaccggaagcggaucagcaacugcguggccgacuacagcgugcuguacaacagcgccagcuucagcaccuucaagugcuacggcgugagcccuaccaagcugaacgaccugugcuucaccaacguguacgcugacagcuucgugauccggggcgacgaggugcggcagaucgcccccggccagaccggcaacaucgccgacuacaacuacaagcugcccgacgacuucaccggcugcgugaucgccuggaacagcaacaaccuggacagcaaggugggcggcaacuacaacuaccuguaccggcuguuccguaagagcaaccugaagccauucgagcgggacaucagcaccgagaucuaccaggccggcagcacccccugcaacggugugaagggcuuuaacugcuacuucccccugcagagcuacggcuuccagcccaccuacggcgugggcuaccagcccuaccgggugguggugcugagcuucgagcugcugcacgcccccgccaccgugugcggcccuaaaaagagcaccaaccuggugaagaacaagugcgugaacuucaauuucaacggccugaccggcaccggcgugcugaccgagagcaacaagaaguuccugcccuuccagcaguucggccgggauaucgccgacaccaccgacgcagugcgggacccccagacccuggagauccuggacaucaccccaugcagcuucggcggcgugagcgucaucacccccggcacaaacaccagcaaccagguggccgugcuguaccagggagugaacugcaccgaggugcccguggccauccacgccgaccagcugacccccaccuggcggguguacagcaccggcagcaacguguuccagacccgggccggcugccugaucggcgccgagcacgugaacaacuccuacgagugcgacauccccaucggcgcuggcaucugcgccagcuaccagacccagaccaacagcccccggcgggcccggagcguggccagccagagcaucaucgccuacaccaugagcuuaggcgccgagaacagcguggccuacagcaacaacagcaucgcgaucccuaccaacuucaccaucagcgugaccaccgagauacugcccgugagcaugaccaagaccagcguggacuguaccauguacaucugcggcgacagcaccgagugcagcaaccugcugcugcaguacggcagcuucugcacccagcugaaccgggcccugaccggcaucgccguggagcaggacaagaacacccaagagguguucgcccaggugaagcagaucuacaagacucccccaaucaaggacuucggcggcuucaacuucagccagauccugcccgaccccagcaagcccagcaagcggagcuucaucgaggaccugcuguucaacaaggugacccuggccgacgccggcuucaucaagcaguacggcgacugccugggggauaucgccgcucgggaccugaucugcgcccagaaguucaacggccugaccgugcugcccccucugcugaccgacgagaugaucgcccaguacaccagcgcccugcuugccggcaccaucaccagcggcuggaccuucggcgccggcgcagcccugcagauccccuucgccaugcagauggccuaccgguucaacggcaucggcgugacccagaacgugcuguacgagaaccagaagcugaucgccaaccaguucaacagcgccaucggcaagauccaggacagccugagcagcaccgccagcgcccugggcaagcugcaggacguggugaaccagaacgcucaggcccugaacacccuggugaagcagcugagcagcaacuucggcgccaucagcucagugcugaaugacauccugagcaggcuggaucccccagaggccgaggugcagaucgaccggcugaucaccggccggcugcagagccugcagaccuacgugacccagcagcugauccgggccgccgagauccgggccagcgccaaccuggcagccaccaagaugagcgagugcgugcugggccagagcaagcggguggacuuuugcggcaagggcuaccaccugaugagcuucccccagagcgcuccccacggcgugguguuccuccacgugacauacguccccgcccaggagaagaacuucaccaccgcccccgccauuugccacgacggcaaggcccacuucccccgggagggaguguucgugagcaacggcacccacugguucgugacccagcggaacuucuacgagccucagaucaucaccaccgacaacaccuucgugagcggcaacugcgacguggugaucggcaucgugaacaacaccguguacgacccccugcagcccgagcuggacagcuucaaggaggagcuggacaaguacuucaagaaccacaccagcccagacguggaccugggcgacaucagcggcaucaacgccagcguggugaacauccagaaggagaucgaccggcugaacgagguggccaagaaccugaacgagagccugaucgaccugcaggagcugggcaaguacgagcaguacaucaaguggcccugguacaucuggcugggcuucaucgccggccugaucgccaucgugauggugaccaucaugcugugcugcaugaccagcugcuguagcugccugaagggcugcugcagcugcggcagcugcugcaaguucgacgaggacgacagcgagcccgugcugaagggcgugaagcugcacuacaccugaugacucgagcugguacugcaugcacgcaaugcuagcugccccuuucccguccuggguaccccgagucucccccgaccucgggucccagguaugcucccaccuccaccugccccacucaccaccucugcuaguuccagacaccucccaagcacgcagcaaugcagcucaaaacgcuuagccuagccacacccccacgggaaacagcagugauuaaccuuuagcaauaaacgaaaguuuaacuaagcuauacuaaccccaggguuggucaauuucgugccagccacacccuggagcuagcaaaaaaaaaaaaaaaaaaaaaaaaaaaaaaaaaaaaaaaaaaaaaaaaaaaaaaaaaaaaaaaaaaaaaaaaaaaaaaaaaaaaaaaaaaaaaaaaaaaa

SEQ ID NO: 26445 - RNA, 4264 nt, Artificial Sequence
  SARS-CoV-2/Wuhan/WIV05/2019__EPI_ISL_402128 spike protein mRNA gc (1-1273)(K986P_V987P_K986P_V987P_L18F_D80A_D215G_L242del_A243del_ L244del_R246I_K417N_E484K_N501Y_D614G_A701V)
agaauaaacuaguauucuucugguccccacagacucagagagaacccgccaccauguucguguuccuggugcugcugccccuggugagcagccagugcgugaacuucaccacccggacccagcugcccccugccuacaccaacagcuucacccggggcguguacuaccccgacaagguguuccggagcagcgugcugcacagcacccaggaccuguuccugcccuucuucagcaacgugaccugguuccacgccauccacgugagcggcaccaacggcaccaagcgguucgccaacccagugcugcccuucaacgacggcguguacuucgccagcaccgagaagucaaacaucauccggggcuggaucuuuggcaccacccuggacagcaagacacagagccugcugaucgugaacaacgcuaccaacguggugaucaaggugugcgaguuccaguucugcaacgaccccuuccugggcguguacuaccacaagaacaacaagagcuggauggagagcgaguuccgggucuacagcagcgccaacaauugcaccuucgaguacgugagccagcccuuccugauggaccuggagggcaagcagggcaacuucaagaaccuccgggaguucguguucaagaacaucgacggcuacuucaagaucuacagcaagcacacccccaucaaccuggugcggggacugccccagggcuucagcgcccuggagccucugguggaucugcccaucggcaucaacaucaccagguuccagacccugcacaucagcuaccugacccccggcgacagcagcagcggcuggaccgccggcgccgccgcauacuacgugggcuaccugcagccacggaccuuccugcugaaguacaacgagaacggcaccaucaccgacgccguggacugcgcccuggacccccugagcgagaccaagugcacccuuaagagcuucaccguggagaagggcaucuaccagaccagcaacuuccgggugcagcccacugagagcauugugcgguuccccaacaucaccaaccugugucccuucggcgagguguucaacgccacccgguucgccagcguguacgccuggaaccggaagcggaucagcaacugcguggccgacuacagcgugcuguacaacagcgccagcuucagcaccuucaagugcuacggcgugagcccuaccaagcugaacgaccugugcuucaccaacguguacgcugacagcuucgugauccggggcgacgaggugcggcagaucgcccccggccagaccggcaacaucgccgacuacaacuacaagcugcccgacgacuucaccggcugcgugaucgccuggaacagcaacaaccuggacagcaaggugggcggcaacuacaacuaccuguaccggcuauuccguaagagcaaccugaagccauuugagcgggacaucagcaccgagaucuaccaggccgguagcacccccugcaacggcgugaagggcuucaacugcuacuucccccugcagagcuacggcuuccagcccaccuacggcgugggcuaccagcccuaccgggugguggugcugagcuucgagcugcugcacgcccccgccaccgugugcggcccuaaaaagagcaccaaccuggugaagaacaagugcgugaacuucaauuucaacggccugaccggcaccggcgugcugaccgagagcaacaagaaguuccugcccuuccagcaguucggccgggacaucgccgacaccaccgaugcagugcgggacccccagacccuggagauccuggacaucaccccaugcagcuucggcggcgugagcgucaucacccccggaacaaacaccagcaaccagguggccgugcuguaccagggcgugaacugcaccgaggugcccguggccauccacgccgaccagcugacccccaccuggcggguguacagcaccggcagcaacguguuccagacccgggccggcugccugaucggcgccgagcacgugaacaacuccuacgagugcgacauccccaucggcgcuggcaucugcgccagcuaccagacccagaccaacagcccccggcgggcccggagcguggccagccagagcaucaucgccuacaccaugagccugggcguggagaacagcguggccuacagcaacaacagcaucgccaucccuaccaacuucaccauaagcgugaccaccgagauccugcccgugagcaugaccaagaccagcguggacuguaccauguacaucugcggcgacagcaccgagugcagcaaccuguuacugcaguacggcagcuucugcacccagcugaaccgggcgcugaccggcaucgccguggagcaggacaagaacacccaagagguguucgcccaggugaagcagaucuacaagacucccccaaucaaggacuucggcggcuucaacuucagccagauccugcccgaccccagcaagcccagcaagcggagcuucaucgaggaccugcuguucaacaaggugacccuggccgacgccggcuucaucaagcaguacggggacugccugggcgacaucgccgcccgggaccugaucugcgcucagaaguucaacggccugaccgugcugcccccucugcugaccgaugagaugaucgcccaguacaccagcgcccugcuggccggcaccaucaccagcggcuggaccuucggcgccggcgccgcacugcagauccccuucgccaugcagauggccuaccgguucaacggcaucggcgugacccagaacgugcuguacgagaaccagaagcugaucgccaaccaguucaacagcgccaucggcaagauccaggacagccugagcagcaccgccagcgcccugggcaagcugcaggacguggugaaccagaacgcccaggcucugaacacccuggugaagcagcugagcagcaacuuuggcgccaucagcucagugcugaaugacauccugagccggcuggaucccccagaggccgaggugcagaucgacaggcugaucaccggccggcugcagagccugcagaccuacgugacccagcagcugauccgggccgccgagauucgggccagcgccaaccuggccgcaaccaagaugagcgagugcgugcugggccagagcaagcggguggacuucugcggcaagggcuaccaccugaugagcuucccccagagcgcuccccacggcgugguguuccugcacgucacauacgugcccgcccaggagaagaacuucaccaccgcccccgccaucugccacgacggaaaggcccacuucccccgggagggcguguucgugagcaacggcacccacugguucgugacccagcggaacuucuacgagccucagaucaucaccaccgacaacaccuucgugagcggcaacugcgacguggugaucggcaucgugaacaacaccguguacgacccccugcagcccgagcuggacagcuucaaggaggagcucgacaaguacuucaagaaccacaccagcccagacguggaccugggcgacaucagcggcaucaacgccagcguggugaacauccagaaggagaucgaccggcugaacgagguggccaagaaccugaacgagagccugaucgaccugcaggagcugggcaaguacgagcaguacaucaaguggcccugguacaucuggcugggcuucaucgccggccugaucgccaucgugauggugaccaucaugcugugcugcaugaccagcugcuguagcugccugaagggcugcugcagcugcggcagcugcugcaaguucgacgaggacgacagcgagcccgugcugaagggcgugaagcugcacuacaccugaugacucgagcugguacugcaugcacgcaaugcuagcugccccuuucccguccuggguaccccgagucucccccgaccucgggucccagguaugcucccaccuccaccugccccacucaccaccucugcuaguuccagacaccucccaagcacgcagcaaugcagcucaaaacgcuuagccuagccacacccccacgggaaacagcagugauuaaccuuuagcaauaaacgaaaguuuaacuaagcuauacuaaccccaggguuggucaauuucgugccagccacacccuggagcuagcaaaaaaaaaaaaaaaaaaaaaaaaaaaaaaaaaaaaaaaaaaaaaaaaaaaaaaaaaaaaaaaaaaaaaaaaaaaaaaaaaaaaaaaaaaaaaaaaaaaa

SEQ ID NO: 26446 - RNA, 4273 nt, Artificial Sequence
  SARS-CoV-2/Wuhan/WIV05/2019__EPI_ISL_402128 spike protein mRNA gc (1-1273)(K986P_V987P_K986P_V987P_E484K_D614G)
agaauaaacuaguauucuucugguccccacagacucagagagaacccgccaccauguucguguuccuggugcugcugccccuggugagcagccagugcgugaaccugaccacccggacccagcugcccccugccuacaccaacagcuucacccggggcguguacuaccccgacaagguguuccggagcagcgugcugcacagcacccaggaccuguuccugcccuucuucagcaacgugaccugguuccacgccauccacgugagcggcaccaacggcaccaagcgguucgacaacccagugcugcccuucaacgacggcguguacuucgccagcaccgagaagucaaacaucauccggggcuggaucuucggcaccacccuggacagcaagacacagagccugcugaucgugaacaacgccaccaacguggugaucaaggugugcgaguuucaguucugcaacgaccccuuccugggcguguacuaccacaagaacaacaagagcuggauggagagcgaguuccgggucuacagcagcgcuaacaauugcaccuucgaguacgugagccagcccuuccugauggaccucgagggcaagcagggcaacuucaagaaccugcgggaguucguguucaagaacaucgauggcuacuucaagaucuacagcaagcacacccccaucaaccuggugcgggaccugccccagggauucagcgcccuggagccucugguggaccugcccaucggcaucaacaucaccagguuccagacccugcuggcccugcaccggagcuaccugacccccggcgacagcagcagcggcuggaccgccggcgccgccgcauacuacgugggcuaccugcagccacggaccuuccugcugaaguacaacgagaacggcaccaucaccgacgccguggacugcgcccuggacccccugagcgagaccaagugcacccuaaagagcuucaccguggagaagggcaucuaccagaccagcaacuuccgggugcagcccacugagagcaucgugcgguuccccaacauuaccaaccugugucccuucggcgagguguucaacgccacccgguucgccagcguguacgccuggaaccggaagcggaucagcaacugcguggccgacuacagcgugcuguacaacagcgccagcuucagcaccuucaagugcuacggcgugagcccuaccaagcugaacgaccugugcuucaccaacguguacgcugacagcuucgugauccggggcgacgaggugcggcagaucgcccccggccagaccggcaagaucgccgacuacaacuacaagcugcccgacgacuucaccggcugcgugaucgccuggaacagcaacaaccuggacagcaaggugggcggcaacuacaacuaccuguaccggcuguuccguaagagcaaccugaagccauucgagcgggacaucagcaccgagaucuaccaggccggcagcacccccugcaacggugugaagggcuuuaacugcuacuucccccugcagagcuacggcuuccagcccaccaacggcgugggcuaccagcccuaccgggugguggugcugagcuucgagcugcugcacgcccccgccaccgugugcggcccuaaaaagagcaccaaccuggugaagaacaagugcgugaacuucaauuucaacggccugaccggcaccggcgugcugaccgagagcaacaagaaguuccugcccuuccagcaguucggccgggauaucgccgacaccaccgacgcagugcgggacccccagacccuggagauccuggacaucaccccaugcagcuucggcggcgugagcgucaucacccccggcacaaacaccagcaaccagguggccgugcuguaccagggagugaacugcaccgaggugcccguggccauccacgccgaccagcugacccccaccuggcggguguacagcaccggcagcaacguguuccagacccgggccggcugccugaucggcgccgagcacgugaacaacuccuacgagugcgacauccccaucggcgcuggcaucugcgccagcuaccagacccagaccaacagcccccggcgggcccggagcguggccagccagagcaucaucgccuacaccaugagcuuaggcgccgagaacagcguggccuacagcaacaacagcaucgcgaucccuaccaacuucaccaucagcgugaccaccgagauacugcccgugagcaugaccaagaccagcguggacuguaccauguacaucugcggcgacagcaccgagugcagcaaccugcugcugcaguacggcagcuucugcacccagcugaaccgggcccugaccggcaucgccguggagcaggacaagaacacccaagagguguucgcccaggugaagcagaucuacaagacucccccaaucaaggacuucggcggcuucaacuucagccagauccugcccgaccccagcaagcccagcaagcggagcuucaucgaggaccugcuguucaacaaggugacccuggccgacgccggcuucaucaagcaguacggcgacugccugggggauaucgccgcucgggaccugaucugcgcccagaaguucaacggccugaccgugcugcccccucugcugaccgacgagaugaucgcccaguacaccagcgcccugcuugccggcaccaucaccagcggcuggaccuucggcgccggcgcagcccugcagauccccuucgccaugcagauggccuaccgguucaacggcaucggcgugacccagaacgugcuguacgagaaccagaagcugaucgccaaccaguucaacagcgccaucggcaagauccaggacagccugagcagcaccgccagcgcccugggcaagcugcaggacguggugaaccagaacgcucaggcccugaacacccuggugaagcagcugagcagcaacuucggcgccaucagcucagugcugaaugacauccugagcaggcuggaucccccagaggccgaggugcagaucgaccggcugaucaccggccggcugcagagccugcagaccuacgugacccagcagcugauccgggccgccgagauccgggccagcgccaaccuggcagccaccaagaugagcgagugcgugcugggccagagcaagcggguggacuuuugcggcaagggcuaccaccugaugagcuucccccagagcgcuccccacggcgugguguuccuccacgugacauacguccccgcccaggagaagaacuucaccaccgcccccgccauuugccacgacggcaaggcccacuucccccgggagggaguguucgugagcaacggcacccacugguucgugacccagcggaacuucuacgagccucagaucaucaccaccgacaacaccuucgugagcggcaacugcgacguggugaucggcaucgugaacaacaccguguacgacccccugcagcccgagcuggacagcuucaaggaggagcuggacaaguacuucaagaaccacaccagcccagacguggaccugggcgacaucagcggcaucaacgccagcguggugaacauccagaaggagaucgaccggcugaacgagguggccaagaaccugaacgagagccugaucgaccugcaggagcugggcaaguacgagcaguacaucaaguggcccugguacaucuggcugggcuucaucgccggccugaucgccaucgugauggugaccaucaugcugugcugcaugaccagcugcuguagcugccugaagggcugcugcagcugcggcagcugcugcaaguucgacgaggacgacagcgagcccgugcugaagggcgugaagcugcacuacaccugaugacucgagcugguacugcaugcacgcaaugcuagcugccccuuucccguccuggguaccccgagucucccccgaccucgggucccagguaugcucccaccuccaccugccccacucaccaccucugcuaguuccagacaccucccaagcacgcagcaaugcagcucaaaacgcuuagccuagccacacccccacgggaaacagcagugauuaaccuuuagcaauaaacgaaaguuuaacuaagcuauacuaaccccaggguuggucaauuucgugccagccacacccuggagcuagcaaaaaaaaaaaaaaaaaaaaaaaaaaaaaaaaaaaaaaaaaaaaaaaaaaaaaaaaaaaaaaaaaaaaaaaaaaaaaaaaaaaaaaaaaaaaaaaaaaaa

SEQ ID NO: 26447 - RNA, 4273 nt, Artificial Sequence
  SARS-CoV-2/Wuhan/WIV05/2019__EPI_ISL_402128 spike protein mRNA gc (1-1273)(K986P_V987P_K986P_V987P_L18F_T20N_P26S_D138Y_R190S_K417T _E484K_N501Y_D614G_H655Y_T1027I)
agaauaaacuaguauucuucugguccccacagacucagagagaacccgccaccauguucguguuccuggugcugcugccccuggugagcagccagugcgugaacuucaccaaccggacccagcugcccagcgccuacaccaacagcuucacccggggcguguacuacccugacaagguguuccggagcagcgugcugcacagcacccaggaccuguuccugcccuucuucagcaacgugaccugguuccacgccauccacgugagcggcaccaacggcaccaagcgguucgacaaccccgugcugccauucaacgacggcguguacuucgccagcaccgagaagucaaacaucauccggggcuggaucuuuggcaccacccuggacagcaagacccagagccugcugaucgugaacaacgccacaaacguggugaucaaggugugcgaguuccaguucugcaacuaccccuuccugggcguguacuaccacaagaacaacaagagcuggauggagagcgaguuccgggucuacagcagcgcuaauaacugcaccuucgaguacgugagccagcccuuccugauggaccuggagggcaagcagggcaacuucaagaaccucagcgaguucguguucaagaacaucgacggcuacuucaagaucuacagcaagcacacccccaucaaccuggugcgggaucugccccagggauucagcgcccuggagccccugguggaccugccuaucggcaucaacaucacccgguuccagacccugcuggcccugcacaggagcuaccugacccccggcgacagcagcagcggcuggaccgccggcgccgccgcauacuacgugggcuaccugcagccccggaccuuccugcugaaguacaacgagaacggcaccaucaccgacgccguggacugcgcccuggacccacugagcgagaccaagugcacccuaaagagcuucaccguggagaagggcaucuaccagaccagcaacuuccgggugcagcccaccgagagcaucgugcgguuccccaacauuacuaaccugugucccuucggcgagguguucaacgccacccgguucgccagcguguacgccuggaaccggaagcggaucagcaacugcguggccgacuacagcgugcuguacaacagcgccagcuucagcaccuucaagugcuacggcgugagccccaccaagcugaacgaccugugcuucaccaacguguacgcugacagcuucgugauccggggcgacgaggugcggcagaucgccccuggccagaccggcaccaucgccgacuacaacuacaagcugcccgacgacuucaccggcugcgugaucgccuggaacagcaacaaccuggacagcaaggugggcggcaacuacaacuaccuguaccggcuguuccguaagagcaaccugaagcccuuugagcgggacaucagcaccgagaucuaccaggccggcagcaccccaugcaacggugugaagggcuucaacugcuacuucccccugcagagcuacggcuuccagcccaccuacggcgugggcuaccagcccuaccgggugguggugcugagcuucgagcugcugcacgcccccgccaccgugugcggccccaaaaagagcaccaaccuggugaagaacaagugcgugaacuucaauuucaacggccugaccggcaccggcgugcugaccgagagcaacaagaaguuccugccuuuccagcaguucggccgggacaucgccgauaccaccgacgcagugcgggacccccagacccuggagauccuggacaucacccccugcagcuucggcggcgugagcgucaucaccccaggcacaaacaccagcaaccagguggccgugcuguaccagggagugaacugcaccgaggugcccguggccauccacgccgaccagcugacccccaccuggcggguguacuccaccggcagcaacguguuccagacccgggccggcugccugaucggcgccgaguacgugaacaacagcuacgagugcgacauccccaucggcgcuggcaucugcgccagcuaccagacccagaccaacagcccccggcgggcccggagcguggccagccagagcaucaucgccuacaccaugagccugggcgccgagaacagcguggccuacagcaacaacagcaucgcgauccccaccaacuucaccaucagcgugaccaccgagauauuaccugugagcaugaccaagaccagcguggacuguaccauguacaucugcggcgacagcaccgagugcagcaaccugcugcugcaguacggcagcuucugcacccagcugaaccgggcccugaccggcaucgccguggagcaggacaagaacacccaagagguguucgcccaggugaagcagaucuacaagacuccacccaucaaggacuucggcggcuucaacuucagccagauccugcccgaccccagcaagcccagcaagcggagcuucaucgaggaccugcuguucaacaaggugacccuggccgacgccggcuucaucaagcaguacggcgacugccugggggacaucgccgcucgggaucugaucugcgcccagaaguucaacggccugaccgugcugccuccccugcugaccgacgagaugaucgcccaguacaccagcgcccugcuggccggcaccaucaccagcggcuggaccuucggcgccggcgcagcccuucagauccccuucgccaugcagauggccuaccgguucaacggcaucggcgugacccagaacgugcuguacgagaaccagaagcugaucgccaaccaguucaacagcgccaucggcaagauccaggacagccugagcagcaccgccagcgcccugggcaagcugcaggacguggugaaccagaacgcucaggcccugaacacccuggugaagcagcugagcucaaacuuuggcgccaucagcagcgugcugaaugacauccugagccggcuggacccacccgaggccgaggugcagaucgacaggcugaucaccggccggcugcagagccugcagaccuacgugacccagcagcugauccgggccgccgagauccgggccagcgccaaccuggcagccauuaagaugagcgagugcgugcugggccagagcaagcggguggacuucugcggcaagggcuaccaccugaugagcuucccccagagcgcuccccacggcgugguguuccugcacgugaccuacguccccgcccaggagaagaacuucacaaccgcccccgccaucugccacgacggcaaggcccacuucccccgggagggaguguucgugagcaacggcacccacugguucgugacccagcggaacuucuacgagccccagaucaucaccaccgacaacaccuucgugagcggcaacugcgacguggugaucggcaucgugaacaacaccguguacgacccucuccagcccgagcuggacagcuucaaggaggagcuggacaaguacuucaagaaccacaccagccccgacguggaccugggcgauaucagcggcaucaacgccagcguggugaacauccagaaggagaucgaccggcugaacgagguggccaagaaccugaacgagagccugaucgaccugcaggagcugggcaaguacgagcaguacaucaaguggccaugguacaucuggcugggcuucaucgccggccugaucgccaucgugauggugaccaucaugcugugcugcaugaccagcugcuguagcugccugaagggcugcugcagcugcggcagcugcugcaaguucgacgaggacgacagcgagcccgugcugaagggcgugaagcugcacuacaccugaugacucgagcugguacugcaugcacgcaaugcuagcugccccuuucccguccuggguaccccgagucucccccgaccucgggucccagguaugcucccaccuccaccugccccacucaccaccucugcuaguuccagacaccucccaagcacgcagcaaugcagcucaaaacgcuuagccuagccacacccccacgggaaacagcagugauuaaccuuuagcaauaaacgaaaguuuaacuaagcuauacuaaccccaggguuggucaauuucgugccagccacacccuggagcuagcaaaaaaaaaaaaaaaaaaaaaaaaaaaaaaaaaaaaaaaaaaaaaaaaaaaaaaaaaaaaaaaaaaaaaaaaaaaaaaaaaaaaaaaaaaaaaaaaaaaa

SEQ ID NO: 26448 - RNA, 4273 nt, Artificial Sequence
  SARS-CoV-2/Wuhan/WIV05/2019__EPI_ISL_402128 spike protein mRNA gc (1-1273)(K986P_V987P_K986P_V987P_S13I_W152C_L452R_D614G)
agaauaaacuaguauucuucugguccccacagacucagagagaacccgccaccauguucguguuccuggugcugcugccccuggugagcauccagugcgugaaccugaccacccggacccagcugcccccugccuacaccaacagcuucacccggggcguguacuaccccgacaagguguuccggagcagcgugcugcacagcacccaggaccuguuccugcccuucuucagcaacgugaccugguuccacgccauccacgugagcggcaccaacggcaccaagcgguucgacaacccagugcugcccuucaacgacggcguguacuucgccagcaccgagaagucaaacaucauccggggcuggaucuucggcaccacccuggacagcaagacacagagccugcugaucgugaacaacgccaccaacguggugaucaaggugugcgaguuucaguucugcaacgaccccuuccugggcguguacuaccacaagaacaacaagagcugcauggagagcgaguuccgggucuacagcagcgcuaacaauugcaccuucgaguacgugagccagcccuuccugauggaccucgagggcaagcagggcaacuucaagaaccugcgggaguucguguucaagaacaucgauggcuacuucaagaucuacagcaagcacacccccaucaaccuggugcgggaccugccccagggauucagcgcccuggagccucugguggaccugcccaucggcaucaacaucaccagguuccagacccugcuggcccugcaccggagcuaccugacccccggcgacagcagcagcggcuggaccgccggcgccgccgcauacuacgugggcuaccugcagccacggaccuuccugcugaaguacaacgagaacggcaccaucaccgacgccguggacugcgcccuggacccccugagcgagaccaaguguacccuaaagagcuucaccguggagaagggcaucuaccagaccagcaacuuccgggugcagcccacugagagcauugugcgguuccccaacaucaccaaccugugccccuucggcgagguguucaacgccacccgguucgccagcguguacgccuggaaccggaagcggaucagcaacugcguggccgacuacagcgugcuguacaacagcgccagcuucagcaccuucaagugcuacggcgugagcccuaccaagcugaacgaccugugcuucaccaacguguacgcugacagcuucgugauccggggcgacgaggugcggcagaucgcccccggccagaccggcaagaucgccgacuacaacuacaagcugcccgacgacuucaccggcugcgugaucgccuggaacagcaacaaccuggacagcaaggugggcggcaacuacaacuaccgguaccggcuguuccguaagagcaaccugaagccauucgagcgggacaucagcaccgagaucuaccaggccggcagcacccccugcaacgguguggagggcuuuaacugcuacuucccccugcagagcuacggcuuccagcccaccaacggcgugggcuaccagcccuaccgggugguggugcugagcuucgagcugcugcacgcccccgccaccgugugcggcccuaaaaagagcaccaaccuggugaagaacaagugcgugaacuucaauuucaacggccugaccggcaccggcgugcugaccgagagcaacaagaaguuccugcccuuccagcaguucggccgggauaucgccgacaccaccgacgcagugcgggacccccagacccuggagauccuggacaucaccccaugcagcuucggcggcgugagcgucaucacccccggcacaaacaccagcaaccagguggccgugcuguaccagggagugaacugcaccgaggugcccguggccauccacgccgaccagcugacccccaccuggcggguguacagcaccggcagcaacguguuccagacccgggccggcugccugaucggcgccgagcacgugaacaacagcuacgagugcgacauccccaucggcgcuggcaucugugccuccuaccagacccagaccaacagcccccggcgggcccggagcguggccagccagagcaucaucgccuacaccaugagccugggcgccgagaacagcguggccuacagcaacaacagcaucgcgaucccuaccaacuucaccauaagcgugaccaccgagaucuuacccgugagcaugaccaagaccagcguggacugcaccauguacaucugcggcgacagcaccgagugcagcaaccugcugcugcaguacggcagcuucugcacccagcugaaccgggcccugaccggcaucgccguggagcaggacaagaacacccaagagguguucgcccaggugaagcagaucuacaagacucccccaaucaaggacuucggcggcuucaacuucagccagauccugcccgaccccagcaagcccagcaagcggagcuucaucgaggaccugcuguucaacaaggugacccuggccgacgccggcuucaucaagcaguacggcgacugccugggggauaucgccgcucgggaccugaucugcgcccagaaguucaacggccugaccgugcugcccccucugcugaccgacgagaugaucgcccaguacaccagcgcccugcuggccggcaccaucaccagcggcuggaccuucggcgccggcgcagcccuucagauccccuucgccaugcagauggccuacagguucaacggcaucggcgugacccagaacgugcuguacgagaaccagaagcugaucgccaaccaguucaacagcgccaucggcaagauccaggacagccugagcagcaccgccagcgcccugggcaagcugcaggacguggugaaccagaacgcucaggcccugaacacccuggugaagcagcugagcagcaacuucggcgccaucagcagcgugcugaaugacauccugucacggcuggaucccccagaggccgaggugcagaucgaccggcugaucaccggccggcugcagagccugcagaccuacgugacccagcagcugauccgggccgccgagauucgggccagcgccaaccuggcagccaccaagaugagcgagugcgugcugggccagagcaagcggguggacuuuugcggcaagggcuaccaccugaugagcuucccccagagcgcuccccacggcgugguguuccugcacgugacauacguccccgcccaggagaagaacuucaccaccgcccccgccaucugccacgacggcaaggcccacuucccccgggagggaguguucgugagcaacggcacccacugguucgugacccagcggaacuucuacgagccucagaucaucaccaccgacaacaccuucgugagcggcaacugcgacguggugaucggcaucgugaacaacaccguguacgacccccuccagcccgagcuggacagcuucaaggaggagcuggacaaguacuucaagaaccacaccagcccagacguggaccugggcgacaucagcggcaucaacgccagcguggugaacauccagaaggagaucgaccggcugaacgagguggccaagaaccugaacgagagccugaucgaccugcaggagcugggcaaguacgagcaguacaucaaguggcccugguacaucuggcugggcuucaucgccggccugaucgccaucgugauggugaccaucaugcugugcugcaugaccagcuguugcagcugccugaagggcugcugcagcugcggcagcugcugcaaguucgacgaggacgacagcgagcccgugcugaagggcgugaagcugcacuacaccugaugacucgagcugguacugcaugcacgcaaugcuagcugccccuuucccguccuggguaccccgagucucccccgaccucgggucccagguaugcucccaccuccaccugccccacucaccaccucugcuaguuccagacaccucccaagcacgcagcaaugcagcucaaaacgcuuagccuagccacacccccacgggaaacagcagugauuaaccuuuagcaauaaacgaaaguuuaacuaagcuauacuaaccccaggguuggucaauuucgugccagccacacccuggagcuagcaaaaaaaaaaaaaaaaaaaaaaaaaaaaaaaaaaaaaaaaaaaaaaaaaaaaaaaaaaaaaaaaaaaaaaaaaaaaaaaaaaaaaaaaaaaaaaaaaaaa

SEQ ID NO: 26449 - RNA, 4273 nt, Artificial Sequence
  SARS-CoV-2/Wuhan/WIV05/2019__EPI_ISL_402128 spike protein mRNA gc mod (1-1273)(K986P_V987P)
agaauaaacuaguauucuucugguccccacagacucagagagaacccgccaccauguucguguuucuggugcugcugccccugguguccagccagugugugaaccugaccaccagaacacagcugccuccagccuacaccaacagcuucaccagaggcguguacuaccccgacaagguguucagauccagcgugcugcacucuacccaggaccuguuccugccuuucuucagcaacgugaccugguuccacgccauccacguguccggcaccaauggcaccaagagauucgacaaccccgugcugcccuucaacgacgggguguacuuugccagcaccgagaaguccaacaucaucagaggcuggaucuucggcaccacacuggacagcaagacccagagccugcugaucgugaacaacgccaccaacguggucaucaaagugugcgaguuccaguucugcaacgaccccuuccugggcgucuacuaccacaagaacaacaagagcuggauggaaagcgaguuccggguguacagcagcgccaacaacugcaccuucgaguacgugucccagccuuuccugauggaccuggaaggcaagcagggcaacuucaagaaccugcgcgaguucguguucaagaacaucgacggcuacuucaaaaucuacagcaagcacaccccuaucaaccucgugcgggaucugccucagggcuucucugcucuggaaccccugguggaucugcccaucggcaucaacaucacccgguuucagacacugcuggcccugcacagaagcuaccugacaccuggcgauagcagcagcggauggacagcuggugccgccgcuuacuaugugggcuaccugcagccuagaaccuuccugcugaaguacaacgagaacggcaccaucaccgacgccguggauugugcucuggauccucugagcgagacaaagugcacccugaaguccuucaccguggaaaagggcaucuaccagaccagcaacuuccgggugcagcccaccgaauccaucgugcgguuccccaauaucaccaaucugugccccuucggcgagguguucaaugccaccagauucgccucuguguacgccuggaaccggaagcggaucagcaauugcguggccgacuacuccgugcuguacaacuccgccagcuucagcaccuucaagugcuacggcguguccccuaccaagcugaacgaccugugcuucacaaacguguacgccgacagcuucgugauccggggagaugaagugcggcagauugccccuggacagacaggcaagaucgccgacuacaacuacaagcugcccgacgacuucaccggcugugugauugccuggaacagcaacaaccuggacuccaaagucggcggcaacuacaauuaccuguaccggcuguuccggaaguccaaucugaagcccuucgagcgggacaucagcaccgaaaucuaucaggccggcagcaccccuugcaacggcguggaaggcuucaacugcuacuucccacugcaguccuacggcuuucagcccacaaauggcgugggcuaucagcccuacagagugguggugcugagcuucgaacugcugcaugcuccugccacagugugcggcccuaagaaaagcaccaaucucgugaagaacaaaugcgugaacuucaacuucaacggccugaccggcaccggcgugcugacagagagcaacaagaaguuccugccauuccagcaguuuggccgggauaucgccgauaccacagacgccguuagagauccccagacacuggaaauccuggacaucaccccaugcagcuucggcggagugucugugaucaccccuggcaccaacaccagcaaucagguggcagugcuguaccaggacgugaacuguaccgaagugcccguggccauucacgccgaucagcugacaccuacauggcggguguacuccaccggcagcaauguguuucagaccagagccggcugucugaucggagccgagcacgugaacaauagcuacgagugcgacauccccaucggcgcuggcaucugugccagcuaccagacacagacaaacagccccagacgggcuagaagcguggccagccagagcaucauugccuacacaaugucucugggcgccgagaacagcguggccuacuccaacaacucuaucgcuauccccaccaacuucaccaucagcgugaccaccgagauccugccuguguccaugaccaagaccagcguggacugcaccauguacaucugcggcgauuccaccgagugcuccaaccugcugcugcaguacggcagcuucugcacccagcugaauagagcccugacagggaucgccguggaacaggacaagaacacccaagagguguucgcccaagugaagcaaaucuacaagaccccuccuaucaaggacuucggcggcuucaauuucagccagauucugcccgauccuagcaagcccagcaagcggagcuucaucgaggaccugcuguucaacaaagugacacuggccgacgccggcuucaucaagcaguauggcgauugucugggcgacauugccgccagggaucugauuugcgcccagaaguuuaacggacugacagugcugccuccucugcugaccgaugagaugaucgcccaguacacaucugcccugcuggccggcacaaucacaagcggcuggacauuuggagcuggcgccgcucugcagauccccuuugcuaugcagauggccuaccgguucaacggcaucggagugacccagaaugugcuguacgagaaccagaagcugaucgccaaccaguucaacagcgccaucggcaagauccaggacagccugagcagcacagcaagcgcccugggaaagcugcaggacguggucaaccagaaugcccaggcacugaacacccuggucaagcagcuguccuccaacuucggcgccaucagcucugugcugaacgauauccugagcagacuggacccuccugaggccgaggugcagaucgacagacugaucacaggcagacugcagagccuccagacauacgugacccagcagcugaucagagccgccgagauuagagccucugccaaucuggccgccaccaagaugucugagugugugcugggccagagcaagagaguggacuuuugcggcaagggcuaccaccugaugagcuucccucagucugccccucacggcgugguguuucugcacgugacauaugugcccgcucaagagaagaauuucaccaccgcuccagccaucugccacgacggcaaagcccacuuuccuagagaaggcguguucguguccaacggcacccauugguucgugacacagcggaacuucuacgagccccagaucaucaccaccgacaacaccuucgugucuggcaacugcgacguugugaucggcauugugaacaauaccguguacgacccucugcagcccgagcuggacagcuucaaagaggaacuggacaaguacuuuaagaaccacacaagccccgacguggaccugggcgauaucagcggaaucaaugccagcgucgugaacauccagaaagagaucgaccggcugaacgagguggccaagaaucugaacgagagccugaucgaccugcaagaacuggggaaguacgagcaguacaucaaguggcccugguacaucuggcugggcuuuaucgccggacugauugccaucgugauggucacaaucaugcuguguugcaugaccagcugcuguagcugccugaagggcuguuguagcuguggcagcugcugcaaguucgacgaggacgauucugagcccgugcugaagggcgugaaacugcacuacaccugaugacucgagcugguacugcaugcacgcaaugcuagcugccccuuucccguccuggguaccccgagucucccccgaccucgggucccagguaugcucccaccuccaccugccccacucaccaccucugcuaguuccagacaccucccaagcacgcagcaaugcagcucaaaacgcuuagccuagccacacccccacgggaaacagcagugauuaaccuuuagcaauaaacgaaaguuuaacuaagcuauacuaaccccaggguuggucaauuucgugccagccacacccuggagcuagcaaaaaaaaaaaaaaaaaaaaaaaaaaaaaaaaaaaaaaaaaaaaaaaaaaaaaaaaaaaaaaaaaaaaaaaaaaaaaaaaaaaaaaaaaaaaaaaaaaaa

SEQ ID NO: 26450 - RNA, 4273 nt, Artificial Sequence
  SARS-CoV-2/Wuhan/WIV05/2019__EPI_ISL_402128 spike protein mRNA gc mod (1-1273)(K986P_V987P_ D614G)
agaauaaacuaguauucuucugguccccacagacucagagagaacccgccaccauguucguguuucuggugcugcugccccugguguccagccagugugugaaccugaccaccagaacacagcugccuccagccuacaccaacagcuucaccagaggcguguacuaccccgacaagguguucagauccagcgugcugcacucuacccaggaccuguuccugccuuucuucagcaacgugaccugguuccacgccauccacguguccggcaccaauggcaccaagagauucgacaaccccgugcugcccuucaacgacgggguguacuuugccagcaccgagaaguccaacaucaucagaggcuggaucuucggcaccacacuggacagcaagacccagagccugcugaucgugaacaacgccaccaacguggucaucaaagugugcgaguuccaguucugcaacgaccccuuccugggcgucuacuaccacaagaacaacaagagcuggauggaaagcgaguuccggguguacagcagcgccaacaacugcaccuucgaguacgugucccagccuuuccugauggaccuggaaggcaagcagggcaacuucaagaaccugcgcgaguucguguucaagaacaucgacggcuacuucaaaaucuacagcaagcacaccccuaucaaccucgugcgggaucugccucagggcuucucugcucuggaaccccugguggaucugcccaucggcaucaacaucacccgguuucagacacugcuggcccugcacagaagcuaccugacaccuggcgauagcagcagcggauggacagcuggugccgccgcuuacuaugugggcuaccugcagccuagaaccuuccugcugaaguacaacgagaacggcaccaucaccgacgccguggauugugcucuggauccucugagcgagacaaagugcacccugaaguccuucaccguggaaaagggcaucuaccagaccagcaacuuccgggugcagcccaccgaauccaucgugcgguuccccaauaucaccaaucugugccccuucggcgagguguucaaugccaccagauucgccucuguguacgccuggaaccggaagcggaucagcaauugcguggccgacuacuccgugcuguacaacuccgccagcuucagcaccuucaagugcuacggcguguccccuaccaagcugaacgaccugugcuucacaaacguguacgccgacagcuucgugauccggggagaugaagugcggcagauugccccuggacagacaggcaagaucgccgacuacaacuacaagcugcccgacgacuucaccggcugugugauugccuggaacagcaacaaccuggacuccaaagucggcggcaacuacaauuaccuguaccggcuguuccggaaguccaaucugaagcccuucgagcgggacaucagcaccgaaaucuaucaggccggcagcaccccuugcaacggcguggaaggcuucaacugcuacuucccacugcaguccuacggcuuucagcccacaaauggcgugggcuaucagcccuacagagugguggugcugagcuucgaacugcugcaugcuccugccacagugugcggcccuaagaaaagcaccaaucucgugaagaacaaaugcgugaacuucaacuucaacggccugaccggcaccggcgugcugacagagagcaacaagaaguuccugccauuccagcaguuuggccgggauaucgccgauaccacagacgccguuagagauccccagacacuggaaauccuggacaucaccccaugcagcuucggcggagugucugugaucaccccuggcaccaacaccagcaaucagguggcagugcuguaccagggcgugaacuguaccgaagugcccguggccauucacgccgaucagcugacaccuacauggcggguguacuccaccggcagcaauguguuucagaccagagccggcugucugaucggagccgagcacgugaacaauagcuacgagugcgacauccccaucggcgcuggcaucugugccagcuaccagacacagacaaacagccccagacgggcuagaagcguggccagccagagcaucauugccuacacaaugucucugggcgccgagaacagcguggccuacuccaacaacucuaucgcuauccccaccaacuucaccaucagcgugaccaccgagauccugccuguguccaugaccaagaccagcguggacugcaccauguacaucugcggcgauuccaccgagugcuccaaccugcugcugcaguacggcagcuucugcacccagcugaauagagcccugacagggaucgccguggaacaggacaagaacacccaagagguguucgcccaagugaagcaaaucuacaagaccccuccuaucaaggacuucggcggcuucaauuucagccagauucugcccgauccuagcaagcccagcaagcggagcuucaucgaggaccugcuguucaacaaagugacacuggccgacgccggcuucaucaagcaguauggcgauugucugggcgacauugccgccagggaucugauuugcgcccagaaguuuaacggacugacagugcugccuccucugcugaccgaugagaugaucgcccaguacacaucugcccugcuggccggcacaaucacaagcggcuggacauuuggagcuggcgccgcucugcagauccccuuugcuaugcagauggccuaccgguucaacggcaucggagugacccagaaugugcuguacgagaaccagaagcugaucgccaaccaguucaacagcgccaucggcaagauccaggacagccugagcagcacagcaagcgcccugggaaagcugcaggacguggucaaccagaaugcccaggcacugaacacccuggucaagcagcuguccuccaacuucggcgccaucagcucugugcugaacgauauccugagcagacuggacccuccugaggccgaggugcagaucgacagacugaucacaggcagacugcagagccuccagacauacgugacccagcagcugaucagagccgccgagauuagagccucugccaaucuggccgccaccaagaugucugagugugugcugggccagagcaagagaguggacuuuugcggcaagggcuaccaccugaugagcuucccucagucugccccucacggcgugguguuucugcacgugacauaugugcccgcucaagagaagaauuucaccaccgcuccagccaucugccacgacggcaaagcccacuuuccuagagaaggcguguucguguccaacggcacccauugguucgugacacagcggaacuucuacgagccccagaucaucaccaccgacaacaccuucgugucuggcaacugcgacguugugaucggcauugugaacaauaccguguacgacccucugcagcccgagcuggacagcuucaaagaggaacuggacaaguacuuuaagaaccacacaagccccgacguggaccugggcgauaucagcggaaucaaugccagcgucgugaacauccagaaagagaucgaccggcugaacgagguggccaagaaucugaacgagagccugaucgaccugcaagaacuggggaaguacgagcaguacaucaaguggcccugguacaucuggcugggcuuuaucgccggacugauugccaucgugauggucacaaucaugcuguguugcaugaccagcugcuguagcugccugaagggcuguuguagcuguggcagcugcugcaaguucgacgaggacgauucugagcccgugcugaagggcgugaaacugcacuacaccugaugacucgagcugguacugcaugcacgcaaugcuagcugccccuuucccguccuggguaccccgagucucccccgaccucgggucccagguaugcucccaccuccaccugccccacucaccaccucugcuaguuccagacaccucccaagcacgcagcaaugcagcucaaaacgcuuagccuagccacacccccacgggaaacagcagugauuaaccuuuagcaauaaacgaaaguuuaacuaagcuauacuaaccccaggguuggucaauuucgugccagccacacccuggagcuagcaaaaaaaaaaaaaaaaaaaaaaaaaaaaaaaaaaaaaaaaaaaaaaaaaaaaaaaaaaaaaaaaaaaaaaaaaaaaaaaaaaaaaaaaaaaaaaaaaaaa

SEQ ID NO: 26451 - RNA, 4273 nt, Artificial Sequence
  SARS-CoV-2/Wuhan/WIV05/2019__EPI_ISL_402128 spike protein mRNA gc mod (1-1273)(K986P_V987P_A222V_D614G)
agaauaaacuaguauucuucugguccccacagacucagagagaacccgccaccauguucguguuucuggugcugcugccccugguguccagccagugugugaaccugaccaccagaacacagcugccuccagccuacaccaacagcuucaccagaggcguguacuaccccgacaagguguucagauccagcgugcugcacucuacccaggaccuguuccugccuuucuucagcaacgugaccugguuccacgccauccacguguccggcaccaauggcaccaagagauucgacaaccccgugcugcccuucaacgacgggguguacuuugccagcaccgagaaguccaacaucaucagaggcuggaucuucggcaccacacuggacagcaagacccagagccugcugaucgugaacaacgccaccaacguggucaucaaagugugcgaguuccaguucugcaacgaccccuuccugggcgucuacuaccacaagaacaacaagagcuggauggaaagcgaguuccggguguacagcagcgccaacaacugcaccuucgaguacgugucccagccuuuccugauggaccuggaaggcaagcagggcaacuucaagaaccugcgcgaguucguguucaagaacaucgacggcuacuucaaaaucuacagcaagcacaccccuaucaaccucgugcgggaucugccucagggcuucucugugcuggaaccccugguggaucugcccaucggcaucaacaucacccgguuucagacacugcuggcccugcacagaagcuaccugacaccuggcgauagcagcagcggauggacagcuggugccgccgcuuacuaugugggcuaccugcagccuagaaccuuccugcugaaguacaacgagaacggcaccaucaccgacgccguggauugugcucuggauccucugagcgagacaaagugcacccugaaguccuucaccguggaaaagggcaucuaccagaccagcaacuuccgggugcagcccaccgaauccaucgugcgguuccccaauaucaccaaucugugccccuucggcgagguguucaaugccaccagauucgccucuguguacgccuggaaccggaagcggaucagcaauugcguggccgacuacuccgugcuguacaacuccgccagcuucagcaccuucaagugcuacggcguguccccuaccaagcugaacgaccugugcuucacaaacguguacgccgacagcuucgugauccggggagaugaagugcggcagauugccccuggacagacaggcaagaucgccgacuacaacuacaagcugcccgacgacuucaccggcugugugauugccuggaacagcaacaaccuggacuccaaagucggcggcaacuacaauuaccuguaccggcuguuccggaaguccaaucugaagcccuucgagcgggacaucagcaccgaaaucuaucaggccggcagcaccccuugcaacggcguggaaggcuucaacugcuacuucccacugcaguccuacggcuuucagcccacaaauggcgugggcuaucagcccuacagagugguggugcugagcuucgaacugcugcaugcuccugccacagugugcggcccuaagaaaagcaccaaucucgugaagaacaaaugcgugaacuucaacuucaacggccugaccggcaccggcgugcugacagagagcaacaagaaguuccugccauuccagcaguuuggccgggauaucgccgauaccacagacgccguuagagauccccagacacuggaaauccuggacaucaccccaugcagcuucggcggagugucugugaucaccccuggcaccaacaccagcaaucagguggcagugcuguaccagggcgugaacuguaccgaagugcccguggccauucacgccgaucagcugacaccuacauggcggguguacuccaccggcagcaauguguuucagaccagagccggcugucugaucggagccgagcacgugaacaauagcuacgagugcgacauccccaucggcgcuggcaucugugccagcuaccagacacagacaaacagccccagacgggcuagaagcguggccagccagagcaucauugccuacacaaugucucugggcgccgagaacagcguggccuacuccaacaacucuaucgcuauccccaccaacuucaccaucagcgugaccaccgagauccugccuguguccaugaccaagaccagcguggacugcaccauguacaucugcggcgauuccaccgagugcuccaaccugcugcugcaguacggcagcuucugcacccagcugaauagagcccugacagggaucgccguggaacaggacaagaacacccaagagguguucgcccaagugaagcaaaucuacaagaccccuccuaucaaggacuucggcggcuucaauuucagccagauucugcccgauccuagcaagcccagcaagcggagcuucaucgaggaccugcuguucaacaaagugacacuggccgacgccggcuucaucaagcaguauggcgauugucugggcgacauugccgccagggaucugauuugcgcccagaaguuuaacggacugacagugcugccuccucugcugaccgaugagaugaucgcccaguacacaucugcccugcuggccggcacaaucacaagcggcuggacauuuggagcuggcgccgcucugcagauccccuuugcuaugcagauggccuaccgguucaacggcaucggagugacccagaaugugcuguacgagaaccagaagcugaucgccaaccaguucaacagcgccaucggcaagauccaggacagccugagcagcacagcaagcgcccugggaaagcugcaggacguggucaaccagaaugcccaggcacugaacacccuggucaagcagcuguccuccaacuucggcgccaucagcucugugcugaacgauauccugagcagacuggacccuccugaggccgaggugcagaucgacagacugaucacaggcagacugcagagccuccagacauacgugacccagcagcugaucagagccgccgagauuagagccucugccaaucuggccgccaccaagaugucugagugugugcugggccagagcaagagaguggacuuuugcggcaagggcuaccaccugaugagcuucccucagucugccccucacggcgugguguuucugcacgugacauaugugcccgcucaagagaagaauuucaccaccgcuccagccaucugccacgacggcaaagcccacuuuccuagagaaggcguguucguguccaacggcacccauugguucgugacacagcggaacuucuacgagccccagaucaucaccaccgacaacaccuucgugucuggcaacugcgacguugugaucggcauugugaacaauaccguguacgacccucugcagcccgagcuggacagcuucaaagaggaacuggacaaguacuuuaagaaccacacaagccccgacguggaccugggcgauaucagcggaaucaaugccagcgucgugaacauccagaaagagaucgaccggcugaacgagguggccaagaaucugaacgagagccugaucgaccugcaagaacuggggaaguacgagcaguacaucaaguggcccugguacaucuggcugggcuuuaucgccggacugauugccaucgugauggucacaaucaugcuguguugcaugaccagcugcuguagcugccugaagggcuguuguagcuguggcagcugcugcaaguucgacgaggacgauucugagcccgugcugaagggcgugaaacugcacuacaccugaugacucgagcugguacugcaugcacgcaaugcuagcugccccuuucccguccuggguaccccgagucucccccgaccucgggucccagguaugcucccaccuccaccugccccacucaccaccucugcuaguuccagacaccucccaagcacgcagcaaugcagcucaaaacgcuuagccuagccacacccccacgggaaacagcagugauuaaccuuuagcaauaaacgaaaguuuaacuaagcuauacuaaccccaggguuggucaauuucgugccagccacacccuggagcuagcaaaaaaaaaaaaaaaaaaaaaaaaaaaaaaaaaaaaaaaaaaaaaaaaaaaaaaaaaaaaaaaaaaaaaaaaaaaaaaaaaaaaaaaaaaaaaaaaaaaa

SEQ ID NO: 26452 - RNA, 4273 nt, Artificial Sequence
  SARS-CoV-2/Wuhan/WIV05/2019__EPI_ISL_402128 spike protein mRNA gc mod (1-1273)(K986P_V987P_N439K_D614G)
agaauaaacuaguauucuucugguccccacagacucagagagaacccgccaccauguucguguuucuggugcugcugccccugguguccagccagugugugaaccugaccaccagaacacagcugccuccagccuacaccaacagcuucaccagaggcguguacuaccccgacaagguguucagauccagcgugcugcacucuacccaggaccuguuccugccuuucuucagcaacgugaccugguuccacgccauccacguguccggcaccaauggcaccaagagauucgacaaccccgugcugcccuucaacgacgggguguacuuugccagcaccgagaaguccaacaucaucagaggcuggaucuucggcaccacacuggacagcaagacccagagccugcugaucgugaacaacgccaccaacguggucaucaaagugugcgaguuccaguucugcaacgaccccuuccugggcgucuacuaccacaagaacaacaagagcuggauggaaagcgaguuccggguguacagcagcgccaacaacugcaccuucgaguacgugucccagccuuuccugauggaccuggaaggcaagcagggcaacuucaagaaccugcgcgaguucguguucaagaacaucgacggcuacuucaaaaucuacagcaagcacaccccuaucaaccucgugcgggaucugccucagggcuucucugcucuggaaccccugguggaucugcccaucggcaucaacaucacccgguuucagacacugcuggcccugcacagaagcuaccugacaccuggcgauagcagcagcggauggacagcuggugccgccgcuuacuaugugggcuaccugcagccuagaaccuuccugcugaaguacaacgagaacggcaccaucaccgacgccguggauugugcucuggauccucugagcgagacaaagugcacccugaaguccuucaccguggaaaagggcaucuaccagaccagcaacuuccgggugcagcccaccgaauccaucgugcgguuccccaauaucaccaaucugugccccuucggcgagguguucaaugccaccagauucgccucuguguacgccuggaaccggaagcggaucagcaauugcguggccgacuacuccgugcuguacaacuccgccagcuucagcaccuucaagugcuacggcguguccccuaccaagcugaacgaccugugcuucacaaacguguacgccgacagcuucgugauccggggagaugaagugcggcagauugccccuggacagacaggcaagaucgccgacuacaacuacaagcugcccgacgacuucaccggcugugugauugccuggaacagcaagaaccuggacuccaaagucggcggcaacuacaauuaccuguaccggcuguuccggaaguccaaucugaagcccuucgagcgggacaucagcaccgaaaucuaucaggccggcagcaccccuugcaacggcguggaaggcuucaacugcuacuucccacugcaguccuacggcuuucagcccacaaauggcgugggcuaucagcccuacagagugguggugcugagcuucgaacugcugcaugcuccugccacagugugcggcccuaagaaaagcaccaaucucgugaagaacaaaugcgugaacuucaacuucaacggccugaccggcaccggcgugcugacagagagcaacaagaaguuccugccauuccagcaguuuggccgggauaucgccgauaccacagacgccguuagagauccccagacacuggaaauccuggacaucaccccaugcagcuucggcggagugucugugaucaccccuggcaccaacaccagcaaucagguggcagugcuguaccagggcgugaacuguaccgaagugcccguggccauucacgccgaucagcugacaccuacauggcggguguacuccaccggcagcaauguguuucagaccagagccggcugucugaucggagccgagcacgugaacaauagcuacgagugcgacauccccaucggcgcuggcaucugugccagcuaccagacacagacaaacagccccagacgggcuagaagcguggccagccagagcaucauugccuacacaaugucucugggcgccgagaacagcguggccuacuccaacaacucuaucgcuauccccaccaacuucaccaucagcgugaccaccgagauccugccuguguccaugaccaagaccagcguggacugcaccauguacaucugcggcgauuccaccgagugcuccaaccugcugcugcaguacggcagcuucugcacccagcugaauagagcccugacagggaucgccguggaacaggacaagaacacccaagagguguucgcccaagugaagcaaaucuacaagaccccuccuaucaaggacuucggcggcuucaauuucagccagauucugcccgauccuagcaagcccagcaagcggagcuucaucgaggaccugcuguucaacaaagugacacuggccgacgccggcuucaucaagcaguauggcgauugucugggcgacauugccgccagggaucugauuugcgcccagaaguuuaacggacugacagugcugccuccucugcugaccgaugagaugaucgcccaguacacaucugcccugcuggccggcacaaucacaagcggcuggacauuuggagcuggcgccgcucugcagauccccuuugcuaugcagauggccuaccgguucaacggcaucggagugacccagaaugugcuguacgagaaccagaagcugaucgccaaccaguucaacagcgccaucggcaagauccaggacagccugagcagcacagcaagcgcccugggaaagcugcaggacguggucaaccagaaugcccaggcacugaacacccuggucaagcagcuguccuccaacuucggcgccaucagcucugugcugaacgauauccugagcagacuggacccuccugaggccgaggugcagaucgacagacugaucacaggcagacugcagagccuccagacauacgugacccagcagcugaucagagccgccgagauuagagccucugccaaucuggccgccaccaagaugucugagugugugcugggccagagcaagagaguggacuuuugcggcaagggcuaccaccugaugagcuucccucagucugccccucacggcgugguguuucugcacgugacauaugugcccgcucaagagaagaauuucaccaccgcuccagccaucugccacgacggcaaagcccacuuuccuagagaaggcguguucguguccaacggcacccauugguucgugacacagcggaacuucuacgagccccagaucaucaccaccgacaacaccuucgugucuggcaacugcgacguugugaucggcauugugaacaauaccguguacgacccucugcagcccgagcuggacagcuucaaagaggaacuggacaaguacuuuaagaaccacacaagccccgacguggaccugggcgauaucagcggaaucaaugccagcgucgugaacauccagaaagagaucgaccggcugaacgagguggccaagaaucugaacgagagccugaucgaccugcaagaacuggggaaguacgagcaguacaucaaguggcccugguacaucuggcugggcuuuaucgccggacugauugccaucgugauggucacaaucaugcuguguugcaugaccagcugcuguagcugccugaagggcuguuguagcuguggcagcugcugcaaguucgacgaggacgauucugagcccgugcugaagggcgugaaacugcacuacaccugaugacucgagcugguacugcaugcacgcaaugcuagcugccccuuucccguccuggguaccccgagucucccccgaccucgggucccagguaugcucccaccuccaccugccccacucaccaccucugcuaguuccagacaccucccaagcacgcagcaaugcagcucaaaacgcuuagccuagccacacccccacgggaaacagcagugauuaaccuuuagcaauaaacgaaaguuuaacuaagcuauacuaaccccaggguuggucaauuucgugccagccacacccuggagcuagcaaaaaaaaaaaaaaaaaaaaaaaaaaaaaaaaaaaaaaaaaaaaaaaaaaaaaaaaaaaaaaaaaaaaaaaaaaaaaaaaaaaaaaaaaaaaaaaaaaaa

SEQ ID NO: 26453 - RNA, 4273 nt, Artificial Sequence
  SARS-CoV-2/Wuhan/WIV05/2019__EPI_ISL_402128 spike protein mRNA gc mod (1-1273)(K986P_V987P_S477N_D614G)
agaauaaacuaguauucuucugguccccacagacucagagagaacccgccaccauguucguguuucuggugcugcugccccugguguccagccagugugugaaccugaccaccagaacacagcugccuccagccuacaccaacagcuucaccagaggcguguacuaccccgacaagguguucagauccagcgugcugcacucuacccaggaccuguuccugccuuucuucagcaacgugaccugguuccacgccauccacguguccggcaccaauggcaccaagagauucgacaaccccgugcugcccuucaacgacgggguguacuuugccagcaccgagaaguccaacaucaucagaggcuggaucuucggcaccacacuggacagcaagacccagagccugcugaucgugaacaacgccaccaacguggucaucaaagugugcgaguuccaguucugcaacgaccccuuccugggcgucuacuaccacaagaacaacaagagcuggauggaaagcgaguuccggguguacagcagcgccaacaacugcaccuucgaguacgugucccagccuuuccugauggaccuggaaggcaagcagggcaacuucaagaaccugcgcgaguucguguucaagaacaucgacggcuacuucaaaaucuacagcaagcacaccccuaucaaccucgugcgggaucugccucagggcuucucugcucuggaaccccugguggaucugcccaucggcaucaacaucacccgguuucagacacugcuggcccugcacagaagcuaccugacaccuggcgauagcagcagcggauggacagcuggugccgccgcuuacuaugugggcuaccugcagccuagaaccuuccugcugaaguacaacgagaacggcaccaucaccgacgccguggauugugcucuggauccucugagcgagacaaagugcacccugaaguccuucaccguggaaaagggcaucuaccagaccagcaacuuccgggugcagcccaccgaauccaucgugcgguuccccaauaucaccaaucugugccccuucggcgagguguucaaugccaccagauucgccucuguguacgccuggaaccggaagcggaucagcaauugcguggccgacuacuccgugcuguacaacuccgccagcuucagcaccuucaagugcuacggcguguccccuaccaagcugaacgaccugugcuucacaaacguguacgccgacagcuucgugauccggggagaugaagugcggcagauugccccuggacagacaggcaagaucgccgacuacaacuacaagcugcccgacgacuucaccggcugugugauugccuggaacagcaacaaccuggacuccaaagucggcggcaacuacaauuaccuguaccggcuguuccggaaguccaaucugaagcccuucgagcgggacaucagcaccgaaaucuaucaggccggcaacaccccuugcaacggcguggaaggcuucaacugcuacuucccacugcaguccuacggcuuucagcccacaaauggcgugggcuaucagcccuacagagugguggugcugagcuucgaacugcugcaugcuccugccacagugugcggcccuaagaaaagcaccaaucucgugaagaacaaaugcgugaacuucaacuucaacggccugaccggcaccggcgugcugacagagagcaacaagaaguuccugccauuccagcaguuuggccgggauaucgccgauaccacagacgccguuagagauccccagacacuggaaauccuggacaucaccccaugcagcuucggcggagugucugugaucaccccuggcaccaacaccagcaaucagguggcagugcuguaccagggcgugaacuguaccgaagugcccguggccauucacgccgaucagcugacaccuacauggcggguguacuccaccggcagcaauguguuucagaccagagccggcugucugaucggagccgagcacgugaacaauagcuacgagugcgacauccccaucggcgcuggcaucugugccagcuaccagacacagacaaacagccccagacgggcuagaagcguggccagccagagcaucauugccuacacaaugucucugggcgccgagaacagcguggccuacuccaacaacucuaucgcuauccccaccaacuucaccaucagcgugaccaccgagauccugccuguguccaugaccaagaccagcguggacugcaccauguacaucugcggcgauuccaccgagugcuccaaccugcugcugcaguacggcagcuucugcacccagcugaauagagcccugacagggaucgccguggaacaggacaagaacacccaagagguguucgcccaagugaagcaaaucuacaagaccccuccuaucaaggacuucggcggcuucaauuucagccagauucugcccgauccuagcaagcccagcaagcggagcuucaucgaggaccugcuguucaacaaagugacacuggccgacgccggcuucaucaagcaguauggcgauugucugggcgacauugccgccagggaucugauuugcgcccagaaguuuaacggacugacagugcugccuccucugcugaccgaugagaugaucgcccaguacacaucugcccugcuggccggcacaaucacaagcggcuggacauuuggagcuggcgccgcucugcagauccccuuugcuaugcagauggccuaccgguucaacggcaucggagugacccagaaugugcuguacgagaaccagaagcugaucgccaaccaguucaacagcgccaucggcaagauccaggacagccugagcagcacagcaagcgcccugggaaagcugcaggacguggucaaccagaaugcccaggcacugaacacccuggucaagcagcuguccuccaacuucggcgccaucagcucugugcugaacgauauccugagcagacuggacccuccugaggccgaggugcagaucgacagacugaucacaggcagacugcagagccuccagacauacgugacccagcagcugaucagagccgccgagauuagagccucugccaaucuggccgccaccaagaugucugagugugugcugggccagagcaagagaguggacuuuugcggcaagggcuaccaccugaugagcuucccucagucugccccucacggcgugguguuucugcacgugacauaugugcccgcucaagagaagaauuucaccaccgcuccagccaucugccacgacggcaaagcccacuuuccuagagaaggcguguucguguccaacggcacccauugguucgugacacagcggaacuucuacgagccccagaucaucaccaccgacaacaccuucgugucuggcaacugcgacguugugaucggcauugugaacaauaccguguacgacccucugcagcccgagcuggacagcuucaaagaggaacuggacaaguacuuuaagaaccacacaagccccgacguggaccugggcgauaucagcggaaucaaugccagcgucgugaacauccagaaagagaucgaccggcugaacgagguggccaagaaucugaacgagagccugaucgaccugcaagaacuggggaaguacgagcaguacaucaaguggcccugguacaucuggcugggcuuuaucgccggacugauugccaucgugauggucacaaucaugcuguguugcaugaccagcugcuguagcugccugaagggcuguuguagcuguggcagcugcugcaaguucgacgaggacgauucugagcccgugcugaagggcgugaaacugcacuacaccugaugacucgagcugguacugcaugcacgcaaugcuagcugccccuuucccguccuggguaccccgagucucccccgaccucgggucccagguaugcucccaccuccaccugccccacucaccaccucugcuaguuccagacaccucccaagcacgcagcaaugcagcucaaaacgcuuagccuagccacacccccacgggaaacagcagugauuaaccuuuagcaauaaacgaaaguuuaacuaagcuauacuaaccccaggguuggucaauuucgugccagccacacccuggagcuagcaaaaaaaaaaaaaaaaaaaaaaaaaaaaaaaaaaaaaaaaaaaaaaaaaaaaaaaaaaaaaaaaaaaaaaaaaaaaaaaaaaaaaaaaaaaaaaaaaaaa

SEQ ID NO: 26454 - RNA, 4273 nt, Artificial Sequence
  SARS-CoV-2/Wuhan/WIV05/2019__EPI_ISL_402128 spike protein mRNA gc mod (1-1273)(K986P_V987P_N501Y_D614G)
agaauaaacuaguauucuucugguccccacagacucagagagaacccgccaccauguucguguuucuggugcugcugccccugguguccagccagugugugaaccugaccaccagaacacagcugccuccagccuacaccaacagcuucaccagaggcguguacuaccccgacaagguguucagauccagcgugcugcacucuacccaggaccuguuccugccuuucuucagcaacgugaccugguuccacgccauccacguguccggcaccaauggcaccaagagauucgacaaccccgugcugcccuucaacgacgggguguacuuugccagcaccgagaaguccaacaucaucagaggcuggaucuucggcaccacacuggacagcaagacccagagccugcugaucgugaacaacgccaccaacguggucaucaaagugugcgaguuccaguucugcaacgaccccuuccugggcgucuacuaccacaagaacaacaagagcuggauggaaagcgaguuccggguguacagcagcgccaacaacugcaccuucgaguacgugucccagccuuuccugauggaccuggaaggcaagcagggcaacuucaagaaccugcgcgaguucguguucaagaacaucgacggcuacuucaaaaucuacagcaagcacaccccuaucaaccucgugcgggaucugccucagggcuucucugcucuggaaccccugguggaucugcccaucggcaucaacaucacccgguuucagacacugcuggcccugcacagaagcuaccugacaccuggcgauagcagcagcggauggacagcuggugccgccgcuuacuaugugggcuaccugcagccuagaaccuuccugcugaaguacaacgagaacggcaccaucaccgacgccguggauugugcucuggauccucugagcgagacaaagugcacccugaaguccuucaccguggaaaagggcaucuaccagaccagcaacuuccgggugcagcccaccgaauccaucgugcgguuccccaauaucaccaaucugugccccuucggcgagguguucaaugccaccagauucgccucuguguacgccuggaaccggaagcggaucagcaauugcguggccgacuacuccgugcuguacaacuccgccagcuucagcaccuucaagugcuacggcguguccccuaccaagcugaacgaccugugcuucacaaacguguacgccgacagcuucgugauccggggagaugaagugcggcagauugccccuggacagacaggcaagaucgccgacuacaacuacaagcugcccgacgacuucaccggcugugugauugccuggaacagcaacaaccuggacuccaaagucggcggcaacuacaauuaccuguaccggcuguuccggaaguccaaucugaagcccuucgagcgggacaucagcaccgaaaucuaucaggccggcagcaccccuugcaacggcguggaaggcuucaacugcuacuucccacugcaguccuacggcuuucagcccacauacggcgugggcuaucagcccuacagagugguggugcugagcuucgaacugcugcaugcuccugccacagugugcggcccuaagaaaagcaccaaucucgugaagaacaaaugcgugaacuucaacuucaacggccugaccggcaccggcgugcugacagagagcaacaagaaguuccugccauuccagcaguuuggccgggauaucgccgauaccacagacgccguuagagauccccagacacuggaaauccuggacaucaccccaugcagcuucggcggagugucugugaucaccccuggcaccaacaccagcaaucagguggcagugcuguaccagggcgugaacuguaccgaagugcccguggccauucacgccgaucagcugacaccuacauggcggguguacuccaccggcagcaauguguuucagaccagagccggcugucugaucggagccgagcacgugaacaauagcuacgagugcgacauccccaucggcgcuggcaucugugccagcuaccagacacagacaaacagccccagacgggcuagaagcguggccagccagagcaucauugccuacacaaugucucugggcgccgagaacagcguggccuacuccaacaacucuaucgcuauccccaccaacuucaccaucagcgugaccaccgagauccugccuguguccaugaccaagaccagcguggacugcaccauguacaucugcggcgauuccaccgagugcuccaaccugcugcugcaguacggcagcuucugcacccagcugaauagagcccugacagggaucgccguggaacaggacaagaacacccaagagguguucgcccaagugaagcaaaucuacaagaccccuccuaucaaggacuucggcggcuucaauuucagccagauucugcccgauccuagcaagcccagcaagcggagcuucaucgaggaccugcuguucaacaaagugacacuggccgacgccggcuucaucaagcaguauggcgauugucugggcgacauugccgccagggaucugauuugcgcccagaaguuuaacggacugacagugcugccuccucugcugaccgaugagaugaucgcccaguacacaucugcccugcuggccggcacaaucacaagcggcuggacauuuggagcuggcgccgcucugcagauccccuuugcuaugcagauggccuaccgguucaacggcaucggagugacccagaaugugcuguacgagaaccagaagcugaucgccaaccaguucaacagcgccaucggcaagauccaggacagccugagcagcacagcaagcgcccugggaaagcugcaggacguggucaaccagaaugcccaggcacugaacacccuggucaagcagcuguccuccaacuucggcgccaucagcucugugcugaacgauauccugagcagacuggacccuccugaggccgaggugcagaucgacagacugaucacaggcagacugcagagccuccagacauacgugacccagcagcugaucagagccgccgagauuagagccucugccaaucuggccgccaccaagaugucugagugugugcugggccagagcaagagaguggacuuuugcggcaagggcuaccaccugaugagcuucccucagucugccccucacggcgugguguuucugcacgugacauaugugcccgcucaagagaagaauuucaccaccgcuccagccaucugccacgacggcaaagcccacuuuccuagagaaggcguguucguguccaacggcacccauugguucgugacacagcggaacuucuacgagccccagaucaucaccaccgacaacaccuucgugucuggcaacugcgacguugugaucggcauugugaacaauaccguguacgacccucugcagcccgagcuggacagcuucaaagaggaacuggacaaguacuuuaagaaccacacaagccccgacguggaccugggcgauaucagcggaaucaaugccagcgucgugaacauccagaaagagaucgaccggcugaacgagguggccaagaaucugaacgagagccugaucgaccugcaagaacuggggaaguacgagcaguacaucaaguggcccugguacaucuggcugggcuuuaucgccggacugauugccaucgugauggucacaaucaugcuguguugcaugaccagcugcuguagcugccugaagggcuguuguagcuguggcagcugcugcaaguucgacgaggacgauucugagcccgugcugaagggcgugaaacugcacuacaccugaugacucgagcugguacugcaugcacgcaaugcuagcugccccuuucccguccuggguaccccgagucucccccgaccucgggucccagguaugcucccaccuccaccugccccacucaccaccucugcuaguuccagacaccucccaagcacgcagcaaugcagcucaaaacgcuuagccuagccacacccccacgggaaacagcagugauuaaccuuuagcaauaaacgaaaguuuaacuaagcuauacuaaccccaggguuggucaauuucgugccagccacacccuggagcuagcaaaaaaaaaaaaaaaaaaaaaaaaaaaaaaaaaaaaaaaaaaaaaaaaaaaaaaaaaaaaaaaaaaaaaaaaaaaaaaaaaaaaaaaaaaaaaaaaaaaa

SEQ ID NO: 26455 - RNA, 4267 nt, Artificial Sequence
  SARS-CoV-2/Wuhan/WIV05/2019__EPI_ISL_402128 spike protein mRNA gc mod (1-1273)(K986P_V987P_H69del_V70del_D614G)
agaauaaacuaguauucuucugguccccacagacucagagagaacccgccaccauguucguguuucuggugcugcugccccugguguccagccagugugugaaccugaccaccagaacacagcugccuccagccuacaccaacagcuucaccagaggcguguacuaccccgacaagguguucagauccagcgugcugcacucuacccaggaccuguuccugccuuucuucagcaacgugaccugguuccacgccaucuccggcaccaauggcaccaagagauucgacaaccccgugcugcccuucaacgacgggguguacuuugccagcaccgagaaguccaacaucaucagaggcuggaucuucggcaccacacuggacagcaagacccagagccugcugaucgugaacaacgccaccaacguggucaucaaagugugcgaguuccaguucugcaacgaccccuuccugggcgucuacuaccacaagaacaacaagagcuggauggaaagcgaguuccggguguacagcagcgccaacaacugcaccuucgaguacgugucccagccuuuccugauggaccuggaaggcaagcagggcaacuucaagaaccugcgcgaguucguguucaagaacaucgacggcuacuucaaaaucuacagcaagcacaccccuaucaaccucgugcgggaucugccucagggcuucucugcucuggaaccccugguggaucugcccaucggcaucaacaucacccgguuucagacacugcuggcccugcacagaagcuaccugacaccuggcgauagcagcagcggauggacagcuggugccgccgcuuacuaugugggcuaccugcagccuagaaccuuccugcugaaguacaacgagaacggcaccaucaccgacgccguggauugugcucuggauccucugagcgagacaaagugcacccugaaguccuucaccguggaaaagggcaucuaccagaccagcaacuuccgggugcagcccaccgaauccaucgugcgguuccccaauaucaccaaucugugccccuucggcgagguguucaaugccaccagauucgccucuguguacgccuggaaccggaagcggaucagcaauugcguggccgacuacuccgugcuguacaacuccgccagcuucagcaccuucaagugcuacggcguguccccuaccaagcugaacgaccugugcuucacaaacguguacgccgacagcuucgugauccggggagaugaagugcggcagauugccccuggacagacaggcaagaucgccgacuacaacuacaagcugcccgacgacuucaccggcugugugauugccuggaacagcaacaaccuggacuccaaagucggcggcaacuacaauuaccuguaccggcuguuccggaaguccaaucugaagcccuucgagcgggacaucagcaccgaaaucuaucaggccggcagcaccccuugcaacggcguggaaggcuucaacugcuacuucccacugcaguccuacggcuuucagcccacaaauggcgugggcuaucagcccuacagagugguggugcugagcuucgaacugcugcaugcuccugccacagugugcggcccuaagaaaagcaccaaucucgugaagaacaaaugcgugaacuucaacuucaacggccugaccggcaccggcgugcugacagagagcaacaagaaguuccugccauuccagcaguuuggccgggauaucgccgauaccacagacgccguuagagauccccagacacuggaaauccuggacaucaccccaugcagcuucggcggagugucugugaucaccccuggcaccaacaccagcaaucagguggcagugcuguaccagggcgugaacuguaccgaagugcccguggccauucacgccgaucagcugacaccuacauggcggguguacuccaccggcagcaauguguuucagaccagagccggcugucugaucggagccgagcacgugaacaauagcuacgagugcgacauccccaucggcgcuggcaucugugccagcuaccagacacagacaaacagccccagacgggcuagaagcguggccagccagagcaucauugccuacacaaugucucugggcgccgagaacagcguggccuacuccaacaacucuaucgcuauccccaccaacuucaccaucagcgugaccaccgagauccugccuguguccaugaccaagaccagcguggacugcaccauguacaucugcggcgauuccaccgagugcuccaaccugcugcugcaguacggcagcuucugcacccagcugaauagagcccugacagggaucgccguggaacaggacaagaacacccaagagguguucgcccaagugaagcaaaucuacaagaccccuccuaucaaggacuucggcggcuucaauuucagccagauucugcccgauccuagcaagcccagcaagcggagcuucaucgaggaccugcuguucaacaaagugacacuggccgacgccggcuucaucaagcaguauggcgauugucugggcgacauugccgccagggaucugauuugcgcccagaaguuuaacggacugacagugcugccuccucugcugaccgaugagaugaucgcccaguacacaucugcccugcuggccggcacaaucacaagcggcuggacauuuggagcuggcgccgcucugcagauccccuuugcuaugcagauggccuaccgguucaacggcaucggagugacccagaaugugcuguacgagaaccagaagcugaucgccaaccaguucaacagcgccaucggcaagauccaggacagccugagcagcacagcaagcgcccugggaaagcugcaggacguggucaaccagaaugcccaggcacugaacacccuggucaagcagcuguccuccaacuucggcgccaucagcucugugcugaacgauauccugagcagacuggacccuccugaggccgaggugcagaucgacagacugaucacaggcagacugcagagccuccagacauacgugacccagcagcugaucagagccgccgagauuagagccucugccaaucuggccgccaccaagaugucugagugugugcugggccagagcaagagaguggacuuuugcggcaagggcuaccaccugaugagcuucccucagucugccccucacggcgugguguuucugcacgugacauaugugcccgcucaagagaagaauuucaccaccgcuccagccaucugccacgacggcaaagcccacuuuccuagagaaggcguguucguguccaacggcacccauugguucgugacacagcggaacuucuacgagccccagaucaucaccaccgacaacaccuucgugucuggcaacugcgacguugugaucggcauugugaacaauaccguguacgacccucugcagcccgagcuggacagcuucaaagaggaacuggacaaguacuuuaagaaccacacaagccccgacguggaccugggcgauaucagcggaaucaaugccagcgucgugaacauccagaaagagaucgaccggcugaacgagguggccaagaaucugaacgagagccugaucgaccugcaagaacuggggaaguacgagcaguacaucaaguggcccugguacaucuggcugggcuuuaucgccggacugauugccaucgugauggucacaaucaugcuguguugcaugaccagcugcuguagcugccugaagggcuguuguagcuguggcagcugcugcaaguucgacgaggacgauucugagcccgugcugaagggcgugaaacugcacuacaccugaugacucgagcugguacugcaugcacgcaaugcuagcugccccuuucccguccuggguaccccgagucucccccgaccucgggucccagguaugcucccaccuccaccugccccacucaccaccucugcuaguuccagacaccucccaagcacgcagcaaugcagcucaaaacgcuuagccuagccacacccccacgggaaacagcagugauuaaccuuuagcaauaaacgaaaguuuaacuaagcuauacuaaccccaggguuggucaauuucgugccagccacacccuggagcuagcaaaaaaaaaaaaaaaaaaaaaaaaaaaaaaaaaaaaaaaaaaaaaaaaaaaaaaaaaaaaaaaaaaaaaaaaaaaaaaaaaaaaaaaaaaaaaaaaaaaa

SEQ ID NO: 26456 - RNA, 4273 nt, Artificial Sequence
  SARS-CoV-2/Wuhan/WIV05/2019__EPI_ISL_402128 spike protein mRNA gc mod (1-1273)(K986P_V987P_Y453F_D614G)
agaauaaacuaguauucuucugguccccacagacucagagagaacccgccaccauguucguguuucuggugcugcugccccugguguccagccagugugugaaccugaccaccagaacacagcugccuccagccuacaccaacagcuucaccagaggcguguacuaccccgacaagguguucagauccagcgugcugcacucuacccaggaccuguuccugccuuucuucagcaacgugaccugguuccacgccauccacguguccggcaccaauggcaccaagagauucgacaaccccgugcugcccuucaacgacgggguguacuuugccagcaccgagaaguccaacaucaucagaggcuggaucuucggcaccacacuggacagcaagacccagagccugcugaucgugaacaacgccaccaacguggucaucaaagugugcgaguuccaguucugcaacgaccccuuccugggcgucuacuaccacaagaacaacaagagcuggauggaaagcgaguuccggguguacagcagcgccaacaacugcaccuucgaguacgugucccagccuuuccugauggaccuggaaggcaagcagggcaacuucaagaaccugcgcgaguucguguucaagaacaucgacggcuacuucaaaaucuacagcaagcacaccccuaucaaccucgugcgggaucugccucagggcuucucugcucuggaaccccugguggaucugcccaucggcaucaacaucacccgguuucagacacugcuggcccugcacagaagcuaccugacaccuggcgauagcagcagcggauggacagcuggugccgccgcuuacuaugugggcuaccugcagccuagaaccuuccugcugaaguacaacgagaacggcaccaucaccgacgccguggauugugcucuggauccucugagcgagacaaagugcacccugaaguccuucaccguggaaaagggcaucuaccagaccagcaacuuccgggugcagcccaccgaauccaucgugcgguuccccaauaucaccaaucugugccccuucggcgagguguucaaugccaccagauucgccucuguguacgccuggaaccggaagcggaucagcaauugcguggccgacuacuccgugcuguacaacuccgccagcuucagcaccuucaagugcuacggcguguccccuaccaagcugaacgaccugugcuucacaaacguguacgccgacagcuucgugauccggggagaugaagugcggcagauugccccuggacagacaggcaagaucgccgacuacaacuacaagcugcccgacgacuucaccggcugugugauugccuggaacagcaacaaccuggacuccaaagucggcggcaacuacaauuaccuguuccggcuguuccggaaguccaaucugaagcccuucgagcgggacaucagcaccgaaaucuaucaggccggcagcaccccuugcaacggcguggaaggcuucaacugcuacuucccacugcaguccuacggcuuucagcccacaaauggcgugggcuaucagcccuacagagugguggugcugagcuucgaacugcugcaugcuccugccacagugugcggcccuaagaaaagcaccaaucucgugaagaacaaaugcgugaacuucaacuucaacggccugaccggcaccggcgugcugacagagagcaacaagaaguuccugccauuccagcaguuuggccgggauaucgccgauaccacagacgccguuagagauccccagacacuggaaauccuggacaucaccccaugcagcuucggcggagugucugugaucaccccuggcaccaacaccagcaaucagguggcagugcuguaccagggcgugaacuguaccgaagugcccguggccauucacgccgaucagcugacaccuacauggcggguguacuccaccggcagcaauguguuucagaccagagccggcugucugaucggagccgagcacgugaacaauagcuacgagugcgacauccccaucggcgcuggcaucugugccagcuaccagacacagacaaacagccccagacgggcuagaagcguggccagccagagcaucauugccuacacaaugucucugggcgccgagaacagcguggccuacuccaacaacucuaucgcuauccccaccaacuucaccaucagcgugaccaccgagauccugccuguguccaugaccaagaccagcguggacugcaccauguacaucugcggcgauuccaccgagugcuccaaccugcugcugcaguacggcagcuucugcacccagcugaauagagcccugacagggaucgccguggaacaggacaagaacacccaagagguguucgcccaagugaagcaaaucuacaagaccccuccuaucaaggacuucggcggcuucaauuucagccagauucugcccgauccuagcaagcccagcaagcggagcuucaucgaggaccugcuguucaacaaagugacacuggccgacgccggcuucaucaagcaguauggcgauugucugggcgacauugccgccagggaucugauuugcgcccagaaguuuaacggacugacagugcugccuccucugcugaccgaugagaugaucgcccaguacacaucugcccugcuggccggcacaaucacaagcggcuggacauuuggagcuggcgccgcucugcagauccccuuugcuaugcagauggccuaccgguucaacggcaucggagugacccagaaugugcuguacgagaaccagaagcugaucgccaaccaguucaacagcgccaucggcaagauccaggacagccugagcagcacagcaagcgcccugggaaagcugcaggacguggucaaccagaaugcccaggcacugaacacccuggucaagcagcuguccuccaacuucggcgccaucagcucugugcugaacgauauccugagcagacuggacccuccugaggccgaggugcagaucgacagacugaucacaggcagacugcagagccuccagacauacgugacccagcagcugaucagagccgccgagauuagagccucugccaaucuggccgccaccaagaugucugagugugugcugggccagagcaagagaguggacuuuugcggcaagggcuaccaccugaugagcuucccucagucugccccucacggcgugguguuucugcacgugacauaugugcccgcucaagagaagaauuucaccaccgcuccagccaucugccacgacggcaaagcccacuuuccuagagaaggcguguucguguccaacggcacccauugguucgugacacagcggaacuucuacgagccccagaucaucaccaccgacaacaccuucgugucuggcaacugcgacguugugaucggcauugugaacaauaccguguacgacccucugcagcccgagcuggacagcuucaaagaggaacuggacaaguacuuuaagaaccacacaagccccgacguggaccugggcgauaucagcggaaucaaugccagcgucgugaacauccagaaagagaucgaccggcugaacgagguggccaagaaucugaacgagagccugaucgaccugcaagaacuggggaaguacgagcaguacaucaaguggcccugguacaucuggcugggcuuuaucgccggacugauugccaucgugauggucacaaucaugcuguguugcaugaccagcugcuguagcugccugaagggcuguuguagcuguggcagcugcugcaaguucgacgaggacgauucugagcccgugcugaagggcgugaaacugcacuacaccugaugacucgagcugguacugcaugcacgcaaugcuagcugccccuuucccguccuggguaccccgagucucccccgaccucgggucccagguaugcucccaccuccaccugccccacucaccaccucugcuaguuccagacaccucccaagcacgcagcaaugcagcucaaaacgcuuagccuagccacacccccacgggaaacagcagugauuaaccuuuagcaauaaacgaaaguuuaacuaagcuauacuaaccccaggguuggucaauuucgugccagccacacccuggagcuagcaaaaaaaaaaaaaaaaaaaaaaaaaaaaaaaaaaaaaaaaaaaaaaaaaaaaaaaaaaaaaaaaaaaaaaaaaaaaaaaaaaaaaaaaaaaaaaaaaaaa

SEQ ID NO: 26457 - RNA, 4273 nt, Artificial Sequence
  SARS-CoV-2/Wuhan/WIV05/2019__EPI_ISL_402128 spike protein mRNA gc mod (1-1273)(K986P_V987P_D614G_I692V)
agaauaaacuaguauucuucugguccccacagacucagagagaacccgccaccauguucguguuucuggugcugcugccccugguguccagccagugugugaaccugaccaccagaacacagcugccuccagccuacaccaacagcuucaccagaggcguguacuaccccgacaagguguucagauccagcgugcugcacucuacccaggaccuguuccugccuuucuucagcaacgugaccugguuccacgccauccacguguccggcaccaauggcaccaagagauucgacaaccccgugcugcccuucaacgacgggguguacuuugccagcaccgagaaguccaacaucaucagaggcuggaucuucggcaccacacuggacagcaagacccagagccugcugaucgugaacaacgccaccaacguggucaucaaagugugcgaguuccaguucugcaacgaccccuuccugggcgucuacuaccacaagaacaacaagagcuggauggaaagcgaguuccggguguacagcagcgccaacaacugcaccuucgaguacgugucccagccuuuccugauggaccuggaaggcaagcagggcaacuucaagaaccugcgcgaguucguguucaagaacaucgacggcuacuucaaaaucuacagcaagcacaccccuaucaaccucgugcgggaucugccucagggcuucucugcucuggaaccccugguggaucugcccaucggcaucaacaucacccgguuucagacacugcuggcccugcacagaagcuaccugacaccuggcgauagcagcagcggauggacagcuggugccgccgcuuacuaugugggcuaccugcagccuagaaccuuccugcugaaguacaacgagaacggcaccaucaccgacgccguggauugugcucuggauccucugagcgagacaaagugcacccugaaguccuucaccguggaaaagggcaucuaccagaccagcaacuuccgggugcagcccaccgaauccaucgugcgguuccccaauaucaccaaucugugccccuucggcgagguguucaaugccaccagauucgccucuguguacgccuggaaccggaagcggaucagcaauugcguggccgacuacuccgugcuguacaacuccgccagcuucagcaccuucaagugcuacggcguguccccuaccaagcugaacgaccugugcuucacaaacguguacgccgacagcuucgugauccggggagaugaagugcggcagauugccccuggacagacaggcaagaucgccgacuacaacuacaagcugcccgacgacuucaccggcugugugauugccuggaacagcaacaaccuggacuccaaagucggcggcaacuacaauuaccuguaccggcuguuccggaaguccaaucugaagcccuucgagcgggacaucagcaccgaaaucuaucaggccggcagcaccccuugcaacggcguggaaggcuucaacugcuacuucccacugcaguccuacggcuuucagcccacaaauggcgugggcuaucagcccuacagagugguggugcugagcuucgaacugcugcaugcuccugccacagugugcggcccuaagaaaagcaccaaucucgugaagaacaaaugcgugaacuucaacuucaacggccugaccggcaccggcgugcugacagagagcaacaagaaguuccugccauuccagcaguuuggccgggauaucgccgauaccacagacgccguuagagauccccagacacuggaaauccuggacaucaccccaugcagcuucggcggagugucugugaucaccccuggcaccaacaccagcaaucagguggcagugcuguaccagggcgugaacuguaccgaagugcccguggccauucacgccgaucagcugacaccuacauggcggguguacuccaccggcagcaauguguuucagaccagagccggcugucugaucggagccgagcacgugaacaauagcuacgagugcgacauccccaucggcgcuggcaucugugccagcuaccagacacagacaaacagccccagacgggcuagaagcguggccagccagagcgugauugccuacacaaugucucugggcgccgagaacagcguggccuacuccaacaacucuaucgcuauccccaccaacuucaccaucagcgugaccaccgagauccugccuguguccaugaccaagaccagcguggacugcaccauguacaucugcggcgauuccaccgagugcuccaaccugcugcugcaguacggcagcuucugcacccagcugaauagagcccugacagggaucgccguggaacaggacaagaacacccaagagguguucgcccaagugaagcaaaucuacaagaccccuccuaucaaggacuucggcggcuucaauuucagccagauucugcccgauccuagcaagcccagcaagcggagcuucaucgaggaccugcuguucaacaaagugacacuggccgacgccggcuucaucaagcaguauggcgauugucugggcgacauugccgccagggaucugauuugcgcccagaaguuuaacggacugacagugcugccuccucugcugaccgaugagaugaucgcccaguacacaucugcccugcuggccggcacaaucacaagcggcuggacauuuggagcuggcgccgcucugcagauccccuuugcuaugcagauggccuaccgguucaacggcaucggagugacccagaaugugcuguacgagaaccagaagcugaucgccaaccaguucaacagcgccaucggcaagauccaggacagccugagcagcacagcaagcgcccugggaaagcugcaggacguggucaaccagaaugcccaggcacugaacacccuggucaagcagcuguccuccaacuucggcgccaucagcucugugcugaacgauauccugagcagacuggacccuccugaggccgaggugcagaucgacagacugaucacaggcagacugcagagccuccagacauacgugacccagcagcugaucagagccgccgagauuagagccucugccaaucuggccgccaccaagaugucugagugugugcugggccagagcaagagaguggacuuuugcggcaagggcuaccaccugaugagcuucccucagucugccccucacggcgugguguuucugcacgugacauaugugcccgcucaagagaagaauuucaccaccgcuccagccaucugccacgacggcaaagcccacuuuccuagagaaggcguguucguguccaacggcacccauugguucgugacacagcggaacuucuacgagccccagaucaucaccaccgacaacaccuucgugucuggcaacugcgacguugugaucggcauugugaacaauaccguguacgacccucugcagcccgagcuggacagcuucaaagaggaacuggacaaguacuuuaagaaccacacaagccccgacguggaccugggcgauaucagcggaaucaaugccagcgucgugaacauccagaaagagaucgaccggcugaacgagguggccaagaaucugaacgagagccugaucgaccugcaagaacuggggaaguacgagcaguacaucaaguggcccugguacaucuggcugggcuuuaucgccggacugauugccaucgugauggucacaaucaugcuguguugcaugaccagcugcuguagcugccugaagggcuguuguagcuguggcagcugcugcaaguucgacgaggacgauucugagcccgugcugaagggcgugaaacugcacuacaccugaugacucgagcugguacugcaugcacgcaaugcuagcugccccuuucccguccuggguaccccgagucucccccgaccucgggucccagguaugcucccaccuccaccugccccacucaccaccucugcuaguuccagacaccucccaagcacgcagcaaugcagcucaaaacgcuuagccuagccacacccccacgggaaacagcagugauuaaccuuuagcaauaaacgaaaguuuaacuaagcuauacuaaccccaggguuggucaauuucgugccagccacacccuggagcuagcaaaaaaaaaaaaaaaaaaaaaaaaaaaaaaaaaaaaaaaaaaaaaaaaaaaaaaaaaaaaaaaaaaaaaaaaaaaaaaaaaaaaaaaaaaaaaaaaaaaa

SEQ ID NO: 26458 - RNA, 4273 nt, Artificial Sequence
  SARS-CoV-2/Wuhan/WIV05/2019__EPI_ISL_402128 spike protein mRNA gc mod (1-1273)(K986P_V987P_D614G_M1229I)
agaauaaacuaguauucuucugguccccacagacucagagagaacccgccaccauguucguguuucuggugcugcugccccugguguccagccagugugugaaccugaccaccagaacacagcugccuccagccuacaccaacagcuucaccagaggcguguacuaccccgacaagguguucagauccagcgugcugcacucuacccaggaccuguuccugccuuucuucagcaacgugaccugguuccacgccauccacguguccggcaccaauggcaccaagagauucgacaaccccgugcugcccuucaacgacgggguguacuuugccagcaccgagaaguccaacaucaucagaggcuggaucuucggcaccacacuggacagcaagacccagagccugcugaucgugaacaacgccaccaacguggucaucaaagugugcgaguuccaguucugcaacgaccccuuccugggcgucuacuaccacaagaacaacaagagcuggauggaaagcgaguuccggguguacagcagcgccaacaacugcaccuucgaguacgugucccagccuuuccugauggaccuggaaggcaagcagggcaacuucaagaaccugcgcgaguucguguucaagaacaucgacggcuacuucaaaaucuacagcaagcacaccccuaucaaccucgugcgggaucugccucagggcuucucugcucuggaaccccugguggaucugcccaucggcaucaacaucacccgguuucagacacugcuggcccugcacagaagcuaccugacaccuggcgauagcagcagcggauggacagcuggugccgccgcuuacuaugugggcuaccugcagccuagaaccuuccugcugaaguacaacgagaacggcaccaucaccgacgccguggauugugcucuggauccucugagcgagacaaagugcacccugaaguccuucaccguggaaaagggcaucuaccagaccagcaacuuccgggugcagcccaccgaauccaucgugcgguuccccaauaucaccaaucugugccccuucggcgagguguucaaugccaccagauucgccucuguguacgccuggaaccggaagcggaucagcaauugcguggccgacuacuccgugcuguacaacuccgccagcuucagcaccuucaagugcuacggcguguccccuaccaagcugaacgaccugugcuucacaaacguguacgccgacagcuucgugauccggggagaugaagugcggcagauugccccuggacagacaggcaagaucgccgacuacaacuacaagcugcccgacgacuucaccggcugugugauugccuggaacagcaacaaccuggacuccaaagucggcggcaacuacaauuaccuguaccggcuguuccggaaguccaaucugaagcccuucgagcgggacaucagcaccgaaaucuaucaggccggcagcaccccuugcaacggcguggaaggcuucaacugcuacuucccacugcaguccuacggcuuucagcccacaaauggcgugggcuaucagcccuacagagugguggugcugagcuucgaacugcugcaugcuccugccacagugugcggcccuaagaaaagcaccaaucucgugaagaacaaaugcgugaacuucaacuucaacggccugaccggcaccggcgugcugacagagagcaacaagaaguuccugccauuccagcaguuuggccgggauaucgccgauaccacagacgccguuagagauccccagacacuggaaauccuggacaucaccccaugcagcuucggcggagugucugugaucaccccuggcaccaacaccagcaaucagguggcagugcuguaccagggcgugaacuguaccgaagugcccguggccauucacgccgaucagcugacaccuacauggcggguguacuccaccggcagcaauguguuucagaccagagccggcugucugaucggagccgagcacgugaacaauagcuacgagugcgacauccccaucggcgcuggcaucugugccagcuaccagacacagacaaacagccccagacgggcuagaagcguggccagccagagcaucauugccuacacaaugucucugggcgccgagaacagcguggccuacuccaacaacucuaucgcuauccccaccaacuucaccaucagcgugaccaccgagauccugccuguguccaugaccaagaccagcguggacugcaccauguacaucugcggcgauuccaccgagugcuccaaccugcugcugcaguacggcagcuucugcacccagcugaauagagcccugacagggaucgccguggaacaggacaagaacacccaagagguguucgcccaagugaagcaaaucuacaagaccccuccuaucaaggacuucggcggcuucaauuucagccagauucugcccgauccuagcaagcccagcaagcggagcuucaucgaggaccugcuguucaacaaagugacacuggccgacgccggcuucaucaagcaguauggcgauugucugggcgacauugccgccagggaucugauuugcgcccagaaguuuaacggacugacagugcugccuccucugcugaccgaugagaugaucgcccaguacacaucugcccugcuggccggcacaaucacaagcggcuggacauuuggagcuggcgccgcucugcagauccccuuugcuaugcagauggccuaccgguucaacggcaucggagugacccagaaugugcuguacgagaaccagaagcugaucgccaaccaguucaacagcgccaucggcaagauccaggacagccugagcagcacagcaagcgcccugggaaagcugcaggacguggucaaccagaaugcccaggcacugaacacccuggucaagcagcuguccuccaacuucggcgccaucagcucugugcugaacgauauccugagcagacuggacccuccugaggccgaggugcagaucgacagacugaucacaggcagacugcagagccuccagacauacgugacccagcagcugaucagagccgccgagauuagagccucugccaaucuggccgccaccaagaugucugagugugugcugggccagagcaagagaguggacuuuugcggcaagggcuaccaccugaugagcuucccucagucugccccucacggcgugguguuucugcacgugacauaugugcccgcucaagagaagaauuucaccaccgcuccagccaucugccacgacggcaaagcccacuuuccuagagaaggcguguucguguccaacggcacccauugguucgugacacagcggaacuucuacgagccccagaucaucaccaccgacaacaccuucgugucuggcaacugcgacguugugaucggcauugugaacaauaccguguacgacccucugcagcccgagcuggacagcuucaaagaggaacuggacaaguacuuuaagaaccacacaagccccgacguggaccugggcgauaucagcggaaucaaugccagcgucgugaacauccagaaagagaucgaccggcugaacgagguggccaagaaucugaacgagagccugaucgaccugcaagaacuggggaaguacgagcaguacaucaaguggcccugguacaucuggcugggcuuuaucgccggacugauugccaucgugaucgucacaaucaugcuguguugcaugaccagcugcuguagcugccugaagggcuguuguagcuguggcagcugcugcaaguucgacgaggacgauucugagcccgugcugaagggcgugaaacugcacuacaccugaugacucgagcugguacugcaugcacgcaaugcuagcugccccuuucccguccuggguaccccgagucucccccgaccucgggucccagguaugcucccaccuccaccugccccacucaccaccucugcuaguuccagacaccucccaagcacgcagcaaugcagcucaaaacgcuuagccuagccacacccccacgggaaacagcagugauuaaccuuuagcaauaaacgaaaguuuaacuaagcuauacuaaccccaggguuggucaauuucgugccagccacacccuggagcuagcaaaaaaaaaaaaaaaaaaaaaaaaaaaaaaaaaaaaaaaaaaaaaaaaaaaaaaaaaaaaaaaaaaaaaaaaaaaaaaaaaaaaaaaaaaaaaaaaaaaa

SEQ ID NO: 26459 - RNA, 4267 nt, Artificial Sequence
  SARS-CoV-2/Wuhan/WIV05/2019__EPI_ISL_402128 spike protein mRNA gc mod (1-1273)(K986P_V987P_H69del_V70del_A222V_Y453F_S477N_D614G_I692V)
agaauaaacuaguauucuucugguccccacagacucagagagaacccgccaccauguucguguuucuggugcugcugccccugguguccagccagugugugaaccugaccaccagaacacagcugccuccagccuacaccaacagcuucaccagaggcguguacuaccccgacaagguguucagauccagcgugcugcacucuacccaggaccuguuccugccuuucuucagcaacgugaccugguuccacgccaucuccggcaccaauggcaccaagagauucgacaaccccgugcugcccuucaacgacgggguguacuuugccagcaccgagaaguccaacaucaucagaggcuggaucuucggcaccacacuggacagcaagacccagagccugcugaucgugaacaacgccaccaacguggucaucaaagugugcgaguuccaguucugcaacgaccccuuccugggcgucuacuaccacaagaacaacaagagcuggauggaaagcgaguuccggguguacagcagcgccaacaacugcaccuucgaguacgugucccagccuuuccugauggaccuggaaggcaagcagggcaacuucaagaaccugcgcgaguucguguucaagaacaucgacggcuacuucaaaaucuacagcaagcacaccccuaucaaccucgugcgggaucugccucagggcuucucugugcuggaaccccugguggaucugcccaucggcaucaacaucacccgguuucagacacugcuggcccugcacagaagcuaccugacaccuggcgauagcagcagcggauggacagcuggugccgccgcuuacuaugugggcuaccugcagccuagaaccuuccugcugaaguacaacgagaacggcaccaucaccgacgccguggauugugcucuggauccucugagcgagacaaagugcacccugaaguccuucaccguggaaaagggcaucuaccagaccagcaacuuccgggugcagcccaccgaauccaucgugcgguuccccaauaucaccaaucugugccccuucggcgagguguucaaugccaccagauucgccucuguguacgccuggaaccggaagcggaucagcaauugcguggccgacuacuccgugcuguacaacuccgccagcuucagcaccuucaagugcuacggcguguccccuaccaagcugaacgaccugugcuucacaaacguguacgccgacagcuucgugauccggggagaugaagugcggcagauugccccuggacagacaggcaagaucgccgacuacaacuacaagcugcccgacgacuucaccggcugugugauugccuggaacagcaacaaccuggacuccaaagucggcggcaacuacaauuaccuguuccggcuguuccggaaguccaaucugaagcccuucgagcgggacaucagcaccgaaaucuaucaggccggcaacaccccuugcaacggcguggaaggcuucaacugcuacuucccacugcaguccuacggcuuucagcccacaaauggcgugggcuaucagcccuacagagugguggugcugagcuucgaacugcugcaugcuccugccacagugugcggcccuaagaaaagcaccaaucucgugaagaacaaaugcgugaacuucaacuucaacggccugaccggcaccggcgugcugacagagagcaacaagaaguuccugccauuccagcaguuuggccgggauaucgccgauaccacagacgccguuagagauccccagacacuggaaauccuggacaucaccccaugcagcuucggcggagugucugugaucaccccuggcaccaacaccagcaaucagguggcagugcuguaccagggcgugaacuguaccgaagugcccguggccauucacgccgaucagcugacaccuacauggcggguguacuccaccggcagcaauguguuucagaccagagccggcugucugaucggagccgagcacgugaacaauagcuacgagugcgacauccccaucggcgcuggcaucugugccagcuaccagacacagacaaacagccccagacgggcuagaagcguggccagccagagcgugauugccuacacaaugucucugggcgccgagaacagcguggccuacuccaacaacucuaucgcuauccccaccaacuucaccaucagcgugaccaccgagauccugccuguguccaugaccaagaccagcguggacugcaccauguacaucugcggcgauuccaccgagugcuccaaccugcugcugcaguacggcagcuucugcacccagcugaauagagcccugacagggaucgccguggaacaggacaagaacacccaagagguguucgcccaagugaagcaaaucuacaagaccccuccuaucaaggacuucggcggcuucaauuucagccagauucugcccgauccuagcaagcccagcaagcggagcuucaucgaggaccugcuguucaacaaagugacacuggccgacgccggcuucaucaagcaguauggcgauugucugggcgacauugccgccagggaucugauuugcgcccagaaguuuaacggacugacagugcugccuccucugcugaccgaugagaugaucgcccaguacacaucugcccugcuggccggcacaaucacaagcggcuggacauuuggagcuggcgccgcucugcagauccccuuugcuaugcagauggccuaccgguucaacggcaucggagugacccagaaugugcuguacgagaaccagaagcugaucgccaaccaguucaacagcgccaucggcaagauccaggacagccugagcagcacagcaagcgcccugggaaagcugcaggacguggucaaccagaaugcccaggcacugaacacccuggucaagcagcuguccuccaacuucggcgccaucagcucugugcugaacgauauccugagcagacuggacccuccugaggccgaggugcagaucgacagacugaucacaggcagacugcagagccuccagacauacgugacccagcagcugaucagagccgccgagauuagagccucugccaaucuggccgccaccaagaugucugagugugugcugggccagagcaagagaguggacuuuugcggcaagggcuaccaccugaugagcuucccucagucugccccucacggcgugguguuucugcacgugacauaugugcccgcucaagagaagaauuucaccaccgcuccagccaucugccacgacggcaaagcccacuuuccuagagaaggcguguucguguccaacggcacccauugguucgugacacagcggaacuucuacgagccccagaucaucaccaccgacaacaccuucgugucuggcaacugcgacguugugaucggcauugugaacaauaccguguacgacccucugcagcccgagcuggacagcuucaaagaggaacuggacaaguacuuuaagaaccacacaagccccgacguggaccugggcgauaucagcggaaucaaugccagcgucgugaacauccagaaagagaucgaccggcugaacgagguggccaagaaucugaacgagagccugaucgaccugcaagaacuggggaaguacgagcaguacaucaaguggcccugguacaucuggcugggcuuuaucgccggacugauugccaucgugauggucacaaucaugcuguguugcaugaccagcugcuguagcugccugaagggcuguuguagcuguggcagcugcugcaaguucgacgaggacgauucugagcccgugcugaagggcgugaaacugcacuacaccugaugacucgagcugguacugcaugcacgcaaugcuagcugccccuuucccguccuggguaccccgagucucccccgaccucgggucccagguaugcucccaccuccaccugccccacucaccaccucugcuaguuccagacaccucccaagcacgcagcaaugcagcucaaaacgcuuagccuagccacacccccacgggaaacagcagugauuaaccuuuagcaauaaacgaaaguuuaacuaagcuauacuaaccccaggguuggucaauuucgugccagccacacccuggagcuagcaaaaaaaaaaaaaaaaaaaaaaaaaaaaaaaaaaaaaaaaaaaaaaaaaaaaaaaaaaaaaaaaaaaaaaaaaaaaaaaaaaaaaaaaaaaaaaaaaaaa

SEQ ID NO: 26460 - RNA, 4267 nt, Artificial Sequence
  SARS-CoV-2/Wuhan/WIV05/2019__EPI_ISL_402128 spike protein mRNA gc mod (1-1273)(K986P_V987P_H69del_V70del_Y453F_D614G_I692V_M1229I)
agaauaaacuaguauucuucugguccccacagacucagagagaacccgccaccauguucguguuucuggugcugcugccccugguguccagccagugugugaaccugaccaccagaacacagcugccuccagccuacaccaacagcuucaccagaggcguguacuaccccgacaagguguucagauccagcgugcugcacucuacccaggaccuguuccugccuuucuucagcaacgugaccugguuccacgccaucuccggcaccaauggcaccaagagauucgacaaccccgugcugcccuucaacgacgggguguacuuugccagcaccgagaaguccaacaucaucagaggcuggaucuucggcaccacacuggacagcaagacccagagccugcugaucgugaacaacgccaccaacguggucaucaaagugugcgaguuccaguucugcaacgaccccuuccugggcgucuacuaccacaagaacaacaagagcuggauggaaagcgaguuccggguguacagcagcgccaacaacugcaccuucgaguacgugucccagccuuuccugauggaccuggaaggcaagcagggcaacuucaagaaccugcgcgaguucguguucaagaacaucgacggcuacuucaaaaucuacagcaagcacaccccuaucaaccucgugcgggaucugccucagggcuucucugcucuggaaccccugguggaucugcccaucggcaucaacaucacccgguuucagacacugcuggcccugcacagaagcuaccugacaccuggcgauagcagcagcggauggacagcuggugccgccgcuuacuaugugggcuaccugcagccuagaaccuuccugcugaaguacaacgagaacggcaccaucaccgacgccguggauugugcucuggauccucugagcgagacaaagugcacccugaaguccuucaccguggaaaagggcaucuaccagaccagcaacuuccgggugcagcccaccgaauccaucgugcgguuccccaauaucaccaaucugugccccuucggcgagguguucaaugccaccagauucgccucuguguacgccuggaaccggaagcggaucagcaauugcguggccgacuacuccgugcuguacaacuccgccagcuucagcaccuucaagugcuacggcguguccccuaccaagcugaacgaccugugcuucacaaacguguacgccgacagcuucgugauccggggagaugaagugcggcagauugccccuggacagacaggcaagaucgccgacuacaacuacaagcugcccgacgacuucaccggcugugugauugccuggaacagcaacaaccuggacuccaaagucggcggcaacuacaauuaccuguuccggcuguuccggaaguccaaucugaagcccuucgagcgggacaucagcaccgaaaucuaucaggccggcagcaccccuugcaacggcguggaaggcuucaacugcuacuucccacugcaguccuacggcuuucagcccacaaauggcgugggcuaucagcccuacagagugguggugcugagcuucgaacugcugcaugcuccugccacagugugcggcccuaagaaaagcaccaaucucgugaagaacaaaugcgugaacuucaacuucaacggccugaccggcaccggcgugcugacagagagcaacaagaaguuccugccauuccagcaguuuggccgggauaucgccgauaccacagacgccguuagagauccccagacacuggaaauccuggacaucaccccaugcagcuucggcggagugucugugaucaccccuggcaccaacaccagcaaucagguggcagugcuguaccagggcgugaacuguaccgaagugcccguggccauucacgccgaucagcugacaccuacauggcggguguacuccaccggcagcaauguguuucagaccagagccggcugucugaucggagccgagcacgugaacaauagcuacgagugcgacauccccaucggcgcuggcaucugugccagcuaccagacacagacaaacagccccagacgggcuagaagcguggccagccagagcgugauugccuacacaaugucucugggcgccgagaacagcguggccuacuccaacaacucuaucgcuauccccaccaacuucaccaucagcgugaccaccgagauccugccuguguccaugaccaagaccagcguggacugcaccauguacaucugcggcgauuccaccgagugcuccaaccugcugcugcaguacggcagcuucugcacccagcugaauagagcccugacagggaucgccguggaacaggacaagaacacccaagagguguucgcccaagugaagcaaaucuacaagaccccuccuaucaaggacuucggcggcuucaauuucagccagauucugcccgauccuagcaagcccagcaagcggagcuucaucgaggaccugcuguucaacaaagugacacuggccgacgccggcuucaucaagcaguauggcgauugucugggcgacauugccgccagggaucugauuugcgcccagaaguuuaacggacugacagugcugccuccucugcugaccgaugagaugaucgcccaguacacaucugcccugcuggccggcacaaucacaagcggcuggacauuuggagcuggcgccgcucugcagauccccuuugcuaugcagauggccuaccgguucaacggcaucggagugacccagaaugugcuguacgagaaccagaagcugaucgccaaccaguucaacagcgccaucggcaagauccaggacagccugagcagcacagcaagcgcccugggaaagcugcaggacguggucaaccagaaugcccaggcacugaacacccuggucaagcagcuguccuccaacuucggcgccaucagcucugugcugaacgauauccugagcagacuggacccuccugaggccgaggugcagaucgacagacugaucacaggcagacugcagagccuccagacauacgugacccagcagcugaucagagccgccgagauuagagccucugccaaucuggccgccaccaagaugucugagugugugcugggccagagcaagagaguggacuuuugcggcaagggcuaccaccugaugagcuucccucagucugccccucacggcgugguguuucugcacgugacauaugugcccgcucaagagaagaauuucaccaccgcuccagccaucugccacgacggcaaagcccacuuuccuagagaaggcguguucguguccaacggcacccauugguucgugacacagcggaacuucuacgagccccagaucaucaccaccgacaacaccuucgugucuggcaacugcgacguugugaucggcauugugaacaauaccguguacgacccucugcagcccgagcuggacagcuucaaagaggaacuggacaaguacuuuaagaaccacacaagccccgacguggaccugggcgauaucagcggaaucaaugccagcgucgugaacauccagaaagagaucgaccggcugaacgagguggccaagaaucugaacgagagccugaucgaccugcaagaacuggggaaguacgagcaguacaucaaguggcccugguacaucuggcugggcuuuaucgccggacugauugccaucgugaucgucacaaucaugcuguguugcaugaccagcugcuguagcugccugaagggcuguuguagcuguggcagcugcugcaaguucgacgaggacgauucugagcccgugcugaagggcgugaaacugcacuacaccugaugacucgagcugguacugcaugcacgcaaugcuagcugccccuuucccguccuggguaccccgagucucccccgaccucgggucccagguaugcucccaccuccaccugccccacucaccaccucugcuaguuccagacaccucccaagcacgcagcaaugcagcucaaaacgcuuagccuagccacacccccacgggaaacagcagugauuaaccuuuagcaauaaacgaaaguuuaacuaagcuauacuaaccccaggguuggucaauuucgugccagccacacccuggagcuagcaaaaaaaaaaaaaaaaaaaaaaaaaaaaaaaaaaaaaaaaaaaaaaaaaaaaaaaaaaaaaaaaaaaaaaaaaaaaaaaaaaaaaaaaaaaaaaaaaaaa

SEQ ID NO: 26461 - RNA, 4264 nt, Artificial Sequence
  SARS-CoV-2/Wuhan/WIV05/2019__EPI_ISL_402128 spike protein mRNA gc mod (1-1273)(K986P_V987P_K986P_V987P_H69del_V70del_Y144del_N501Y_A570 D_D614G_P681H_T716I_S982A_D1118H)
agaauaaacuaguauucuucugguccccacagacucagagagaacccgccaccauguucguguuucuggugcugcugccccugguguccagccagugugugaaccugaccaccagaacacagcugccuccagccuacaccaacagcuucaccagaggcguguacuaccccgacaagguguucagauccagcgugcugcacucuacccaggaccuguuccugccuuucuucagcaacgugaccugguuccacgccaucuccggcaccaauggcaccaagagauucgacaaccccgugcugcccuucaacgacgggguguacuuugccagcaccgagaaguccaacaucaucagaggcuggaucuucggcaccacacuggacagcaagacccagagccugcugaucgugaacaacgccaccaacguggucaucaaagugugcgaguuccaguucugcaacgaccccuuccugggcgucuaccacaagaacaacaagagcuggauggaaagcgaguuccggguguacagcagcgccaacaacugcaccuucgaguacgugucccagccuuuccugauggaccuggaaggcaagcagggcaacuucaagaaccugcgcgaguucguguucaagaacaucgacggcuacuucaaaaucuacagcaagcacaccccuaucaaccucgugcgggaucugccucagggcuucucugcucuggaaccccugguggaucugcccaucggcaucaacaucacccgguuucagacacugcuggcccugcacagaagcuaccugacaccuggcgauagcagcagcggauggacagcuggugccgccgcuuacuaugugggcuaccugcagccuagaaccuuccugcugaaguacaacgagaacggcaccaucaccgacgccguggauugugcucuggauccucugagcgagacaaagugcacccugaaguccuucaccguggaaaagggcaucuaccagaccagcaacuuccgggugcagcccaccgaauccaucgugcgguuccccaauaucaccaaucugugccccuucggcgagguguucaaugccaccagauucgccucuguguacgccuggaaccggaagcggaucagcaauugcguggccgacuacuccgugcuguacaacuccgccagcuucagcaccuucaagugcuacggcguguccccuaccaagcugaacgaccugugcuucacaaacguguacgccgacagcuucgugauccggggagaugaagugcggcagauugccccuggacagacaggcaagaucgccgacuacaacuacaagcugcccgacgacuucaccggcugugugauugccuggaacagcaacaaccuggacuccaaagucggcggcaacuacaauuaccuguaccggcuguuccggaaguccaaucugaagcccuucgagcgggacaucagcaccgaaaucuaucaggccggcagcaccccuugcaacggcguggaaggcuucaacugcuacuucccacugcaguccuacggcuuucagcccacauacggcgugggcuaucagcccuacagagugguggugcugagcuucgaacugcugcaugcuccugccacagugugcggcccuaagaaaagcaccaaucucgugaagaacaaaugcgugaacuucaacuucaacggccugaccggcaccggcgugcugacagagagcaacaagaaguuccugccauuccagcaguuuggccgggauaucgacgauaccacagacgccguuagagauccccagacacuggaaauccuggacaucaccccaugcagcuucggcggagugucugugaucaccccuggcaccaacaccagcaaucagguggcagugcuguaccagggcgugaacuguaccgaagugcccguggccauucacgccgaucagcugacaccuacauggcggguguacuccaccggcagcaauguguuucagaccagagccggcugucugaucggagccgagcacgugaacaauagcuacgagugcgacauccccaucggcgcuggcaucugugccagcuaccagacacagacaaacagccacagacgggcuagaagcguggccagccagagcaucauugccuacacaaugucucugggcgccgagaacagcguggccuacuccaacaacucuaucgcuauccccaucaacuucaccaucagcgugaccaccgagauccugccuguguccaugaccaagaccagcguggacugcaccauguacaucugcggcgauuccaccgagugcuccaaccugcugcugcaguacggcagcuucugcacccagcugaauagagcccugacagggaucgccguggaacaggacaagaacacccaagagguguucgcccaagugaagcaaaucuacaagaccccuccuaucaaggacuucggcggcuucaauuucagccagauucugcccgauccuagcaagcccagcaagcggagcuucaucgaggaccugcuguucaacaaagugacacuggccgacgccggcuucaucaagcaguauggcgauugucugggcgacauugccgccagggaucugauuugcgcccagaaguuuaacggacugacagugcugccuccucugcugaccgaugagaugaucgcccaguacacaucugcccugcuggccggcacaaucacaagcggcuggacauuuggagcuggcgccgcucugcagauccccuuugcuaugcagauggccuaccgguucaacggcaucggagugacccagaaugugcuguacgagaaccagaagcugaucgccaaccaguucaacagcgccaucggcaagauccaggacagccugagcagcacagcaagcgcccugggaaagcugcaggacguggucaaccagaaugcccaggcacugaacacccuggucaagcagcuguccuccaacuucggcgccaucagcucugugcugaacgauauccuggccagacuggacccuccugaggccgaggugcagaucgacagacugaucacaggcagacugcagagccuccagacauacgugacccagcagcugaucagagccgccgagauuagagccucugccaaucuggccgccaccaagaugucugagugugugcugggccagagcaagagaguggacuuuugcggcaagggcuaccaccugaugagcuucccucagucugccccucacggcgugguguuucugcacgugacauaugugcccgcucaagagaagaauuucaccaccgcuccagccaucugccacgacggcaaagcccacuuuccuagagaaggcguguucguguccaacggcacccauugguucgugacacagcggaacuucuacgagccccagaucaucaccacccacaacaccuucgugucuggcaacugcgacguugugaucggcauugugaacaauaccguguacgacccucugcagcccgagcuggacagcuucaaagaggaacuggacaaguacuuuaagaaccacacaagccccgacguggaccugggcgauaucagcggaaucaaugccagcgucgugaacauccagaaagagaucgaccggcugaacgagguggccaagaaucugaacgagagccugaucgaccugcaagaacuggggaaguacgagcaguacaucaaguggcccugguacaucuggcugggcuuuaucgccggacugauugccaucgugauggucacaaucaugcuguguugcaugaccagcugcuguagcugccugaagggcuguuguagcuguggcagcugcugcaaguucgacgaggacgauucugagcccgugcugaagggcgugaaacugcacuacaccugaugacucgagcugguacugcaugcacgcaaugcuagcugccccuuucccguccuggguaccccgagucucccccgaccucgggucccagguaugcucccaccuccaccugccccacucaccaccucugcuaguuccagacaccucccaagcacgcagcaaugcagcucaaaacgcuuagccuagccacacccccacgggaaacagcagugauuaaccuuuagcaauaaacgaaaguuuaacuaagcuauacuaaccccaggguuggucaauuucgugccagccacacccuggagcuagcaaaaaaaaaaaaaaaaaaaaaaaaaaaaaaaaaaaaaaaaaaaaaaaaaaaaaaaaaaaaaaaaaaaaaaaaaaaaaaaaaaaaaaaaaaaaaaaaaaaa

SEQ ID NO: 26462 - RNA, 4273 nt, Artificial Sequence
  SARS-CoV-2/Wuhan/WIV05/2019__EPI_ISL_402128 spike protein mRNA gc mod (1-1273)(K986P_V987P_K986P_V987P_K417N_E484K_N501Y_D614G)
agaauaaacuaguauucuucugguccccacagacucagagagaacccgccaccauguucguguuucuggugcugcugccccugguguccagccagugugugaaccugaccaccagaacacagcugccuccagccuacaccaacagcuucaccagaggcguguacuaccccgacaagguguucagauccagcgugcugcacucuacccaggaccuguuccugccuuucuucagcaacgugaccugguuccacgccauccacguguccggcaccaauggcaccaagagauucgacaaccccgugcugcccuucaacgacgggguguacuuugccagcaccgagaaguccaacaucaucagaggcuggaucuucggcaccacacuggacagcaagacccagagccugcugaucgugaacaacgccaccaacguggucaucaaagugugcgaguuccaguucugcaacgaccccuuccugggcgucuacuaccacaagaacaacaagagcuggauggaaagcgaguuccggguguacagcagcgccaacaacugcaccuucgaguacgugucccagccuuuccugauggaccuggaaggcaagcagggcaacuucaagaaccugcgcgaguucguguucaagaacaucgacggcuacuucaaaaucuacagcaagcacaccccuaucaaccucgugcgggaucugccucagggcuucucugcucuggaaccccugguggaucugcccaucggcaucaacaucacccgguuucagacacugcuggcccugcacagaagcuaccugacaccuggcgauagcagcagcggauggacagcuggugccgccgcuuacuaugugggcuaccugcagccuagaaccuuccugcugaaguacaacgagaacggcaccaucaccgacgccguggauugugcucuggauccucugagcgagacaaagugcacccugaaguccuucaccguggaaaagggcaucuaccagaccagcaacuuccgggugcagcccaccgaauccaucgugcgguuccccaauaucaccaaucugugccccuucggcgagguguucaaugccaccagauucgccucuguguacgccuggaaccggaagcggaucagcaauugcguggccgacuacuccgugcuguacaacuccgccagcuucagcaccuucaagugcuacggcguguccccuaccaagcugaacgaccugugcuucacaaacguguacgccgacagcuucgugauccggggagaugaagugcggcagauugccccuggacagacaggcaacaucgccgacuacaacuacaagcugcccgacgacuucaccggcugugugauugccuggaacagcaacaaccuggacuccaaagucggcggcaacuacaauuaccuguaccggcuguuccggaaguccaaucugaagcccuucgagcgggacaucagcaccgaaaucuaucaggccggcagcaccccuugcaacggcgugaagggcuucaacugcuacuucccacugcaguccuacggcuuucagcccacauacggcgugggcuaucagcccuacagagugguggugcugagcuucgaacugcugcaugcuccugccacagugugcggcccuaagaaaagcaccaaucucgugaagaacaaaugcgugaacuucaacuucaacggccugaccggcaccggcgugcugacagagagcaacaagaaguuccugccauuccagcaguuuggccgggauaucgccgauaccacagacgccguuagagauccccagacacuggaaauccuggacaucaccccaugcagcuucggcggagugucugugaucaccccuggcaccaacaccagcaaucagguggcagugcuguaccagggcgugaacuguaccgaagugcccguggccauucacgccgaucagcugacaccuacauggcggguguacuccaccggcagcaauguguuucagaccagagccggcugucugaucggagccgagcacgugaacaauagcuacgagugcgacauccccaucggcgcuggcaucugugccagcuaccagacacagacaaacagccccagacgggcuagaagcguggccagccagagcaucauugccuacacaaugucucugggcgccgagaacagcguggccuacuccaacaacucuaucgcuauccccaccaacuucaccaucagcgugaccaccgagauccugccuguguccaugaccaagaccagcguggacugcaccauguacaucugcggcgauuccaccgagugcuccaaccugcugcugcaguacggcagcuucugcacccagcugaauagagcccugacagggaucgccguggaacaggacaagaacacccaagagguguucgcccaagugaagcaaaucuacaagaccccuccuaucaaggacuucggcggcuucaauuucagccagauucugcccgauccuagcaagcccagcaagcggagcuucaucgaggaccugcuguucaacaaagugacacuggccgacgccggcuucaucaagcaguauggcgauugucugggcgacauugccgccagggaucugauuugcgcccagaaguuuaacggacugacagugcugccuccucugcugaccgaugagaugaucgcccaguacacaucugcccugcuggccggcacaaucacaagcggcuggacauuuggagcuggcgccgcucugcagauccccuuugcuaugcagauggccuaccgguucaacggcaucggagugacccagaaugugcuguacgagaaccagaagcugaucgccaaccaguucaacagcgccaucggcaagauccaggacagccugagcagcacagcaagcgcccugggaaagcugcaggacguggucaaccagaaugcccaggcacugaacacccuggucaagcagcuguccuccaacuucggcgccaucagcucugugcugaacgauauccugagcagacuggacccuccugaggccgaggugcagaucgacagacugaucacaggcagacugcagagccuccagacauacgugacccagcagcugaucagagccgccgagauuagagccucugccaaucuggccgccaccaagaugucugagugugugcugggccagagcaagagaguggacuuuugcggcaagggcuaccaccugaugagcuucccucagucugccccucacggcgugguguuucugcacgugacauaugugcccgcucaagagaagaauuucaccaccgcuccagccaucugccacgacggcaaagcccacuuuccuagagaaggcguguucguguccaacggcacccauugguucgugacacagcggaacuucuacgagccccagaucaucaccaccgacaacaccuucgugucuggcaacugcgacguugugaucggcauugugaacaauaccguguacgacccucugcagcccgagcuggacagcuucaaagaggaacuggacaaguacuuuaagaaccacacaagccccgacguggaccugggcgauaucagcggaaucaaugccagcgucgugaacauccagaaagagaucgaccggcugaacgagguggccaagaaucugaacgagagccugaucgaccugcaagaacuggggaaguacgagcaguacaucaaguggcccugguacaucuggcugggcuuuaucgccggacugauugccaucgugauggucacaaucaugcuguguugcaugaccagcugcuguagcugccugaagggcuguuguagcuguggcagcugcugcaaguucgacgaggacgauucugagcccgugcugaagggcgugaaacugcacuacaccugaugacucgagcugguacugcaugcacgcaaugcuagcugccccuuucccguccuggguaccccgagucucccccgaccucgggucccagguaugcucccaccuccaccugccccacucaccaccucugcuaguuccagacaccucccaagcacgcagcaaugcagcucaaaacgcuuagccuagccacacccccacgggaaacagcagugauuaaccuuuagcaauaaacgaaaguuuaacuaagcuauacuaaccccaggguuggucaauuucgugccagccacacccuggagcuagcaaaaaaaaaaaaaaaaaaaaaaaaaaaaaaaaaaaaaaaaaaaaaaaaaaaaaaaaaaaaaaaaaaaaaaaaaaaaaaaaaaaaaaaaaaaaaaaaaaaa

SEQ ID NO: 26463 - RNA, 4264 nt, Artificial Sequence
  SARS-CoV-2/Wuhan/WIV05/2019__EPI_ISL_402128 spike protein mRNA gc mod (1-1273)(K986P_V987P_K986P_V987P_L18F_D80A_D215G_L242del_A243del_ L244del_R246I_K417N_E484K_N501Y_D614G_A701V)
agaauaaacuaguauucuucugguccccacagacucagagagaacccgccaccauguucguguuucuggugcugcugccccugguguccagccagugugugaacuucaccaccagaacacagcugccuccagccuacaccaacagcuucaccagaggcguguacuaccccgacaagguguucagauccagcgugcugcacucuacccaggaccuguuccugccuuucuucagcaacgugaccugguuccacgccauccacguguccggcaccaauggcaccaagagauucgccaaccccgugcugcccuucaacgacgggguguacuuugccagcaccgagaaguccaacaucaucagaggcuggaucuucggcaccacacuggacagcaagacccagagccugcugaucgugaacaacgccaccaacguggucaucaaagugugcgaguuccaguucugcaacgaccccuuccugggcgucuacuaccacaagaacaacaagagcuggauggaaagcgaguuccggguguacagcagcgccaacaacugcaccuucgaguacgugucccagccuuuccugauggaccuggaaggcaagcagggcaacuucaagaaccugcgcgaguucguguucaagaacaucgacggcuacuucaaaaucuacagcaagcacaccccuaucaaccucgugcggggccugccucagggcuucucugcucuggaaccccugguggaucugcccaucggcaucaacaucacccgguuucagacacugcacaucagcuaccugacaccuggcgauagcagcagcggauggacagcuggugccgccgcuuacuaugugggcuaccugcagccuagaaccuuccugcugaaguacaacgagaacggcaccaucaccgacgccguggauugugcucuggauccucugagcgagacaaagugcacccugaaguccuucaccguggaaaagggcaucuaccagaccagcaacuuccgggugcagcccaccgaauccaucgugcgguuccccaauaucaccaaucugugccccuucggcgagguguucaaugccaccagauucgccucuguguacgccuggaaccggaagcggaucagcaauugcguggccgacuacuccgugcuguacaacuccgccagcuucagcaccuucaagugcuacggcguguccccuaccaagcugaacgaccugugcuucacaaacguguacgccgacagcuucgugauccggggagaugaagugcggcagauugccccuggacagacaggcaacaucgccgacuacaacuacaagcugcccgacgacuucaccggcugugugauugccuggaacagcaacaaccuggacuccaaagucggcggcaacuacaauuaccuguaccggcuguuccggaaguccaaucugaagcccuucgagcgggacaucagcaccgaaaucuaucaggccggcagcaccccuugcaacggcgugaagggcuucaacugcuacuucccacugcaguccuacggcuuucagcccacauacggcgugggcuaucagcccuacagagugguggugcugagcuucgaacugcugcaugcuccugccacagugugcggcccuaagaaaagcaccaaucucgugaagaacaaaugcgugaacuucaacuucaacggccugaccggcaccggcgugcugacagagagcaacaagaaguuccugccauuccagcaguuuggccgggauaucgccgauaccacagacgccguuagagauccccagacacuggaaauccuggacaucaccccaugcagcuucggcggagugucugugaucaccccuggcaccaacaccagcaaucagguggcagugcuguaccagggcgugaacuguaccgaagugcccguggccauucacgccgaucagcugacaccuacauggcggguguacuccaccggcagcaauguguuucagaccagagccggcugucugaucggagccgagcacgugaacaauagcuacgagugcgacauccccaucggcgcuggcaucugugccagcuaccagacacagacaaacagccccagacgggcuagaagcguggccagccagagcaucauugccuacacaaugucucugggcguggagaacagcguggccuacuccaacaacucuaucgcuauccccaccaacuucaccaucagcgugaccaccgagauccugccuguguccaugaccaagaccagcguggacugcaccauguacaucugcggcgauuccaccgagugcuccaaccugcugcugcaguacggcagcuucugcacccagcugaauagagcccugacagggaucgccguggaacaggacaagaacacccaagagguguucgcccaagugaagcaaaucuacaagaccccuccuaucaaggacuucggcggcuucaauuucagccagauucugcccgauccuagcaagcccagcaagcggagcuucaucgaggaccugcuguucaacaaagugacacuggccgacgccggcuucaucaagcaguauggcgauugucugggcgacauugccgccagggaucugauuugcgcccagaaguuuaacggacugacagugcugccuccucugcugaccgaugagaugaucgcccaguacacaucugcccugcuggccggcacaaucacaagcggcuggacauuuggagcuggcgccgcucugcagauccccuuugcuaugcagauggccuaccgguucaacggcaucggagugacccagaaugugcuguacgagaaccagaagcugaucgccaaccaguucaacagcgccaucggcaagauccaggacagccugagcagcacagcaagcgcccugggaaagcugcaggacguggucaaccagaaugcccaggcacugaacacccuggucaagcagcuguccuccaacuucggcgccaucagcucugugcugaacgauauccugagcagacuggacccuccugaggccgaggugcagaucgacagacugaucacaggcagacugcagagccuccagacauacgugacccagcagcugaucagagccgccgagauuagagccucugccaaucuggccgccaccaagaugucugagugugugcugggccagagcaagagaguggacuuuugcggcaagggcuaccaccugaugagcuucccucagucugccccucacggcgugguguuucugcacgugacauaugugcccgcucaagagaagaauuucaccaccgcuccagccaucugccacgacggcaaagcccacuuuccuagagaaggcguguucguguccaacggcacccauugguucgugacacagcggaacuucuacgagccccagaucaucaccaccgacaacaccuucgugucuggcaacugcgacguugugaucggcauugugaacaauaccguguacgacccucugcagcccgagcuggacagcuucaaagaggaacuggacaaguacuuuaagaaccacacaagccccgacguggaccugggcgauaucagcggaaucaaugccagcgucgugaacauccagaaagagaucgaccggcugaacgagguggccaagaaucugaacgagagccugaucgaccugcaagaacuggggaaguacgagcaguacaucaaguggcccugguacaucuggcugggcuuuaucgccggacugauugccaucgugauggucacaaucaugcuguguugcaugaccagcugcuguagcugccugaagggcuguuguagcuguggcagcugcugcaaguucgacgaggacgauucugagcccgugcugaagggcgugaaacugcacuacaccugaugacucgagcugguacugcaugcacgcaaugcuagcugccccuuucccguccuggguaccccgagucucccccgaccucgggucccagguaugcucccaccuccaccugccccacucaccaccucugcuaguuccagacaccucccaagcacgcagcaaugcagcucaaaacgcuuagccuagccacacccccacgggaaacagcagugauuaaccuuuagcaauaaacgaaaguuuaacuaagcuauacuaaccccaggguuggucaauuucgugccagccacacccuggagcuagcaaaaaaaaaaaaaaaaaaaaaaaaaaaaaaaaaaaaaaaaaaaaaaaaaaaaaaaaaaaaaaaaaaaaaaaaaaaaaaaaaaaaaaaaaaaaaaaaaaaa

SEQ ID NO: 26464 - RNA, 4273 nt, Artificial Sequence
  SARS-CoV-2/Wuhan/WIV05/2019__EPI_ISL_402128 spike protein mRNA gc mod (1-1273)(K986P_V987P_K986P_V987P_E484K_D614G)
agaauaaacuaguauucuucugguccccacagacucagagagaacccgccaccauguucguguuucuggugcugcugccccugguguccagccagugugugaaccugaccaccagaacacagcugccuccagccuacaccaacagcuucaccagaggcguguacuaccccgacaagguguucagauccagcgugcugcacucuacccaggaccuguuccugccuuucuucagcaacgugaccugguuccacgccauccacguguccggcaccaauggcaccaagagauucgacaaccccgugcugcccuucaacgacgggguguacuuugccagcaccgagaaguccaacaucaucagaggcuggaucuucggcaccacacuggacagcaagacccagagccugcugaucgugaacaacgccaccaacguggucaucaaagugugcgaguuccaguucugcaacgaccccuuccugggcgucuacuaccacaagaacaacaagagcuggauggaaagcgaguuccggguguacagcagcgccaacaacugcaccuucgaguacgugucccagccuuuccugauggaccuggaaggcaagcagggcaacuucaagaaccugcgcgaguucguguucaagaacaucgacggcuacuucaaaaucuacagcaagcacaccccuaucaaccucgugcgggaucugccucagggcuucucugcucuggaaccccugguggaucugcccaucggcaucaacaucacccgguuucagacacugcuggcccugcacagaagcuaccugacaccuggcgauagcagcagcggauggacagcuggugccgccgcuuacuaugugggcuaccugcagccuagaaccuuccugcugaaguacaacgagaacggcaccaucaccgacgccguggauugugcucuggauccucugagcgagacaaagugcacccugaaguccuucaccguggaaaagggcaucuaccagaccagcaacuuccgggugcagcccaccgaauccaucgugcgguuccccaauaucaccaaucugugccccuucggcgagguguucaaugccaccagauucgccucuguguacgccuggaaccggaagcggaucagcaauugcguggccgacuacuccgugcuguacaacuccgccagcuucagcaccuucaagugcuacggcguguccccuaccaagcugaacgaccugugcuucacaaacguguacgccgacagcuucgugauccggggagaugaagugcggcagauugccccuggacagacaggcaagaucgccgacuacaacuacaagcugcccgacgacuucaccggcugugugauugccuggaacagcaacaaccuggacuccaaagucggcggcaacuacaauuaccuguaccggcuguuccggaaguccaaucugaagcccuucgagcgggacaucagcaccgaaaucuaucaggccggcagcaccccuugcaacggcgugaagggcuucaacugcuacuucccacugcaguccuacggcuuucagcccacaaauggcgugggcuaucagcccuacagagugguggugcugagcuucgaacugcugcaugcuccugccacagugugcggcccuaagaaaagcaccaaucucgugaagaacaaaugcgugaacuucaacuucaacggccugaccggcaccggcgugcugacagagagcaacaagaaguuccugccauuccagcaguuuggccgggauaucgccgauaccacagacgccguuagagauccccagacacuggaaauccuggacaucaccccaugcagcuucggcggagugucugugaucaccccuggcaccaacaccagcaaucagguggcagugcuguaccagggcgugaacuguaccgaagugcccguggccauucacgccgaucagcugacaccuacauggcggguguacuccaccggcagcaauguguuucagaccagagccggcugucugaucggagccgagcacgugaacaauagcuacgagugcgacauccccaucggcgcuggcaucugugccagcuaccagacacagacaaacagccccagacgggcuagaagcguggccagccagagcaucauugccuacacaaugucucugggcgccgagaacagcguggccuacuccaacaacucuaucgcuauccccaccaacuucaccaucagcgugaccaccgagauccugccuguguccaugaccaagaccagcguggacugcaccauguacaucugcggcgauuccaccgagugcuccaaccugcugcugcaguacggcagcuucugcacccagcugaauagagcccugacagggaucgccguggaacaggacaagaacacccaagagguguucgcccaagugaagcaaaucuacaagaccccuccuaucaaggacuucggcggcuucaauuucagccagauucugcccgauccuagcaagcccagcaagcggagcuucaucgaggaccugcuguucaacaaagugacacuggccgacgccggcuucaucaagcaguauggcgauugucugggcgacauugccgccagggaucugauuugcgcccagaaguuuaacggacugacagugcugccuccucugcugaccgaugagaugaucgcccaguacacaucugcccugcuggccggcacaaucacaagcggcuggacauuuggagcuggcgccgcucugcagauccccuuugcuaugcagauggccuaccgguucaacggcaucggagugacccagaaugugcuguacgagaaccagaagcugaucgccaaccaguucaacagcgccaucggcaagauccaggacagccugagcagcacagcaagcgcccugggaaagcugcaggacguggucaaccagaaugcccaggcacugaacacccuggucaagcagcuguccuccaacuucggcgccaucagcucugugcugaacgauauccugagcagacuggacccuccugaggccgaggugcagaucgacagacugaucacaggcagacugcagagccuccagacauacgugacccagcagcugaucagagccgccgagauuagagccucugccaaucuggccgccaccaagaugucugagugugugcugggccagagcaagagaguggacuuuugcggcaagggcuaccaccugaugagcuucccucagucugccccucacggcgugguguuucugcacgugacauaugugcccgcucaagagaagaauuucaccaccgcuccagccaucugccacgacggcaaagcccacuuuccuagagaaggcguguucguguccaacggcacccauugguucgugacacagcggaacuucuacgagccccagaucaucaccaccgacaacaccuucgugucuggcaacugcgacguugugaucggcauugugaacaauaccguguacgacccucugcagcccgagcuggacagcuucaaagaggaacuggacaaguacuuuaagaaccacacaagccccgacguggaccugggcgauaucagcggaaucaaugccagcgucgugaacauccagaaagagaucgaccggcugaacgagguggccaagaaucugaacgagagccugaucgaccugcaagaacuggggaaguacgagcaguacaucaaguggcccugguacaucuggcugggcuuuaucgccggacugauugccaucgugauggucacaaucaugcuguguugcaugaccagcugcuguagcugccugaagggcuguuguagcuguggcagcugcugcaaguucgacgaggacgauucugagcccgugcugaagggcgugaaacugcacuacaccugaugacucgagcugguacugcaugcacgcaaugcuagcugccccuuucccguccuggguaccccgagucucccccgaccucgggucccagguaugcucccaccuccaccugccccacucaccaccucugcuaguuccagacaccucccaagcacgcagcaaugcagcucaaaacgcuuagccuagccacacccccacgggaaacagcagugauuaaccuuuagcaauaaacgaaaguuuaacuaagcuauacuaaccccaggguuggucaauuucgugccagccacacccuggagcuagcaaaaaaaaaaaaaaaaaaaaaaaaaaaaaaaaaaaaaaaaaaaaaaaaaaaaaaaaaaaaaaaaaaaaaaaaaaaaaaaaaaaaaaaaaaaaaaaaaaaa

SEQ ID NO: 26465 - RNA, 4273 nt, Artificial Sequence
  SARS-CoV-2/Wuhan/WIV05/2019__EPI_ISL_402128 spike protein mRNA gc mod (1-1273)(K986P_V987P_K986P_V987P_L18F_T20N_P26S_D138Y_R190S_K417T _E484K_N501Y_D614G_H655Y_T1027I)
agaauaaacuaguauucuucugguccccacagacucagagagaacccgccaccauguucguguuucuggugcugcugccccugguguccagccagugugugaacuucaccaacagaacacagcugccuagcgccuacaccaacagcuucaccagaggcguguacuaccccgacaagguguucagauccagcgugcugcacucuacccaggaccuguuccugccuuucuucagcaacgugaccugguuccacgccauccacguguccggcaccaauggcaccaagagauucgacaaccccgugcugcccuucaacgacgggguguacuuugccagcaccgagaaguccaacaucaucagaggcuggaucuucggcaccacacuggacagcaagacccagagccugcugaucgugaacaacgccaccaacguggucaucaaagugugcgaguuccaguucugcaacuaccccuuccugggcgucuacuaccacaagaacaacaagagcuggauggaaagcgaguuccggguguacagcagcgccaacaacugcaccuucgaguacgugucccagccuuuccugauggaccuggaaggcaagcagggcaacuucaagaaccugagcgaguucguguucaagaacaucgacggcuacuucaaaaucuacagcaagcacaccccuaucaaccucgugcgggaucugccucagggcuucucugcucuggaaccccugguggaucugcccaucggcaucaacaucacccgguuucagacacugcuggcccugcacagaagcuaccugacaccuggcgauagcagcagcggauggacagcuggugccgccgcuuacuaugugggcuaccugcagccuagaaccuuccugcugaaguacaacgagaacggcaccaucaccgacgccguggauugugcucuggauccucugagcgagacaaagugcacccugaaguccuucaccguggaaaagggcaucuaccagaccagcaacuuccgggugcagcccaccgaauccaucgugcgguuccccaauaucaccaaucugugccccuucggcgagguguucaaugccaccagauucgccucuguguacgccuggaaccggaagcggaucagcaauugcguggccgacuacuccgugcuguacaacuccgccagcuucagcaccuucaagugcuacggcguguccccuaccaagcugaacgaccugugcuucacaaacguguacgccgacagcuucgugauccggggagaugaagugcggcagauugccccuggacagacaggcaccaucgccgacuacaacuacaagcugcccgacgacuucaccggcugugugauugccuggaacagcaacaaccuggacuccaaagucggcggcaacuacaauuaccuguaccggcuguuccggaaguccaaucugaagcccuucgagcgggacaucagcaccgaaaucuaucaggccggcagcaccccuugcaacggcgugaagggcuucaacugcuacuucccacugcaguccuacggcuuucagcccacauacggcgugggcuaucagcccuacagagugguggugcugagcuucgaacugcugcaugcuccugccacagugugcggcccuaagaaaagcaccaaucucgugaagaacaaaugcgugaacuucaacuucaacggccugaccggcaccggcgugcugacagagagcaacaagaaguuccugccauuccagcaguuuggccgggauaucgccgauaccacagacgccguuagagauccccagacacuggaaauccuggacaucaccccaugcagcuucggcggagugucugugaucaccccuggcaccaacaccagcaaucagguggcagugcuguaccagggcgugaacuguaccgaagugcccguggccauucacgccgaucagcugacaccuacauggcggguguacuccaccggcagcaauguguuucagaccagagccggcugucugaucggagccgaguacgugaacaauagcuacgagugcgacauccccaucggcgcuggcaucugugccagcuaccagacacagacaaacagccccagacgggcuagaagcguggccagccagagcaucauugccuacacaaugucucugggcgccgagaacagcguggccuacuccaacaacucuaucgcuauccccaccaacuucaccaucagcgugaccaccgagauccugccuguguccaugaccaagaccagcguggacugcaccauguacaucugcggcgauuccaccgagugcuccaaccugcugcugcaguacggcagcuucugcacccagcugaauagagcccugacagggaucgccguggaacaggacaagaacacccaagagguguucgcccaagugaagcaaaucuacaagaccccuccuaucaaggacuucggcggcuucaauuucagccagauucugcccgauccuagcaagcccagcaagcggagcuucaucgaggaccugcuguucaacaaagugacacuggccgacgccggcuucaucaagcaguauggcgauugucugggcgacauugccgccagggaucugauuugcgcccagaaguuuaacggacugacagugcugccuccucugcugaccgaugagaugaucgcccaguacacaucugcccugcuggccggcacaaucacaagcggcuggacauuuggagcuggcgccgcucugcagauccccuuugcuaugcagauggccuaccgguucaacggcaucggagugacccagaaugugcuguacgagaaccagaagcugaucgccaaccaguucaacagcgccaucggcaagauccaggacagccugagcagcacagcaagcgcccugggaaagcugcaggacguggucaaccagaaugcccaggcacugaacacccuggucaagcagcuguccuccaacuucggcgccaucagcucugugcugaacgauauccugagcagacuggacccuccugaggccgaggugcagaucgacagacugaucacaggcagacugcagagccuccagacauacgugacccagcagcugaucagagccgccgagauuagagccucugccaaucuggccgccaucaagaugucugagugugugcugggccagagcaagagaguggacuuuugcggcaagggcuaccaccugaugagcuucccucagucugccccucacggcgugguguuucugcacgugacauaugugcccgcucaagagaagaauuucaccaccgcuccagccaucugccacgacggcaaagcccacuuuccuagagaaggcguguucguguccaacggcacccauugguucgugacacagcggaacuucuacgagccccagaucaucaccaccgacaacaccuucgugucuggcaacugcgacguugugaucggcauugugaacaauaccguguacgacccucugcagcccgagcuggacagcuucaaagaggaacuggacaaguacuuuaagaaccacacaagccccgacguggaccugggcgauaucagcggaaucaaugccagcgucgugaacauccagaaagagaucgaccggcugaacgagguggccaagaaucugaacgagagccugaucgaccugcaagaacuggggaaguacgagcaguacaucaaguggcccugguacaucuggcugggcuuuaucgccggacugauugccaucgugauggucacaaucaugcuguguugcaugaccagcugcuguagcugccugaagggcuguuguagcuguggcagcugcugcaaguucgacgaggacgauucugagcccgugcugaagggcgugaaacugcacuacaccugaugacucgagcugguacugcaugcacgcaaugcuagcugccccuuucccguccuggguaccccgagucucccccgaccucgggucccagguaugcucccaccuccaccugccccacucaccaccucugcuaguuccagacaccucccaagcacgcagcaaugcagcucaaaacgcuuagccuagccacacccccacgggaaacagcagugauuaaccuuuagcaauaaacgaaaguuuaacuaagcuauacuaaccccaggguuggucaauuucgugccagccacacccuggagcuagcaaaaaaaaaaaaaaaaaaaaaaaaaaaaaaaaaaaaaaaaaaaaaaaaaaaaaaaaaaaaaaaaaaaaaaaaaaaaaaaaaaaaaaaaaaaaaaaaaaaa

SEQ ID NO: 26466 - RNA, 4273 nt, Artificial Sequence
  SARS-CoV-2/Wuhan/WIV05/2019__EPI_ISL_402128 spike protein mRNA gc mod (1-1273)(K986P_V987P_K986P_V987P_S13I_W152C_L452R_D614G)
agaauaaacuaguauucuucugguccccacagacucagagagaacccgccaccauguucguguuucuggugcugcugccccugguguccauccagugugugaaccugaccaccagaacacagcugccuccagccuacaccaacagcuucaccagaggcguguacuaccccgacaagguguucagauccagcgugcugcacucuacccaggaccuguuccugccuuucuucagcaacgugaccugguuccacgccauccacguguccggcaccaauggcaccaagagauucgacaaccccgugcugcccuucaacgacgggguguacuuugccagcaccgagaaguccaacaucaucagaggcuggaucuucggcaccacacuggacagcaagacccagagccugcugaucgugaacaacgccaccaacguggucaucaaagugugcgaguuccaguucugcaacgaccccuuccugggcgucuacuaccacaagaacaacaagagcugcauggaaagcgaguuccggguguacagcagcgccaacaacugcaccuucgaguacgugucccagccuuuccugauggaccuggaaggcaagcagggcaacuucaagaaccugcgcgaguucguguucaagaacaucgacggcuacuucaaaaucuacagcaagcacaccccuaucaaccucgugcgggaucugccucagggcuucucugcucuggaaccccugguggaucugcccaucggcaucaacaucacccgguuucagacacugcuggcccugcacagaagcuaccugacaccuggcgauagcagcagcggauggacagcuggugccgccgcuuacuaugugggcuaccugcagccuagaaccuuccugcugaaguacaacgagaacggcaccaucaccgacgccguggauugugcucuggauccucugagcgagacaaagugcacccugaaguccuucaccguggaaaagggcaucuaccagaccagcaacuuccgggugcagcccaccgaauccaucgugcgguuccccaauaucaccaaucugugccccuucggcgagguguucaaugccaccagauucgccucuguguacgccuggaaccggaagcggaucagcaauugcguggccgacuacuccgugcuguacaacuccgccagcuucagcaccuucaagugcuacggcguguccccuaccaagcugaacgaccugugcuucacaaacguguacgccgacagcuucgugauccggggagaugaagugcggcagauugccccuggacagacaggcaagaucgccgacuacaacuacaagcugcccgacgacuucaccggcugugugauugccuggaacagcaacaaccuggacuccaaagucggcggcaacuacaauuaccgcuaccggcuguuccggaaguccaaucugaagcccuucgagcgggacaucagcaccgaaaucuaucaggccggcagcaccccuugcaacggcguggaaggcuucaacugcuacuucccacugcaguccuacggcuuucagcccacaaauggcgugggcuaucagcccuacagagugguggugcugagcuucgaacugcugcaugcuccugccacagugugcggcccuaagaaaagcaccaaucucgugaagaacaaaugcgugaacuucaacuucaacggccugaccggcaccggcgugcugacagagagcaacaagaaguuccugccauuccagcaguuuggccgggauaucgccgauaccacagacgccguuagagauccccagacacuggaaauccuggacaucaccccaugcagcuucggcggagugucugugaucaccccuggcaccaacaccagcaaucagguggcagugcuguaccagggcgugaacuguaccgaagugcccguggccauucacgccgaucagcugacaccuacauggcggguguacuccaccggcagcaauguguuucagaccagagccggcugucugaucggagccgagcacgugaacaauagcuacgagugcgacauccccaucggcgcuggcaucugugccagcuaccagacacagacaaacagccccagacgggcuagaagcguggccagccagagcaucauugccuacacaaugucucugggcgccgagaacagcguggccuacuccaacaacucuaucgcuauccccaccaacuucaccaucagcgugaccaccgagauccugccuguguccaugaccaagaccagcguggacugcaccauguacaucugcggcgauuccaccgagugcuccaaccugcugcugcaguacggcagcuucugcacccagcugaauagagcccugacagggaucgccguggaacaggacaagaacacccaagagguguucgcccaagugaagcaaaucuacaagaccccuccuaucaaggacuucggcggcuucaauuucagccagauucugcccgauccuagcaagcccagcaagcggagcuucaucgaggaccugcuguucaacaaagugacacuggccgacgccggcuucaucaagcaguauggcgauugucugggcgacauugccgccagggaucugauuugcgcccagaaguuuaacggacugacagugcugccuccucugcugaccgaugagaugaucgcccaguacacaucugcccugcuggccggcacaaucacaagcggcuggacauuuggagcuggcgccgcucugcagauccccuuugcuaugcagauggccuaccgguucaacggcaucggagugacccagaaugugcuguacgagaaccagaagcugaucgccaaccaguucaacagcgccaucggcaagauccaggacagccugagcagcacagcaagcgcccugggaaagcugcaggacguggucaaccagaaugcccaggcacugaacacccuggucaagcagcuguccuccaacuucggcgccaucagcucugugcugaacgauauccugagcagacuggacccuccugaggccgaggugcagaucgacagacugaucacaggcagacugcagagccuccagacauacgugacccagcagcugaucagagccgccgagauuagagccucugccaaucuggccgccaccaagaugucugagugugugcugggccagagcaagagaguggacuuuugcggcaagggcuaccaccugaugagcuucccucagucugccccucacggcgugguguuucugcacgugacauaugugcccgcucaagagaagaauuucaccaccgcuccagccaucugccacgacggcaaagcccacuuuccuagagaaggcguguucguguccaacggcacccauugguucgugacacagcggaacuucuacgagccccagaucaucaccaccgacaacaccuucgugucuggcaacugcgacguugugaucggcauugugaacaauaccguguacgacccucugcagcccgagcuggacagcuucaaagaggaacuggacaaguacuuuaagaaccacacaagccccgacguggaccugggcgauaucagcggaaucaaugccagcgucgugaacauccagaaagagaucgaccggcugaacgagguggccaagaaucugaacgagagccugaucgaccugcaagaacuggggaaguacgagcaguacaucaaguggcccugguacaucuggcugggcuuuaucgccggacugauugccaucgugauggucacaaucaugcuguguugcaugaccagcugcuguagcugccugaagggcuguuguagcuguggcagcugcugcaaguucgacgaggacgauucugagcccgugcugaagggcgugaaacugcacuacaccugaugacucgagcugguacugcaugcacgcaaugcuagcugccccuuucccguccuggguaccccgagucucccccgaccucgggucccagguaugcucccaccuccaccugccccacucaccaccucugcuaguuccagacaccucccaagcacgcagcaaugcagcucaaaacgcuuagccuagccacacccccacgggaaacagcagugauuaaccuuuagcaauaaacgaaaguuuaacuaagcuauacuaaccccaggguuggucaauuucgugccagccacacccuggagcuagcaaaaaaaaaaaaaaaaaaaaaaaaaaaaaaaaaaaaaaaaaaaaaaaaaaaaaaaaaaaaaaaaaaaaaaaaaaaaaaaaaaaaaaaaaaaaaaaaaaaa

SEQ ID NO: 26467 - RNA, 4273 nt, Artificial Sequence
  SARS-CoV-2/Wuhan/WIV05/2019__EPI_ISL_402128 spike protein mRNA gc mod (1-1273)(K986P_V987P)
agaauaaacuaguauucuucugguccccacagacucagagagaacccgccaccauguucguguuccuggugcugcugccucugguguccagccagugugugaaccugaccaccagaacacagcugccuccagccuacaccaacagcuuuaccagaggcguguacuaccccgacaagguguucagauccagcgugcugcacucuacccaggaccuguuccugccuuucuucagcaacgugaccugguuccacgccauccacguguccggcaccaauggcaccaagagauucgacaaccccgugcugcccuucaacgacgggguguacuuugccagcaccgagaaguccaacaucaucagaggcuggaucuucggcaccacacuggacagcaagacccagagccugcugaucgugaacaacgccaccaacguggucaucaaagugugcgaguuccaguucugcaacgaccccuuccugggcgucuacuaccacaagaacaacaagagcuggauggaaagcgaguuccggguguacagcagcgccaacaacugcaccuucgaguacgugucccagccuuuccugauggaccuggaaggcaagcagggcaacuucaagaaccugcgcgaguucguguuuaagaacaucgacggcuacuucaagaucuacagcaagcacaccccuaucaaccucgugcgggaucugccucagggcuucucugcucuggaaccccugguggaucugcccaucggcaucaacaucacccgguuucagacacugcuggcccugcacagaagcuaccugacaccuggcgauagcagcagcggauggacagcuggugccgccgcuuacuaugugggcuaccugcagccuagaaccuuccugcugaaguacaacgagaacggcaccaucaccgacgccguggauugugcucuggauccucugagcgagacaaagugcacccugaaguccuucaccguggaaaagggcaucuaccagaccagcaacuuccgggugcagcccaccgaauccaucgugcgguuccccaauaucaccaaucugugccccuucggcgagguguucaaugccaccagauucgccucuguguacgccuggaaccggaagcggaucagcaauugcguggccgacuacuccgugcuguacaacuccgccagcuucagcaccuucaagugcuacggcguguccccuaccaagcugaacgaccugugcuucacaaacguguacgccgacagcuucgugauccggggagaugaagugcggcagauugccccuggacagacaggcaagaucgccgacuacaacuacaagcugcccgacgacuucaccggcugugugauugccuggaacagcaacaaccuggacuccaaagucggcggcaacuacaauuaccuguaccggcuguuccggaaguccaaucugaagcccuucgagcgggacaucuccaccgagaucuaucaggccggcagcaccccuuguaacggcguggaaggcuucaacugcuacuucccacugcaguccuacggcuuucagcccacaaauggcgugggcuaucagcccuacagagugguggugcugagcuucgaacugcugcaugccccugccacagugugcggcccuaagaaaagcaccaaucucgugaagaacaaaugcgugaacuucaacuucaacggccugaccggcaccggcgugcugacagagagcaacaagaaguuccugccauuccagcaguuuggccgggauaucgccgauaccacagacgccguuagagauccccagacacuggaaauccuggacaucaccccuugcagcuucggcggagugucugugaucaccccuggcaccaacaccagcaaucagguggcagugcuguaccaggacgugaacuguaccgaagugcccguggccauucacgccgaucagcugacaccuacauggcggguguacuccaccggcagcaauguguuucagaccagagccggcugucugaucggagccgagcacgugaacaauagcuacgagugcgacauccccaucggcgcuggaaucugcgccagcuaccagacacagacaaacagcccucggagagccagaagcguggccagccagagcaucauugccuacacaaugucucugggcgccgagaacagcguggccuacuccaacaacucuaucgcuauccccaccaacuucaccaucagcgugaccacagagauccugccuguguccaugaccaagaccagcguggacugcaccauguacaucugcggcgauuccaccgagugcuccaaccugcugcugcaguacggcagcuucugcacccagcugaauagagcccugacagggaucgccguggaacaggacaagaacacccaagagguguucgcccaagugaagcagaucuacaagaccccuccuaucaaggacuucggcggcuucaauuucagccagauucugcccgauccuagcaagcccagcaagcggagcuucaucgaggaccugcuguucaacaaagugacacuggccgacgccggcuucaucaagcaguauggcgauugucugggcgacauugccgccagggaucugauuugcgcccagaaguuuaacggacugacagugcugccuccucugcugaccgaugagaugaucgcccaguacacaucugcccugcuggccggcacaaucacaagcggcuggacauuuggagcaggcgccgcucugcagauccccuuugcuaugcagauggccuaccgguucaacggcaucggagugacccagaaugugcuguacgagaaccagaagcugaucgccaaccaguucaacagcgccaucggcaagauccaggacagccugagcagcacagcaagcgcccugggaaagcugcaggacguggucaaccagaaugcccaggcacugaacacccuggucaagcagcuguccuccaacuucggcgccaucagcucugugcugaacgauauccugagcagacuggacccuccugaggccgaggugcagaucgacagacugaucacaggcagacugcagagccuccagacauacgugacccagcagcugaucagagccgccgagauuagagccucugccaaucuggccgccaccaagaugucugagugugugcugggccagagcaagagaguggacuuuugcggcaagggcuaccaccugaugagcuucccucagucugccccucacggcgugguguuucugcacgugacauaugugcccgcucaagagaagaauuucaccaccgcuccagccaucugccacgacggcaaagcccacuuuccuagagaaggcguguucguguccaacggcacccauugguucgugacacagcggaacuucuacgagccccagaucaucaccaccgacaacaccuucgugucuggcaacugcgacgucgugaucggcauugugaacaauaccguguacgacccucugcagcccgagcuggacagcuucaaagaggaacuggacaaguacuuuaagaaccacacaagccccgacguggaccugggcgauaucagcggaaucaaugccagcgucgugaacauccagaaagagaucgaccggcugaacgagguggccaagaaucugaacgagagccugaucgaccugcaagaacuggggaaguacgagcaguacaucaaguggcccugguacaucuggcugggcuuuaucgccggacugauugccaucgugauggucacaaucaugcuguguugcaugaccagcugcuguagcugccugaagggcuguuguagcuguggcagcugcugcaaguucgacgaggacgauucugagcccgugcugaagggcgugaaacugcacuacacaugaugacucgagcugguacugcaugcacgcaaugcuagcugccccuuucccguccuggguaccccgagucucccccgaccucgggucccagguaugcucccaccuccaccugccccacucaccaccucugcuaguuccagacaccucccaagcacgcagcaaugcagcucaaaacgcuuagccuagccacacccccacgggaaacagcagugauuaaccuuuagcaauaaacgaaaguuuaacuaagcuauacuaaccccaggguuggucaauuucgugccagccacacccuggagcuagcaaaaaaaaaaaaaaaaaaaaaaaaaaaaaaaaaaaaaaaaaaaaaaaaaaaaaaaaaaaaaaaaaaaaaaaaaaaaaaaaaaaaaaaaaaaaaaaaaaaa

SEQ ID NO: 26468 - RNA, 4273 nt, Artificial Sequence
  SARS-CoV-2/Wuhan/WIV05/2019__EPI_ISL_402128 spike protein mRNA gc mod (1-1273)(K986P_V987P_ D614G)
agaauaaacuaguauucuucugguccccacagacucagagagaacccgccaccauguucguguuccuggugcugcugccucugguguccagccagugugugaaccugaccaccagaacacagcugccuccagccuacaccaacagcuuuaccagaggcguguacuaccccgacaagguguucagauccagcgugcugcacucuacccaggaccuguuccugccuuucuucagcaacgugaccugguuccacgccauccacguguccggcaccaauggcaccaagagauucgacaaccccgugcugcccuucaacgacgggguguacuuugccagcaccgagaaguccaacaucaucagaggcuggaucuucggcaccacacuggacagcaagacccagagccugcugaucgugaacaacgccaccaacguggucaucaaagugugcgaguuccaguucugcaacgaccccuuccugggcgucuacuaccacaagaacaacaagagcuggauggaaagcgaguuccggguguacagcagcgccaacaacugcaccuucgaguacgugucccagccuuuccugauggaccuggaaggcaagcagggcaacuucaagaaccugcgcgaguucguguuuaagaacaucgacggcuacuucaagaucuacagcaagcacaccccuaucaaccucgugcgggaucugccucagggcuucucugcucuggaaccccugguggaucugcccaucggcaucaacaucacccgguuucagacacugcuggcccugcacagaagcuaccugacaccuggcgauagcagcagcggauggacagcuggugccgccgcuuacuaugugggcuaccugcagccuagaaccuuccugcugaaguacaacgagaacggcaccaucaccgacgccguggauugugcucuggauccucugagcgagacaaagugcacccugaaguccuucaccguggaaaagggcaucuaccagaccagcaacuuccgggugcagcccaccgaauccaucgugcgguuccccaauaucaccaaucugugccccuucggcgagguguucaaugccaccagauucgccucuguguacgccuggaaccggaagcggaucagcaauugcguggccgacuacuccgugcuguacaacuccgccagcuucagcaccuucaagugcuacggcguguccccuaccaagcugaacgaccugugcuucacaaacguguacgccgacagcuucgugauccggggagaugaagugcggcagauugccccuggacagacaggcaagaucgccgacuacaacuacaagcugcccgacgacuucaccggcugugugauugccuggaacagcaacaaccuggacuccaaagucggcggcaacuacaauuaccuguaccggcuguuccggaaguccaaucugaagcccuucgagcgggacaucuccaccgagaucuaucaggccggcagcaccccuuguaacggcguggaaggcuucaacugcuacuucccacugcaguccuacggcuuucagcccacaaauggcgugggcuaucagcccuacagagugguggugcugagcuucgaacugcugcaugccccugccacagugugcggcccuaagaaaagcaccaaucucgugaagaacaaaugcgugaacuucaacuucaacggccugaccggcaccggcgugcugacagagagcaacaagaaguuccugccauuccagcaguuuggccgggauaucgccgauaccacagacgccguuagagauccccagacacuggaaauccuggacaucaccccuugcagcuucggcggagugucugugaucaccccuggcaccaacaccagcaaucagguggcagugcuguaccagggcgugaacuguaccgaagugcccguggccauucacgccgaucagcugacaccuacauggcggguguacuccaccggcagcaauguguuucagaccagagccggcugucugaucggagccgagcacgugaacaauagcuacgagugcgacauccccaucggcgcuggaaucugcgccagcuaccagacacagacaaacagcccucggagagccagaagcguggccagccagagcaucauugccuacacaaugucucugggcgccgagaacagcguggccuacuccaacaacucuaucgcuauccccaccaacuucaccaucagcgugaccacagagauccugccuguguccaugaccaagaccagcguggacugcaccauguacaucugcggcgauuccaccgagugcuccaaccugcugcugcaguacggcagcuucugcacccagcugaauagagcccugacagggaucgccguggaacaggacaagaacacccaagagguguucgcccaagugaagcagaucuacaagaccccuccuaucaaggacuucggcggcuucaauuucagccagauucugcccgauccuagcaagcccagcaagcggagcuucaucgaggaccugcuguucaacaaagugacacuggccgacgccggcuucaucaagcaguauggcgauugucugggcgacauugccgccagggaucugauuugcgcccagaaguuuaacggacugacagugcugccuccucugcugaccgaugagaugaucgcccaguacacaucugcccugcuggccggcacaaucacaagcggcuggacauuuggagcaggcgccgcucugcagauccccuuugcuaugcagauggccuaccgguucaacggcaucggagugacccagaaugugcuguacgagaaccagaagcugaucgccaaccaguucaacagcgccaucggcaagauccaggacagccugagcagcacagcaagcgcccugggaaagcugcaggacguggucaaccagaaugcccaggcacugaacacccuggucaagcagcuguccuccaacuucggcgccaucagcucugugcugaacgauauccugagcagacuggacccuccugaggccgaggugcagaucgacagacugaucacaggcagacugcagagccuccagacauacgugacccagcagcugaucagagccgccgagauuagagccucugccaaucuggccgccaccaagaugucugagugugugcugggccagagcaagagaguggacuuuugcggcaagggcuaccaccugaugagcuucccucagucugccccucacggcgugguguuucugcacgugacauaugugcccgcucaagagaagaauuucaccaccgcuccagccaucugccacgacggcaaagcccacuuuccuagagaaggcguguucguguccaacggcacccauugguucgugacacagcggaacuucuacgagccccagaucaucaccaccgacaacaccuucgugucuggcaacugcgacgucgugaucggcauugugaacaauaccguguacgacccucugcagcccgagcuggacagcuucaaagaggaacuggacaaguacuuuaagaaccacacaagccccgacguggaccugggcgauaucagcggaaucaaugccagcgucgugaacauccagaaagagaucgaccggcugaacgagguggccaagaaucugaacgagagccugaucgaccugcaagaacuggggaaguacgagcaguacaucaaguggcccugguacaucuggcugggcuuuaucgccggacugauugccaucgugauggucacaaucaugcuguguugcaugaccagcugcuguagcugccugaagggcuguuguagcuguggcagcugcugcaaguucgacgaggacgauucugagcccgugcugaagggcgugaaacugcacuacacaugaugacucgagcugguacugcaugcacgcaaugcuagcugccccuuucccguccuggguaccccgagucucccccgaccucgggucccagguaugcucccaccuccaccugccccacucaccaccucugcuaguuccagacaccucccaagcacgcagcaaugcagcucaaaacgcuuagccuagccacacccccacgggaaacagcagugauuaaccuuuagcaauaaacgaaaguuuaacuaagcuauacuaaccccaggguuggucaauuucgugccagccacacccuggagcuagcaaaaaaaaaaaaaaaaaaaaaaaaaaaaaaaaaaaaaaaaaaaaaaaaaaaaaaaaaaaaaaaaaaaaaaaaaaaaaaaaaaaaaaaaaaaaaaaaaaaa

SEQ ID NO: 26469 - RNA, 4273 nt, Artificial Sequence
  SARS-CoV-2/Wuhan/WIV05/2019__EPI_ISL_402128 spike protein mRNA gc mod (1-1273)(K986P_V987P_A222V_D614G)
agaauaaacuaguauucuucugguccccacagacucagagagaacccgccaccauguucguguuccuggugcugcugccucugguguccagccagugugugaaccugaccaccagaacacagcugccuccagccuacaccaacagcuuuaccagaggcguguacuaccccgacaagguguucagauccagcgugcugcacucuacccaggaccuguuccugccuuucuucagcaacgugaccugguuccacgccauccacguguccggcaccaauggcaccaagagauucgacaaccccgugcugcccuucaacgacgggguguacuuugccagcaccgagaaguccaacaucaucagaggcuggaucuucggcaccacacuggacagcaagacccagagccugcugaucgugaacaacgccaccaacguggucaucaaagugugcgaguuccaguucugcaacgaccccuuccugggcgucuacuaccacaagaacaacaagagcuggauggaaagcgaguuccggguguacagcagcgccaacaacugcaccuucgaguacgugucccagccuuuccugauggaccuggaaggcaagcagggcaacuucaagaaccugcgcgaguucguguuuaagaacaucgacggcuacuucaagaucuacagcaagcacaccccuaucaaccucgugcgggaucugccucagggcuucucugugcuggaaccccugguggaucugcccaucggcaucaacaucacccgguuucagacacugcuggcccugcacagaagcuaccugacaccuggcgauagcagcagcggauggacagcuggugccgccgcuuacuaugugggcuaccugcagccuagaaccuuccugcugaaguacaacgagaacggcaccaucaccgacgccguggauugugcucuggauccucugagcgagacaaagugcacccugaaguccuucaccguggaaaagggcaucuaccagaccagcaacuuccgggugcagcccaccgaauccaucgugcgguuccccaauaucaccaaucugugccccuucggcgagguguucaaugccaccagauucgccucuguguacgccuggaaccggaagcggaucagcaauugcguggccgacuacuccgugcuguacaacuccgccagcuucagcaccuucaagugcuacggcguguccccuaccaagcugaacgaccugugcuucacaaacguguacgccgacagcuucgugauccggggagaugaagugcggcagauugccccuggacagacaggcaagaucgccgacuacaacuacaagcugcccgacgacuucaccggcugugugauugccuggaacagcaacaaccuggacuccaaagucggcggcaacuacaauuaccuguaccggcuguuccggaaguccaaucugaagcccuucgagcgggacaucuccaccgagaucuaucaggccggcagcaccccuuguaacggcguggaaggcuucaacugcuacuucccacugcaguccuacggcuuucagcccacaaauggcgugggcuaucagcccuacagagugguggugcugagcuucgaacugcugcaugccccugccacagugugcggcccuaagaaaagcaccaaucucgugaagaacaaaugcgugaacuucaacuucaacggccugaccggcaccggcgugcugacagagagcaacaagaaguuccugccauuccagcaguuuggccgggauaucgccgauaccacagacgccguuagagauccccagacacuggaaauccuggacaucaccccuugcagcuucggcggagugucugugaucaccccuggcaccaacaccagcaaucagguggcagugcuguaccagggcgugaacuguaccgaagugcccguggccauucacgccgaucagcugacaccuacauggcggguguacuccaccggcagcaauguguuucagaccagagccggcugucugaucggagccgagcacgugaacaauagcuacgagugcgacauccccaucggcgcuggaaucugcgccagcuaccagacacagacaaacagcccucggagagccagaagcguggccagccagagcaucauugccuacacaaugucucugggcgccgagaacagcguggccuacuccaacaacucuaucgcuauccccaccaacuucaccaucagcgugaccacagagauccugccuguguccaugaccaagaccagcguggacugcaccauguacaucugcggcgauuccaccgagugcuccaaccugcugcugcaguacggcagcuucugcacccagcugaauagagcccugacagggaucgccguggaacaggacaagaacacccaagagguguucgcccaagugaagcagaucuacaagaccccuccuaucaaggacuucggcggcuucaauuucagccagauucugcccgauccuagcaagcccagcaagcggagcuucaucgaggaccugcuguucaacaaagugacacuggccgacgccggcuucaucaagcaguauggcgauugucugggcgacauugccgccagggaucugauuugcgcccagaaguuuaacggacugacagugcugccuccucugcugaccgaugagaugaucgcccaguacacaucugcccugcuggccggcacaaucacaagcggcuggacauuuggagcaggcgccgcucugcagauccccuuugcuaugcagauggccuaccgguucaacggcaucggagugacccagaaugugcuguacgagaaccagaagcugaucgccaaccaguucaacagcgccaucggcaagauccaggacagccugagcagcacagcaagcgcccugggaaagcugcaggacguggucaaccagaaugcccaggcacugaacacccuggucaagcagcuguccuccaacuucggcgccaucagcucugugcugaacgauauccugagcagacuggacccuccugaggccgaggugcagaucgacagacugaucacaggcagacugcagagccuccagacauacgugacccagcagcugaucagagccgccgagauuagagccucugccaaucuggccgccaccaagaugucugagugugugcugggccagagcaagagaguggacuuuugcggcaagggcuaccaccugaugagcuucccucagucugccccucacggcgugguguuucugcacgugacauaugugcccgcucaagagaagaauuucaccaccgcuccagccaucugccacgacggcaaagcccacuuuccuagagaaggcguguucguguccaacggcacccauugguucgugacacagcggaacuucuacgagccccagaucaucaccaccgacaacaccuucgugucuggcaacugcgacgucgugaucggcauugugaacaauaccguguacgacccucugcagcccgagcuggacagcuucaaagaggaacuggacaaguacuuuaagaaccacacaagccccgacguggaccugggcgauaucagcggaaucaaugccagcgucgugaacauccagaaagagaucgaccggcugaacgagguggccaagaaucugaacgagagccugaucgaccugcaagaacuggggaaguacgagcaguacaucaaguggcccugguacaucuggcugggcuuuaucgccggacugauugccaucgugauggucacaaucaugcuguguugcaugaccagcugcuguagcugccugaagggcuguuguagcuguggcagcugcugcaaguucgacgaggacgauucugagcccgugcugaagggcgugaaacugcacuacacaugaugacucgagcugguacugcaugcacgcaaugcuagcugccccuuucccguccuggguaccccgagucucccccgaccucgggucccagguaugcucccaccuccaccugccccacucaccaccucugcuaguuccagacaccucccaagcacgcagcaaugcagcucaaaacgcuuagccuagccacacccccacgggaaacagcagugauuaaccuuuagcaauaaacgaaaguuuaacuaagcuauacuaaccccaggguuggucaauuucgugccagccacacccuggagcuagcaaaaaaaaaaaaaaaaaaaaaaaaaaaaaaaaaaaaaaaaaaaaaaaaaaaaaaaaaaaaaaaaaaaaaaaaaaaaaaaaaaaaaaaaaaaaaaaaaaaa

SEQ ID NO: 26470 - RNA, 4273 nt, Artificial Sequence
  SARS-CoV-2/Wuhan/WIV05/2019__EPI_ISL_402128 spike protein mRNA gc mod (1-1273)(K986P_V987P_N439K_D614G)
agaauaaacuaguauucuucugguccccacagacucagagagaacccgccaccauguucguguuccuggugcugcugccucugguguccagccagugugugaaccugaccaccagaacacagcugccuccagccuacaccaacagcuuuaccagaggcguguacuaccccgacaagguguucagauccagcgugcugcacucuacccaggaccuguuccugccuuucuucagcaacgugaccugguuccacgccauccacguguccggcaccaauggcaccaagagauucgacaaccccgugcugcccuucaacgacgggguguacuuugccagcaccgagaaguccaacaucaucagaggcuggaucuucggcaccacacuggacagcaagacccagagccugcugaucgugaacaacgccaccaacguggucaucaaagugugcgaguuccaguucugcaacgaccccuuccugggcgucuacuaccacaagaacaacaagagcuggauggaaagcgaguuccggguguacagcagcgccaacaacugcaccuucgaguacgugucccagccuuuccugauggaccuggaaggcaagcagggcaacuucaagaaccugcgcgaguucguguuuaagaacaucgacggcuacuucaagaucuacagcaagcacaccccuaucaaccucgugcgggaucugccucagggcuucucugcucuggaaccccugguggaucugcccaucggcaucaacaucacccgguuucagacacugcuggcccugcacagaagcuaccugacaccuggcgauagcagcagcggauggacagcuggugccgccgcuuacuaugugggcuaccugcagccuagaaccuuccugcugaaguacaacgagaacggcaccaucaccgacgccguggauugugcucuggauccucugagcgagacaaagugcacccugaaguccuucaccguggaaaagggcaucuaccagaccagcaacuuccgggugcagcccaccgaauccaucgugcgguuccccaauaucaccaaucugugccccuucggcgagguguucaaugccaccagauucgccucuguguacgccuggaaccggaagcggaucagcaauugcguggccgacuacuccgugcuguacaacuccgccagcuucagcaccuucaagugcuacggcguguccccuaccaagcugaacgaccugugcuucacaaacguguacgccgacagcuucgugauccggggagaugaagugcggcagauugccccuggacagacaggcaagaucgccgacuacaacuacaagcugcccgacgacuucaccggcugugugauugccuggaacagcaagaaccuggacuccaaagucggcggcaacuacaauuaccuguaccggcuguuccggaaguccaaucugaagcccuucgagcgggacaucuccaccgagaucuaucaggccggcagcaccccuuguaacggcguggaaggcuucaacugcuacuucccacugcaguccuacggcuuucagcccacaaauggcgugggcuaucagcccuacagagugguggugcugagcuucgaacugcugcaugccccugccacagugugcggcccuaagaaaagcaccaaucucgugaagaacaaaugcgugaacuucaacuucaacggccugaccggcaccggcgugcugacagagagcaacaagaaguuccugccauuccagcaguuuggccgggauaucgccgauaccacagacgccguuagagauccccagacacuggaaauccuggacaucaccccuugcagcuucggcggagugucugugaucaccccuggcaccaacaccagcaaucagguggcagugcuguaccagggcgugaacuguaccgaagugcccguggccauucacgccgaucagcugacaccuacauggcggguguacuccaccggcagcaauguguuucagaccagagccggcugucugaucggagccgagcacgugaacaauagcuacgagugcgacauccccaucggcgcuggaaucugcgccagcuaccagacacagacaaacagcccucggagagccagaagcguggccagccagagcaucauugccuacacaaugucucugggcgccgagaacagcguggccuacuccaacaacucuaucgcuauccccaccaacuucaccaucagcgugaccacagagauccugccuguguccaugaccaagaccagcguggacugcaccauguacaucugcggcgauuccaccgagugcuccaaccugcugcugcaguacggcagcuucugcacccagcugaauagagcccugacagggaucgccguggaacaggacaagaacacccaagagguguucgcccaagugaagcagaucuacaagaccccuccuaucaaggacuucggcggcuucaauuucagccagauucugcccgauccuagcaagcccagcaagcggagcuucaucgaggaccugcuguucaacaaagugacacuggccgacgccggcuucaucaagcaguauggcgauugucugggcgacauugccgccagggaucugauuugcgcccagaaguuuaacggacugacagugcugccuccucugcugaccgaugagaugaucgcccaguacacaucugcccugcuggccggcacaaucacaagcggcuggacauuuggagcaggcgccgcucugcagauccccuuugcuaugcagauggccuaccgguucaacggcaucggagugacccagaaugugcuguacgagaaccagaagcugaucgccaaccaguucaacagcgccaucggcaagauccaggacagccugagcagcacagcaagcgcccugggaaagcugcaggacguggucaaccagaaugcccaggcacugaacacccuggucaagcagcuguccuccaacuucggcgccaucagcucugugcugaacgauauccugagcagacuggacccuccugaggccgaggugcagaucgacagacugaucacaggcagacugcagagccuccagacauacgugacccagcagcugaucagagccgccgagauuagagccucugccaaucuggccgccaccaagaugucugagugugugcugggccagagcaagagaguggacuuuugcggcaagggcuaccaccugaugagcuucccucagucugccccucacggcgugguguuucugcacgugacauaugugcccgcucaagagaagaauuucaccaccgcuccagccaucugccacgacggcaaagcccacuuuccuagagaaggcguguucguguccaacggcacccauugguucgugacacagcggaacuucuacgagccccagaucaucaccaccgacaacaccuucgugucuggcaacugcgacgucgugaucggcauugugaacaauaccguguacgacccucugcagcccgagcuggacagcuucaaagaggaacuggacaaguacuuuaagaaccacacaagccccgacguggaccugggcgauaucagcggaaucaaugccagcgucgugaacauccagaaagagaucgaccggcugaacgagguggccaagaaucugaacgagagccugaucgaccugcaagaacuggggaaguacgagcaguacaucaaguggcccugguacaucuggcugggcuuuaucgccggacugauugccaucgugauggucacaaucaugcuguguugcaugaccagcugcuguagcugccugaagggcuguuguagcuguggcagcugcugcaaguucgacgaggacgauucugagcccgugcugaagggcgugaaacugcacuacacaugaugacucgagcugguacugcaugcacgcaaugcuagcugccccuuucccguccuggguaccccgagucucccccgaccucgggucccagguaugcucccaccuccaccugccccacucaccaccucugcuaguuccagacaccucccaagcacgcagcaaugcagcucaaaacgcuuagccuagccacacccccacgggaaacagcagugauuaaccuuuagcaauaaacgaaaguuuaacuaagcuauacuaaccccaggguuggucaauuucgugccagccacacccuggagcuagcaaaaaaaaaaaaaaaaaaaaaaaaaaaaaaaaaaaaaaaaaaaaaaaaaaaaaaaaaaaaaaaaaaaaaaaaaaaaaaaaaaaaaaaaaaaaaaaaaaaa

SEQ ID NO: 26471 - RNA, 4273 nt, Artificial Sequence
  SARS-CoV-2/Wuhan/WIV05/2019__EPI_ISL_402128 spike protein mRNA gc mod (1-1273)(K986P_V987P_S477N_D614G)
agaauaaacuaguauucuucugguccccacagacucagagagaacccgccaccauguucguguuccuggugcugcugccucugguguccagccagugugugaaccugaccaccagaacacagcugccuccagccuacaccaacagcuuuaccagaggcguguacuaccccgacaagguguucagauccagcgugcugcacucuacccaggaccuguuccugccuuucuucagcaacgugaccugguuccacgccauccacguguccggcaccaauggcaccaagagauucgacaaccccgugcugcccuucaacgacgggguguacuuugccagcaccgagaaguccaacaucaucagaggcuggaucuucggcaccacacuggacagcaagacccagagccugcugaucgugaacaacgccaccaacguggucaucaaagugugcgaguuccaguucugcaacgaccccuuccugggcgucuacuaccacaagaacaacaagagcuggauggaaagcgaguuccggguguacagcagcgccaacaacugcaccuucgaguacgugucccagccuuuccugauggaccuggaaggcaagcagggcaacuucaagaaccugcgcgaguucguguuuaagaacaucgacggcuacuucaagaucuacagcaagcacaccccuaucaaccucgugcgggaucugccucagggcuucucugcucuggaaccccugguggaucugcccaucggcaucaacaucacccgguuucagacacugcuggcccugcacagaagcuaccugacaccuggcgauagcagcagcggauggacagcuggugccgccgcuuacuaugugggcuaccugcagccuagaaccuuccugcugaaguacaacgagaacggcaccaucaccgacgccguggauugugcucuggauccucugagcgagacaaagugcacccugaaguccuucaccguggaaaagggcaucuaccagaccagcaacuuccgggugcagcccaccgaauccaucgugcgguuccccaauaucaccaaucugugccccuucggcgagguguucaaugccaccagauucgccucuguguacgccuggaaccggaagcggaucagcaauugcguggccgacuacuccgugcuguacaacuccgccagcuucagcaccuucaagugcuacggcguguccccuaccaagcugaacgaccugugcuucacaaacguguacgccgacagcuucgugauccggggagaugaagugcggcagauugccccuggacagacaggcaagaucgccgacuacaacuacaagcugcccgacgacuucaccggcugugugauugccuggaacagcaacaaccuggacuccaaagucggcggcaacuacaauuaccuguaccggcuguuccggaaguccaaucugaagcccuucgagcgggacaucuccaccgagaucuaucaggccggcaacaccccuuguaacggcguggaaggcuucaacugcuacuucccacugcaguccuacggcuuucagcccacaaauggcgugggcuaucagcccuacagagugguggugcugagcuucgaacugcugcaugccccugccacagugugcggcccuaagaaaagcaccaaucucgugaagaacaaaugcgugaacuucaacuucaacggccugaccggcaccggcgugcugacagagagcaacaagaaguuccugccauuccagcaguuuggccgggauaucgccgauaccacagacgccguuagagauccccagacacuggaaauccuggacaucaccccuugcagcuucggcggagugucugugaucaccccuggcaccaacaccagcaaucagguggcagugcuguaccagggcgugaacuguaccgaagugcccguggccauucacgccgaucagcugacaccuacauggcggguguacuccaccggcagcaauguguuucagaccagagccggcugucugaucggagccgagcacgugaacaauagcuacgagugcgacauccccaucggcgcuggaaucugcgccagcuaccagacacagacaaacagcccucggagagccagaagcguggccagccagagcaucauugccuacacaaugucucugggcgccgagaacagcguggccuacuccaacaacucuaucgcuauccccaccaacuucaccaucagcgugaccacagagauccugccuguguccaugaccaagaccagcguggacugcaccauguacaucugcggcgauuccaccgagugcuccaaccugcugcugcaguacggcagcuucugcacccagcugaauagagcccugacagggaucgccguggaacaggacaagaacacccaagagguguucgcccaagugaagcagaucuacaagaccccuccuaucaaggacuucggcggcuucaauuucagccagauucugcccgauccuagcaagcccagcaagcggagcuucaucgaggaccugcuguucaacaaagugacacuggccgacgccggcuucaucaagcaguauggcgauugucugggcgacauugccgccagggaucugauuugcgcccagaaguuuaacggacugacagugcugccuccucugcugaccgaugagaugaucgcccaguacacaucugcccugcuggccggcacaaucacaagcggcuggacauuuggagcaggcgccgcucugcagauccccuuugcuaugcagauggccuaccgguucaacggcaucggagugacccagaaugugcuguacgagaaccagaagcugaucgccaaccaguucaacagcgccaucggcaagauccaggacagccugagcagcacagcaagcgcccugggaaagcugcaggacguggucaaccagaaugcccaggcacugaacacccuggucaagcagcuguccuccaacuucggcgccaucagcucugugcugaacgauauccugagcagacuggacccuccugaggccgaggugcagaucgacagacugaucacaggcagacugcagagccuccagacauacgugacccagcagcugaucagagccgccgagauuagagccucugccaaucuggccgccaccaagaugucugagugugugcugggccagagcaagagaguggacuuuugcggcaagggcuaccaccugaugagcuucccucagucugccccucacggcgugguguuucugcacgugacauaugugcccgcucaagagaagaauuucaccaccgcuccagccaucugccacgacggcaaagcccacuuuccuagagaaggcguguucguguccaacggcacccauugguucgugacacagcggaacuucuacgagccccagaucaucaccaccgacaacaccuucgugucuggcaacugcgacgucgugaucggcauugugaacaauaccguguacgacccucugcagcccgagcuggacagcuucaaagaggaacuggacaaguacuuuaagaaccacacaagccccgacguggaccugggcgauaucagcggaaucaaugccagcgucgugaacauccagaaagagaucgaccggcugaacgagguggccaagaaucugaacgagagccugaucgaccugcaagaacuggggaaguacgagcaguacaucaaguggcccugguacaucuggcugggcuuuaucgccggacugauugccaucgugauggucacaaucaugcuguguugcaugaccagcugcuguagcugccugaagggcuguuguagcuguggcagcugcugcaaguucgacgaggacgauucugagcccgugcugaagggcgugaaacugcacuacacaugaugacucgagcugguacugcaugcacgcaaugcuagcugccccuuucccguccuggguaccccgagucucccccgaccucgggucccagguaugcucccaccuccaccugccccacucaccaccucugcuaguuccagacaccucccaagcacgcagcaaugcagcucaaaacgcuuagccuagccacacccccacgggaaacagcagugauuaaccuuuagcaauaaacgaaaguuuaacuaagcuauacuaaccccaggguuggucaauuucgugccagccacacccuggagcuagcaaaaaaaaaaaaaaaaaaaaaaaaaaaaaaaaaaaaaaaaaaaaaaaaaaaaaaaaaaaaaaaaaaaaaaaaaaaaaaaaaaaaaaaaaaaaaaaaaaaa

SEQ ID NO: 26472 - RNA, 4273 nt, Artificial Sequence
  SARS-CoV-2/Wuhan/WIV05/2019__EPI_ISL_402128 spike protein mRNA gc mod (1-1273)(K986P_V987P_N501Y_D614G)
agaauaaacuaguauucuucugguccccacagacucagagagaacccgccaccauguucguguuccuggugcugcugccucugguguccagccagugugugaaccugaccaccagaacacagcugccuccagccuacaccaacagcuuuaccagaggcguguacuaccccgacaagguguucagauccagcgugcugcacucuacccaggaccuguuccugccuuucuucagcaacgugaccugguuccacgccauccacguguccggcaccaauggcaccaagagauucgacaaccccgugcugcccuucaacgacgggguguacuuugccagcaccgagaaguccaacaucaucagaggcuggaucuucggcaccacacuggacagcaagacccagagccugcugaucgugaacaacgccaccaacguggucaucaaagugugcgaguuccaguucugcaacgaccccuuccugggcgucuacuaccacaagaacaacaagagcuggauggaaagcgaguuccggguguacagcagcgccaacaacugcaccuucgaguacgugucccagccuuuccugauggaccuggaaggcaagcagggcaacuucaagaaccugcgcgaguucguguuuaagaacaucgacggcuacuucaagaucuacagcaagcacaccccuaucaaccucgugcgggaucugccucagggcuucucugcucuggaaccccugguggaucugcccaucggcaucaacaucacccgguuucagacacugcuggcccugcacagaagcuaccugacaccuggcgauagcagcagcggauggacagcuggugccgccgcuuacuaugugggcuaccugcagccuagaaccuuccugcugaaguacaacgagaacggcaccaucaccgacgccguggauugugcucuggauccucugagcgagacaaagugcacccugaaguccuucaccguggaaaagggcaucuaccagaccagcaacuuccgggugcagcccaccgaauccaucgugcgguuccccaauaucaccaaucugugccccuucggcgagguguucaaugccaccagauucgccucuguguacgccuggaaccggaagcggaucagcaauugcguggccgacuacuccgugcuguacaacuccgccagcuucagcaccuucaagugcuacggcguguccccuaccaagcugaacgaccugugcuucacaaacguguacgccgacagcuucgugauccggggagaugaagugcggcagauugccccuggacagacaggcaagaucgccgacuacaacuacaagcugcccgacgacuucaccggcugugugauugccuggaacagcaacaaccuggacuccaaagucggcggcaacuacaauuaccuguaccggcuguuccggaaguccaaucugaagcccuucgagcgggacaucuccaccgagaucuaucaggccggcagcaccccuuguaacggcguggaaggcuucaacugcuacuucccacugcaguccuacggcuuucagcccacauacggcgugggcuaucagcccuacagagugguggugcugagcuucgaacugcugcaugccccugccacagugugcggcccuaagaaaagcaccaaucucgugaagaacaaaugcgugaacuucaacuucaacggccugaccggcaccggcgugcugacagagagcaacaagaaguuccugccauuccagcaguuuggccgggauaucgccgauaccacagacgccguuagagauccccagacacuggaaauccuggacaucaccccuugcagcuucggcggagugucugugaucaccccuggcaccaacaccagcaaucagguggcagugcuguaccagggcgugaacuguaccgaagugcccguggccauucacgccgaucagcugacaccuacauggcggguguacuccaccggcagcaauguguuucagaccagagccggcugucugaucggagccgagcacgugaacaauagcuacgagugcgacauccccaucggcgcuggaaucugcgccagcuaccagacacagacaaacagcccucggagagccagaagcguggccagccagagcaucauugccuacacaaugucucugggcgccgagaacagcguggccuacuccaacaacucuaucgcuauccccaccaacuucaccaucagcgugaccacagagauccugccuguguccaugaccaagaccagcguggacugcaccauguacaucugcggcgauuccaccgagugcuccaaccugcugcugcaguacggcagcuucugcacccagcugaauagagcccugacagggaucgccguggaacaggacaagaacacccaagagguguucgcccaagugaagcagaucuacaagaccccuccuaucaaggacuucggcggcuucaauuucagccagauucugcccgauccuagcaagcccagcaagcggagcuucaucgaggaccugcuguucaacaaagugacacuggccgacgccggcuucaucaagcaguauggcgauugucugggcgacauugccgccagggaucugauuugcgcccagaaguuuaacggacugacagugcugccuccucugcugaccgaugagaugaucgcccaguacacaucugcccugcuggccggcacaaucacaagcggcuggacauuuggagcaggcgccgcucugcagauccccuuugcuaugcagauggccuaccgguucaacggcaucggagugacccagaaugugcuguacgagaaccagaagcugaucgccaaccaguucaacagcgccaucggcaagauccaggacagccugagcagcacagcaagcgcccugggaaagcugcaggacguggucaaccagaaugcccaggcacugaacacccuggucaagcagcuguccuccaacuucggcgccaucagcucugugcugaacgauauccugagcagacuggacccuccugaggccgaggugcagaucgacagacugaucacaggcagacugcagagccuccagacauacgugacccagcagcugaucagagccgccgagauuagagccucugccaaucuggccgccaccaagaugucugagugugugcugggccagagcaagagaguggacuuuugcggcaagggcuaccaccugaugagcuucccucagucugccccucacggcgugguguuucugcacgugacauaugugcccgcucaagagaagaauuucaccaccgcuccagccaucugccacgacggcaaagcccacuuuccuagagaaggcguguucguguccaacggcacccauugguucgugacacagcggaacuucuacgagccccagaucaucaccaccgacaacaccuucgugucuggcaacugcgacgucgugaucggcauugugaacaauaccguguacgacccucugcagcccgagcuggacagcuucaaagaggaacuggacaaguacuuuaagaaccacacaagccccgacguggaccugggcgauaucagcggaaucaaugccagcgucgugaacauccagaaagagaucgaccggcugaacgagguggccaagaaucugaacgagagccugaucgaccugcaagaacuggggaaguacgagcaguacaucaaguggcccugguacaucuggcugggcuuuaucgccggacugauugccaucgugauggucacaaucaugcuguguugcaugaccagcugcuguagcugccugaagggcuguuguagcuguggcagcugcugcaaguucgacgaggacgauucugagcccgugcugaagggcgugaaacugcacuacacaugaugacucgagcugguacugcaugcacgcaaugcuagcugccccuuucccguccuggguaccccgagucucccccgaccucgggucccagguaugcucccaccuccaccugccccacucaccaccucugcuaguuccagacaccucccaagcacgcagcaaugcagcucaaaacgcuuagccuagccacacccccacgggaaacagcagugauuaaccuuuagcaauaaacgaaaguuuaacuaagcuauacuaaccccaggguuggucaauuucgugccagccacacccuggagcuagcaaaaaaaaaaaaaaaaaaaaaaaaaaaaaaaaaaaaaaaaaaaaaaaaaaaaaaaaaaaaaaaaaaaaaaaaaaaaaaaaaaaaaaaaaaaaaaaaaaaa

SEQ ID NO: 26473 - RNA, 4267 nt, Artificial Sequence
  SARS-CoV-2/Wuhan/WIV05/2019__EPI_ISL_402128 spike protein mRNA gc mod (1-1273)(K986P_V987P_H69del_V70del_D614G)
agaauaaacuaguauucuucugguccccacagacucagagagaacccgccaccauguucguguuccuggugcugcugccucugguguccagccagugugugaaccugaccaccagaacacagcugccuccagccuacaccaacagcuuuaccagaggcguguacuaccccgacaagguguucagauccagcgugcugcacucuacccaggaccuguuccugccuuucuucagcaacgugaccugguuccacgccaucuccggcaccaauggcaccaagagauucgacaaccccgugcugcccuucaacgacgggguguacuuugccagcaccgagaaguccaacaucaucagaggcuggaucuucggcaccacacuggacagcaagacccagagccugcugaucgugaacaacgccaccaacguggucaucaaagugugcgaguuccaguucugcaacgaccccuuccugggcgucuacuaccacaagaacaacaagagcuggauggaaagcgaguuccggguguacagcagcgccaacaacugcaccuucgaguacgugucccagccuuuccugauggaccuggaaggcaagcagggcaacuucaagaaccugcgcgaguucguguuuaagaacaucgacggcuacuucaagaucuacagcaagcacaccccuaucaaccucgugcgggaucugccucagggcuucucugcucuggaaccccugguggaucugcccaucggcaucaacaucacccgguuucagacacugcuggcccugcacagaagcuaccugacaccuggcgauagcagcagcggauggacagcuggugccgccgcuuacuaugugggcuaccugcagccuagaaccuuccugcugaaguacaacgagaacggcaccaucaccgacgccguggauugugcucuggauccucugagcgagacaaagugcacccugaaguccuucaccguggaaaagggcaucuaccagaccagcaacuuccgggugcagcccaccgaauccaucgugcgguuccccaauaucaccaaucugugccccuucggcgagguguucaaugccaccagauucgccucuguguacgccuggaaccggaagcggaucagcaauugcguggccgacuacuccgugcuguacaacuccgccagcuucagcaccuucaagugcuacggcguguccccuaccaagcugaacgaccugugcuucacaaacguguacgccgacagcuucgugauccggggagaugaagugcggcagauugccccuggacagacaggcaagaucgccgacuacaacuacaagcugcccgacgacuucaccggcugugugauugccuggaacagcaacaaccuggacuccaaagucggcggcaacuacaauuaccuguaccggcuguuccggaaguccaaucugaagcccuucgagcgggacaucuccaccgagaucuaucaggccggcagcaccccuuguaacggcguggaaggcuucaacugcuacuucccacugcaguccuacggcuuucagcccacaaauggcgugggcuaucagcccuacagagugguggugcugagcuucgaacugcugcaugccccugccacagugugcggcccuaagaaaagcaccaaucucgugaagaacaaaugcgugaacuucaacuucaacggccugaccggcaccggcgugcugacagagagcaacaagaaguuccugccauuccagcaguuuggccgggauaucgccgauaccacagacgccguuagagauccccagacacuggaaauccuggacaucaccccuugcagcuucggcggagugucugugaucaccccuggcaccaacaccagcaaucagguggcagugcuguaccagggcgugaacuguaccgaagugcccguggccauucacgccgaucagcugacaccuacauggcggguguacuccaccggcagcaauguguuucagaccagagccggcugucugaucggagccgagcacgugaacaauagcuacgagugcgacauccccaucggcgcuggaaucugcgccagcuaccagacacagacaaacagcccucggagagccagaagcguggccagccagagcaucauugccuacacaaugucucugggcgccgagaacagcguggccuacuccaacaacucuaucgcuauccccaccaacuucaccaucagcgugaccacagagauccugccuguguccaugaccaagaccagcguggacugcaccauguacaucugcggcgauuccaccgagugcuccaaccugcugcugcaguacggcagcuucugcacccagcugaauagagcccugacagggaucgccguggaacaggacaagaacacccaagagguguucgcccaagugaagcagaucuacaagaccccuccuaucaaggacuucggcggcuucaauuucagccagauucugcccgauccuagcaagcccagcaagcggagcuucaucgaggaccugcuguucaacaaagugacacuggccgacgccggcuucaucaagcaguauggcgauugucugggcgacauugccgccagggaucugauuugcgcccagaaguuuaacggacugacagugcugccuccucugcugaccgaugagaugaucgcccaguacacaucugcccugcuggccggcacaaucacaagcggcuggacauuuggagcaggcgccgcucugcagauccccuuugcuaugcagauggccuaccgguucaacggcaucggagugacccagaaugugcuguacgagaaccagaagcugaucgccaaccaguucaacagcgccaucggcaagauccaggacagccugagcagcacagcaagcgcccugggaaagcugcaggacguggucaaccagaaugcccaggcacugaacacccuggucaagcagcuguccuccaacuucggcgccaucagcucugugcugaacgauauccugagcagacuggacccuccugaggccgaggugcagaucgacagacugaucacaggcagacugcagagccuccagacauacgugacccagcagcugaucagagccgccgagauuagagccucugccaaucuggccgccaccaagaugucugagugugugcugggccagagcaagagaguggacuuuugcggcaagggcuaccaccugaugagcuucccucagucugccccucacggcgugguguuucugcacgugacauaugugcccgcucaagagaagaauuucaccaccgcuccagccaucugccacgacggcaaagcccacuuuccuagagaaggcguguucguguccaacggcacccauugguucgugacacagcggaacuucuacgagccccagaucaucaccaccgacaacaccuucgugucuggcaacugcgacgucgugaucggcauugugaacaauaccguguacgacccucugcagcccgagcuggacagcuucaaagaggaacuggacaaguacuuuaagaaccacacaagccccgacguggaccugggcgauaucagcggaaucaaugccagcgucgugaacauccagaaagagaucgaccggcugaacgagguggccaagaaucugaacgagagccugaucgaccugcaagaacuggggaaguacgagcaguacaucaaguggcccugguacaucuggcugggcuuuaucgccggacugauugccaucgugauggucacaaucaugcuguguugcaugaccagcugcuguagcugccugaagggcuguuguagcuguggcagcugcugcaaguucgacgaggacgauucugagcccgugcugaagggcgugaaacugcacuacacaugaugacucgagcugguacugcaugcacgcaaugcuagcugccccuuucccguccuggguaccccgagucucccccgaccucgggucccagguaugcucccaccuccaccugccccacucaccaccucugcuaguuccagacaccucccaagcacgcagcaaugcagcucaaaacgcuuagccuagccacacccccacgggaaacagcagugauuaaccuuuagcaauaaacgaaaguuuaacuaagcuauacuaaccccaggguuggucaauuucgugccagccacacccuggagcuagcaaaaaaaaaaaaaaaaaaaaaaaaaaaaaaaaaaaaaaaaaaaaaaaaaaaaaaaaaaaaaaaaaaaaaaaaaaaaaaaaaaaaaaaaaaaaaaaaaaaa

SEQ ID NO: 26474 - RNA, 4273 nt, Artificial Sequence
  SARS-CoV-2/Wuhan/WIV05/2019__EPI_ISL_402128 spike protein mRNA gc mod (1-1273)(K986P_V987P_Y453F_D614G)
agaauaaacuaguauucuucugguccccacagacucagagagaacccgccaccauguucguguuccuggugcugcugccucugguguccagccagugugugaaccugaccaccagaacacagcugccuccagccuacaccaacagcuuuaccagaggcguguacuaccccgacaagguguucagauccagcgugcugcacucuacccaggaccuguuccugccuuucuucagcaacgugaccugguuccacgccauccacguguccggcaccaauggcaccaagagauucgacaaccccgugcugcccuucaacgacgggguguacuuugccagcaccgagaaguccaacaucaucagaggcuggaucuucggcaccacacuggacagcaagacccagagccugcugaucgugaacaacgccaccaacguggucaucaaagugugcgaguuccaguucugcaacgaccccuuccugggcgucuacuaccacaagaacaacaagagcuggauggaaagcgaguuccggguguacagcagcgccaacaacugcaccuucgaguacgugucccagccuuuccugauggaccuggaaggcaagcagggcaacuucaagaaccugcgcgaguucguguuuaagaacaucgacggcuacuucaagaucuacagcaagcacaccccuaucaaccucgugcgggaucugccucagggcuucucugcucuggaaccccugguggaucugcccaucggcaucaacaucacccgguuucagacacugcuggcccugcacagaagcuaccugacaccuggcgauagcagcagcggauggacagcuggugccgccgcuuacuaugugggcuaccugcagccuagaaccuuccugcugaaguacaacgagaacggcaccaucaccgacgccguggauugugcucuggauccucugagcgagacaaagugcacccugaaguccuucaccguggaaaagggcaucuaccagaccagcaacuuccgggugcagcccaccgaauccaucgugcgguuccccaauaucaccaaucugugccccuucggcgagguguucaaugccaccagauucgccucuguguacgccuggaaccggaagcggaucagcaauugcguggccgacuacuccgugcuguacaacuccgccagcuucagcaccuucaagugcuacggcguguccccuaccaagcugaacgaccugugcuucacaaacguguacgccgacagcuucgugauccggggagaugaagugcggcagauugccccuggacagacaggcaagaucgccgacuacaacuacaagcugcccgacgacuucaccggcugugugauugccuggaacagcaacaaccuggacuccaaagucggcggcaacuacaauuaccuguuccggcuguuccggaaguccaaucugaagcccuucgagcgggacaucuccaccgagaucuaucaggccggcagcaccccuuguaacggcguggaaggcuucaacugcuacuucccacugcaguccuacggcuuucagcccacaaauggcgugggcuaucagcccuacagagugguggugcugagcuucgaacugcugcaugccccugccacagugugcggcccuaagaaaagcaccaaucucgugaagaacaaaugcgugaacuucaacuucaacggccugaccggcaccggcgugcugacagagagcaacaagaaguuccugccauuccagcaguuuggccgggauaucgccgauaccacagacgccguuagagauccccagacacuggaaauccuggacaucaccccuugcagcuucggcggagugucugugaucaccccuggcaccaacaccagcaaucagguggcagugcuguaccagggcgugaacuguaccgaagugcccguggccauucacgccgaucagcugacaccuacauggcggguguacuccaccggcagcaauguguuucagaccagagccggcugucugaucggagccgagcacgugaacaauagcuacgagugcgacauccccaucggcgcuggaaucugcgccagcuaccagacacagacaaacagcccucggagagccagaagcguggccagccagagcaucauugccuacacaaugucucugggcgccgagaacagcguggccuacuccaacaacucuaucgcuauccccaccaacuucaccaucagcgugaccacagagauccugccuguguccaugaccaagaccagcguggacugcaccauguacaucugcggcgauuccaccgagugcuccaaccugcugcugcaguacggcagcuucugcacccagcugaauagagcccugacagggaucgccguggaacaggacaagaacacccaagagguguucgcccaagugaagcagaucuacaagaccccuccuaucaaggacuucggcggcuucaauuucagccagauucugcccgauccuagcaagcccagcaagcggagcuucaucgaggaccugcuguucaacaaagugacacuggccgacgccggcuucaucaagcaguauggcgauugucugggcgacauugccgccagggaucugauuugcgcccagaaguuuaacggacugacagugcugccuccucugcugaccgaugagaugaucgcccaguacacaucugcccugcuggccggcacaaucacaagcggcuggacauuuggagcaggcgccgcucugcagauccccuuugcuaugcagauggccuaccgguucaacggcaucggagugacccagaaugugcuguacgagaaccagaagcugaucgccaaccaguucaacagcgccaucggcaagauccaggacagccugagcagcacagcaagcgcccugggaaagcugcaggacguggucaaccagaaugcccaggcacugaacacccuggucaagcagcuguccuccaacuucggcgccaucagcucugugcugaacgauauccugagcagacuggacccuccugaggccgaggugcagaucgacagacugaucacaggcagacugcagagccuccagacauacgugacccagcagcugaucagagccgccgagauuagagccucugccaaucuggccgccaccaagaugucugagugugugcugggccagagcaagagaguggacuuuugcggcaagggcuaccaccugaugagcuucccucagucugccccucacggcgugguguuucugcacgugacauaugugcccgcucaagagaagaauuucaccaccgcuccagccaucugccacgacggcaaagcccacuuuccuagagaaggcguguucguguccaacggcacccauugguucgugacacagcggaacuucuacgagccccagaucaucaccaccgacaacaccuucgugucuggcaacugcgacgucgugaucggcauugugaacaauaccguguacgacccucugcagcccgagcuggacagcuucaaagaggaacuggacaaguacuuuaagaaccacacaagccccgacguggaccugggcgauaucagcggaaucaaugccagcgucgugaacauccagaaagagaucgaccggcugaacgagguggccaagaaucugaacgagagccugaucgaccugcaagaacuggggaaguacgagcaguacaucaaguggcccugguacaucuggcugggcuuuaucgccggacugauugccaucgugauggucacaaucaugcuguguugcaugaccagcugcuguagcugccugaagggcuguuguagcuguggcagcugcugcaaguucgacgaggacgauucugagcccgugcugaagggcgugaaacugcacuacacaugaugacucgagcugguacugcaugcacgcaaugcuagcugccccuuucccguccuggguaccccgagucucccccgaccucgggucccagguaugcucccaccuccaccugccccacucaccaccucugcuaguuccagacaccucccaagcacgcagcaaugcagcucaaaacgcuuagccuagccacacccccacgggaaacagcagugauuaaccuuuagcaauaaacgaaaguuuaacuaagcuauacuaaccccaggguuggucaauuucgugccagccacacccuggagcuagcaaaaaaaaaaaaaaaaaaaaaaaaaaaaaaaaaaaaaaaaaaaaaaaaaaaaaaaaaaaaaaaaaaaaaaaaaaaaaaaaaaaaaaaaaaaaaaaaaaaa

SEQ ID NO: 26475 - RNA, 4273 nt, Artificial Sequence
  SARS-CoV-2/Wuhan/WIV05/2019__EPI_ISL_402128 spike protein mRNA gc mod (1-1273)(K986P_V987P_D614G_I692V)
agaauaaacuaguauucuucugguccccacagacucagagagaacccgccaccauguucguguuccuggugcugcugccucugguguccagccagugugugaaccugaccaccagaacacagcugccuccagccuacaccaacagcuuuaccagaggcguguacuaccccgacaagguguucagauccagcgugcugcacucuacccaggaccuguuccugccuuucuucagcaacgugaccugguuccacgccauccacguguccggcaccaauggcaccaagagauucgacaaccccgugcugcccuucaacgacgggguguacuuugccagcaccgagaaguccaacaucaucagaggcuggaucuucggcaccacacuggacagcaagacccagagccugcugaucgugaacaacgccaccaacguggucaucaaagugugcgaguuccaguucugcaacgaccccuuccugggcgucuacuaccacaagaacaacaagagcuggauggaaagcgaguuccggguguacagcagcgccaacaacugcaccuucgaguacgugucccagccuuuccugauggaccuggaaggcaagcagggcaacuucaagaaccugcgcgaguucguguuuaagaacaucgacggcuacuucaagaucuacagcaagcacaccccuaucaaccucgugcgggaucugccucagggcuucucugcucuggaaccccugguggaucugcccaucggcaucaacaucacccgguuucagacacugcuggcccugcacagaagcuaccugacaccuggcgauagcagcagcggauggacagcuggugccgccgcuuacuaugugggcuaccugcagccuagaaccuuccugcugaaguacaacgagaacggcaccaucaccgacgccguggauugugcucuggauccucugagcgagacaaagugcacccugaaguccuucaccguggaaaagggcaucuaccagaccagcaacuuccgggugcagcccaccgaauccaucgugcgguuccccaauaucaccaaucugugccccuucggcgagguguucaaugccaccagauucgccucuguguacgccuggaaccggaagcggaucagcaauugcguggccgacuacuccgugcuguacaacuccgccagcuucagcaccuucaagugcuacggcguguccccuaccaagcugaacgaccugugcuucacaaacguguacgccgacagcuucgugauccggggagaugaagugcggcagauugccccuggacagacaggcaagaucgccgacuacaacuacaagcugcccgacgacuucaccggcugugugauugccuggaacagcaacaaccuggacuccaaagucggcggcaacuacaauuaccuguaccggcuguuccggaaguccaaucugaagcccuucgagcgggacaucuccaccgagaucuaucaggccggcagcaccccuuguaacggcguggaaggcuucaacugcuacuucccacugcaguccuacggcuuucagcccacaaauggcgugggcuaucagcccuacagagugguggugcugagcuucgaacugcugcaugccccugccacagugugcggcccuaagaaaagcaccaaucucgugaagaacaaaugcgugaacuucaacuucaacggccugaccggcaccggcgugcugacagagagcaacaagaaguuccugccauuccagcaguuuggccgggauaucgccgauaccacagacgccguuagagauccccagacacuggaaauccuggacaucaccccuugcagcuucggcggagugucugugaucaccccuggcaccaacaccagcaaucagguggcagugcuguaccagggcgugaacuguaccgaagugcccguggccauucacgccgaucagcugacaccuacauggcggguguacuccaccggcagcaauguguuucagaccagagccggcugucugaucggagccgagcacgugaacaauagcuacgagugcgacauccccaucggcgcuggaaucugcgccagcuaccagacacagacaaacagcccucggagagccagaagcguggccagccagagcgugauugccuacacaaugucucugggcgccgagaacagcguggccuacuccaacaacucuaucgcuauccccaccaacuucaccaucagcgugaccacagagauccugccuguguccaugaccaagaccagcguggacugcaccauguacaucugcggcgauuccaccgagugcuccaaccugcugcugcaguacggcagcuucugcacccagcugaauagagcccugacagggaucgccguggaacaggacaagaacacccaagagguguucgcccaagugaagcagaucuacaagaccccuccuaucaaggacuucggcggcuucaauuucagccagauucugcccgauccuagcaagcccagcaagcggagcuucaucgaggaccugcuguucaacaaagugacacuggccgacgccggcuucaucaagcaguauggcgauugucugggcgacauugccgccagggaucugauuugcgcccagaaguuuaacggacugacagugcugccuccucugcugaccgaugagaugaucgcccaguacacaucugcccugcuggccggcacaaucacaagcggcuggacauuuggagcaggcgccgcucugcagauccccuuugcuaugcagauggccuaccgguucaacggcaucggagugacccagaaugugcuguacgagaaccagaagcugaucgccaaccaguucaacagcgccaucggcaagauccaggacagccugagcagcacagcaagcgcccugggaaagcugcaggacguggucaaccagaaugcccaggcacugaacacccuggucaagcagcuguccuccaacuucggcgccaucagcucugugcugaacgauauccugagcagacuggacccuccugaggccgaggugcagaucgacagacugaucacaggcagacugcagagccuccagacauacgugacccagcagcugaucagagccgccgagauuagagccucugccaaucuggccgccaccaagaugucugagugugugcugggccagagcaagagaguggacuuuugcggcaagggcuaccaccugaugagcuucccucagucugccccucacggcgugguguuucugcacgugacauaugugcccgcucaagagaagaauuucaccaccgcuccagccaucugccacgacggcaaagcccacuuuccuagagaaggcguguucguguccaacggcacccauugguucgugacacagcggaacuucuacgagccccagaucaucaccaccgacaacaccuucgugucuggcaacugcgacgucgugaucggcauugugaacaauaccguguacgacccucugcagcccgagcuggacagcuucaaagaggaacuggacaaguacuuuaagaaccacacaagccccgacguggaccugggcgauaucagcggaaucaaugccagcgucgugaacauccagaaagagaucgaccggcugaacgagguggccaagaaucugaacgagagccugaucgaccugcaagaacuggggaaguacgagcaguacaucaaguggcccugguacaucuggcugggcuuuaucgccggacugauugccaucgugauggucacaaucaugcuguguugcaugaccagcugcuguagcugccugaagggcuguuguagcuguggcagcugcugcaaguucgacgaggacgauucugagcccgugcugaagggcgugaaacugcacuacacaugaugacucgagcugguacugcaugcacgcaaugcuagcugccccuuucccguccuggguaccccgagucucccccgaccucgggucccagguaugcucccaccuccaccugccccacucaccaccucugcuaguuccagacaccucccaagcacgcagcaaugcagcucaaaacgcuuagccuagccacacccccacgggaaacagcagugauuaaccuuuagcaauaaacgaaaguuuaacuaagcuauacuaaccccaggguuggucaauuucgugccagccacacccuggagcuagcaaaaaaaaaaaaaaaaaaaaaaaaaaaaaaaaaaaaaaaaaaaaaaaaaaaaaaaaaaaaaaaaaaaaaaaaaaaaaaaaaaaaaaaaaaaaaaaaaaaa

SEQ ID NO: 26476 - RNA, 4273 nt, Artificial Sequence
  SARS-CoV-2/Wuhan/WIV05/2019__EPI_ISL_402128 spike protein mRNA gc mod (1-1273)(K986P_V987P_D614G_M1229I)
agaauaaacuaguauucuucugguccccacagacucagagagaacccgccaccauguucguguuccuggugcugcugccucugguguccagccagugugugaaccugaccaccagaacacagcugccuccagccuacaccaacagcuuuaccagaggcguguacuaccccgacaagguguucagauccagcgugcugcacucuacccaggaccuguuccugccuuucuucagcaacgugaccugguuccacgccauccacguguccggcaccaauggcaccaagagauucgacaaccccgugcugcccuucaacgacgggguguacuuugccagcaccgagaaguccaacaucaucagaggcuggaucuucggcaccacacuggacagcaagacccagagccugcugaucgugaacaacgccaccaacguggucaucaaagugugcgaguuccaguucugcaacgaccccuuccugggcgucuacuaccacaagaacaacaagagcuggauggaaagcgaguuccggguguacagcagcgccaacaacugcaccuucgaguacgugucccagccuuuccugauggaccuggaaggcaagcagggcaacuucaagaaccugcgcgaguucguguuuaagaacaucgacggcuacuucaagaucuacagcaagcacaccccuaucaaccucgugcgggaucugccucagggcuucucugcucuggaaccccugguggaucugcccaucggcaucaacaucacccgguuucagacacugcuggcccugcacagaagcuaccugacaccuggcgauagcagcagcggauggacagcuggugccgccgcuuacuaugugggcuaccugcagccuagaaccuuccugcugaaguacaacgagaacggcaccaucaccgacgccguggauugugcucuggauccucugagcgagacaaagugcacccugaaguccuucaccguggaaaagggcaucuaccagaccagcaacuuccgggugcagcccaccgaauccaucgugcgguuccccaauaucaccaaucugugccccuucggcgagguguucaaugccaccagauucgccucuguguacgccuggaaccggaagcggaucagcaauugcguggccgacuacuccgugcuguacaacuccgccagcuucagcaccuucaagugcuacggcguguccccuaccaagcugaacgaccugugcuucacaaacguguacgccgacagcuucgugauccggggagaugaagugcggcagauugccccuggacagacaggcaagaucgccgacuacaacuacaagcugcccgacgacuucaccggcugugugauugccuggaacagcaacaaccuggacuccaaagucggcggcaacuacaauuaccuguaccggcuguuccggaaguccaaucugaagcccuucgagcgggacaucuccaccgagaucuaucaggccggcagcaccccuuguaacggcguggaaggcuucaacugcuacuucccacugcaguccuacggcuuucagcccacaaauggcgugggcuaucagcccuacagagugguggugcugagcuucgaacugcugcaugccccugccacagugugcggcccuaagaaaagcaccaaucucgugaagaacaaaugcgugaacuucaacuucaacggccugaccggcaccggcgugcugacagagagcaacaagaaguuccugccauuccagcaguuuggccgggauaucgccgauaccacagacgccguuagagauccccagacacuggaaauccuggacaucaccccuugcagcuucggcggagugucugugaucaccccuggcaccaacaccagcaaucagguggcagugcuguaccagggcgugaacuguaccgaagugcccguggccauucacgccgaucagcugacaccuacauggcggguguacuccaccggcagcaauguguuucagaccagagccggcugucugaucggagccgagcacgugaacaauagcuacgagugcgacauccccaucggcgcuggaaucugcgccagcuaccagacacagacaaacagcccucggagagccagaagcguggccagccagagcaucauugccuacacaaugucucugggcgccgagaacagcguggccuacuccaacaacucuaucgcuauccccaccaacuucaccaucagcgugaccacagagauccugccuguguccaugaccaagaccagcguggacugcaccauguacaucugcggcgauuccaccgagugcuccaaccugcugcugcaguacggcagcuucugcacccagcugaauagagcccugacagggaucgccguggaacaggacaagaacacccaagagguguucgcccaagugaagcagaucuacaagaccccuccuaucaaggacuucggcggcuucaauuucagccagauucugcccgauccuagcaagcccagcaagcggagcuucaucgaggaccugcuguucaacaaagugacacuggccgacgccggcuucaucaagcaguauggcgauugucugggcgacauugccgccagggaucugauuugcgcccagaaguuuaacggacugacagugcugccuccucugcugaccgaugagaugaucgcccaguacacaucugcccugcuggccggcacaaucacaagcggcuggacauuuggagcaggcgccgcucugcagauccccuuugcuaugcagauggccuaccgguucaacggcaucggagugacccagaaugugcuguacgagaaccagaagcugaucgccaaccaguucaacagcgccaucggcaagauccaggacagccugagcagcacagcaagcgcccugggaaagcugcaggacguggucaaccagaaugcccaggcacugaacacccuggucaagcagcuguccuccaacuucggcgccaucagcucugugcugaacgauauccugagcagacuggacccuccugaggccgaggugcagaucgacagacugaucacaggcagacugcagagccuccagacauacgugacccagcagcugaucagagccgccgagauuagagccucugccaaucuggccgccaccaagaugucugagugugugcugggccagagcaagagaguggacuuuugcggcaagggcuaccaccugaugagcuucccucagucugccccucacggcgugguguuucugcacgugacauaugugcccgcucaagagaagaauuucaccaccgcuccagccaucugccacgacggcaaagcccacuuuccuagagaaggcguguucguguccaacggcacccauugguucgugacacagcggaacuucuacgagccccagaucaucaccaccgacaacaccuucgugucuggcaacugcgacgucgugaucggcauugugaacaauaccguguacgacccucugcagcccgagcuggacagcuucaaagaggaacuggacaaguacuuuaagaaccacacaagccccgacguggaccugggcgauaucagcggaaucaaugccagcgucgugaacauccagaaagagaucgaccggcugaacgagguggccaagaaucugaacgagagccugaucgaccugcaagaacuggggaaguacgagcaguacaucaaguggcccugguacaucuggcugggcuuuaucgccggacugauugccaucgugaucgucacaaucaugcuguguugcaugaccagcugcuguagcugccugaagggcuguuguagcuguggcagcugcugcaaguucgacgaggacgauucugagcccgugcugaagggcgugaaacugcacuacacaugaugacucgagcugguacugcaugcacgcaaugcuagcugccccuuucccguccuggguaccccgagucucccccgaccucgggucccagguaugcucccaccuccaccugccccacucaccaccucugcuaguuccagacaccucccaagcacgcagcaaugcagcucaaaacgcuuagccuagccacacccccacgggaaacagcagugauuaaccuuuagcaauaaacgaaaguuuaacuaagcuauacuaaccccaggguuggucaauuucgugccagccacacccuggagcuagcaaaaaaaaaaaaaaaaaaaaaaaaaaaaaaaaaaaaaaaaaaaaaaaaaaaaaaaaaaaaaaaaaaaaaaaaaaaaaaaaaaaaaaaaaaaaaaaaaaaa

SEQ ID NO: 26477 - RNA, 4267 nt, Artificial Sequence
  SARS-CoV-2/Wuhan/WIV05/2019__EPI_ISL_402128 spike protein mRNA gc mod (1-1273)(K986P_V987P_H69del_V70del_A222V_Y453F_S477N_D614G_I692V)
agaauaaacuaguauucuucugguccccacagacucagagagaacccgccaccauguucguguuccuggugcugcugccucugguguccagccagugugugaaccugaccaccagaacacagcugccuccagccuacaccaacagcuuuaccagaggcguguacuaccccgacaagguguucagauccagcgugcugcacucuacccaggaccuguuccugccuuucuucagcaacgugaccugguuccacgccaucuccggcaccaauggcaccaagagauucgacaaccccgugcugcccuucaacgacgggguguacuuugccagcaccgagaaguccaacaucaucagaggcuggaucuucggcaccacacuggacagcaagacccagagccugcugaucgugaacaacgccaccaacguggucaucaaagugugcgaguuccaguucugcaacgaccccuuccugggcgucuacuaccacaagaacaacaagagcuggauggaaagcgaguuccggguguacagcagcgccaacaacugcaccuucgaguacgugucccagccuuuccugauggaccuggaaggcaagcagggcaacuucaagaaccugcgcgaguucguguuuaagaacaucgacggcuacuucaagaucuacagcaagcacaccccuaucaaccucgugcgggaucugccucagggcuucucugugcuggaaccccugguggaucugcccaucggcaucaacaucacccgguuucagacacugcuggcccugcacagaagcuaccugacaccuggcgauagcagcagcggauggacagcuggugccgccgcuuacuaugugggcuaccugcagccuagaaccuuccugcugaaguacaacgagaacggcaccaucaccgacgccguggauugugcucuggauccucugagcgagacaaagugcacccugaaguccuucaccguggaaaagggcaucuaccagaccagcaacuuccgggugcagcccaccgaauccaucgugcgguuccccaauaucaccaaucugugccccuucggcgagguguucaaugccaccagauucgccucuguguacgccuggaaccggaagcggaucagcaauugcguggccgacuacuccgugcuguacaacuccgccagcuucagcaccuucaagugcuacggcguguccccuaccaagcugaacgaccugugcuucacaaacguguacgccgacagcuucgugauccggggagaugaagugcggcagauugccccuggacagacaggcaagaucgccgacuacaacuacaagcugcccgacgacuucaccggcugugugauugccuggaacagcaacaaccuggacuccaaagucggcggcaacuacaauuaccuguuccggcuguuccggaaguccaaucugaagcccuucgagcgggacaucuccaccgagaucuaucaggccggcaacaccccuuguaacggcguggaaggcuucaacugcuacuucccacugcaguccuacggcuuucagcccacaaauggcgugggcuaucagcccuacagagugguggugcugagcuucgaacugcugcaugccccugccacagugugcggcccuaagaaaagcaccaaucucgugaagaacaaaugcgugaacuucaacuucaacggccugaccggcaccggcgugcugacagagagcaacaagaaguuccugccauuccagcaguuuggccgggauaucgccgauaccacagacgccguuagagauccccagacacuggaaauccuggacaucaccccuugcagcuucggcggagugucugugaucaccccuggcaccaacaccagcaaucagguggcagugcuguaccagggcgugaacuguaccgaagugcccguggccauucacgccgaucagcugacaccuacauggcggguguacuccaccggcagcaauguguuucagaccagagccggcugucugaucggagccgagcacgugaacaauagcuacgagugcgacauccccaucggcgcuggaaucugcgccagcuaccagacacagacaaacagcccucggagagccagaagcguggccagccagagcgugauugccuacacaaugucucugggcgccgagaacagcguggccuacuccaacaacucuaucgcuauccccaccaacuucaccaucagcgugaccacagagauccugccuguguccaugaccaagaccagcguggacugcaccauguacaucugcggcgauuccaccgagugcuccaaccugcugcugcaguacggcagcuucugcacccagcugaauagagcccugacagggaucgccguggaacaggacaagaacacccaagagguguucgcccaagugaagcagaucuacaagaccccuccuaucaaggacuucggcggcuucaauuucagccagauucugcccgauccuagcaagcccagcaagcggagcuucaucgaggaccugcuguucaacaaagugacacuggccgacgccggcuucaucaagcaguauggcgauugucugggcgacauugccgccagggaucugauuugcgcccagaaguuuaacggacugacagugcugccuccucugcugaccgaugagaugaucgcccaguacacaucugcccugcuggccggcacaaucacaagcggcuggacauuuggagcaggcgccgcucugcagauccccuuugcuaugcagauggccuaccgguucaacggcaucggagugacccagaaugugcuguacgagaaccagaagcugaucgccaaccaguucaacagcgccaucggcaagauccaggacagccugagcagcacagcaagcgcccugggaaagcugcaggacguggucaaccagaaugcccaggcacugaacacccuggucaagcagcuguccuccaacuucggcgccaucagcucugugcugaacgauauccugagcagacuggacccuccugaggccgaggugcagaucgacagacugaucacaggcagacugcagagccuccagacauacgugacccagcagcugaucagagccgccgagauuagagccucugccaaucuggccgccaccaagaugucugagugugugcugggccagagcaagagaguggacuuuugcggcaagggcuaccaccugaugagcuucccucagucugccccucacggcgugguguuucugcacgugacauaugugcccgcucaagagaagaauuucaccaccgcuccagccaucugccacgacggcaaagcccacuuuccuagagaaggcguguucguguccaacggcacccauugguucgugacacagcggaacuucuacgagccccagaucaucaccaccgacaacaccuucgugucuggcaacugcgacgucgugaucggcauugugaacaauaccguguacgacccucugcagcccgagcuggacagcuucaaagaggaacuggacaaguacuuuaagaaccacacaagccccgacguggaccugggcgauaucagcggaaucaaugccagcgucgugaacauccagaaagagaucgaccggcugaacgagguggccaagaaucugaacgagagccugaucgaccugcaagaacuggggaaguacgagcaguacaucaaguggcccugguacaucuggcugggcuuuaucgccggacugauugccaucgugauggucacaaucaugcuguguugcaugaccagcugcuguagcugccugaagggcuguuguagcuguggcagcugcugcaaguucgacgaggacgauucugagcccgugcugaagggcgugaaacugcacuacacaugaugacucgagcugguacugcaugcacgcaaugcuagcugccccuuucccguccuggguaccccgagucucccccgaccucgggucccagguaugcucccaccuccaccugccccacucaccaccucugcuaguuccagacaccucccaagcacgcagcaaugcagcucaaaacgcuuagccuagccacacccccacgggaaacagcagugauuaaccuuuagcaauaaacgaaaguuuaacuaagcuauacuaaccccaggguuggucaauuucgugccagccacacccuggagcuagcaaaaaaaaaaaaaaaaaaaaaaaaaaaaaaaaaaaaaaaaaaaaaaaaaaaaaaaaaaaaaaaaaaaaaaaaaaaaaaaaaaaaaaaaaaaaaaaaaaaa

SEQ ID NO: 26478 - RNA, 4267 nt, Artificial Sequence
  SARS-CoV-2/Wuhan/WIV05/2019__EPI_ISL_402128 spike protein mRNA gc mod (1-1273)(K986P_V987P_H69del_V70del_Y453F_D614G_I692V_M1229I)
agaauaaacuaguauucuucugguccccacagacucagagagaacccgccaccauguucguguuccuggugcugcugccucugguguccagccagugugugaaccugaccaccagaacacagcugccuccagccuacaccaacagcuuuaccagaggcguguacuaccccgacaagguguucagauccagcgugcugcacucuacccaggaccuguuccugccuuucuucagcaacgugaccugguuccacgccaucuccggcaccaauggcaccaagagauucgacaaccccgugcugcccuucaacgacgggguguacuuugccagcaccgagaaguccaacaucaucagaggcuggaucuucggcaccacacuggacagcaagacccagagccugcugaucgugaacaacgccaccaacguggucaucaaagugugcgaguuccaguucugcaacgaccccuuccugggcgucuacuaccacaagaacaacaagagcuggauggaaagcgaguuccggguguacagcagcgccaacaacugcaccuucgaguacgugucccagccuuuccugauggaccuggaaggcaagcagggcaacuucaagaaccugcgcgaguucguguuuaagaacaucgacggcuacuucaagaucuacagcaagcacaccccuaucaaccucgugcgggaucugccucagggcuucucugcucuggaaccccugguggaucugcccaucggcaucaacaucacccgguuucagacacugcuggcccugcacagaagcuaccugacaccuggcgauagcagcagcggauggacagcuggugccgccgcuuacuaugugggcuaccugcagccuagaaccuuccugcugaaguacaacgagaacggcaccaucaccgacgccguggauugugcucuggauccucugagcgagacaaagugcacccugaaguccuucaccguggaaaagggcaucuaccagaccagcaacuuccgggugcagcccaccgaauccaucgugcgguuccccaauaucaccaaucugugccccuucggcgagguguucaaugccaccagauucgccucuguguacgccuggaaccggaagcggaucagcaauugcguggccgacuacuccgugcuguacaacuccgccagcuucagcaccuucaagugcuacggcguguccccuaccaagcugaacgaccugugcuucacaaacguguacgccgacagcuucgugauccggggagaugaagugcggcagauugccccuggacagacaggcaagaucgccgacuacaacuacaagcugcccgacgacuucaccggcugugugauugccuggaacagcaacaaccuggacuccaaagucggcggcaacuacaauuaccuguuccggcuguuccggaaguccaaucugaagcccuucgagcgggacaucuccaccgagaucuaucaggccggcagcaccccuuguaacggcguggaaggcuucaacugcuacuucccacugcaguccuacggcuuucagcccacaaauggcgugggcuaucagcccuacagagugguggugcugagcuucgaacugcugcaugccccugccacagugugcggcccuaagaaaagcaccaaucucgugaagaacaaaugcgugaacuucaacuucaacggccugaccggcaccggcgugcugacagagagcaacaagaaguuccugccauuccagcaguuuggccgggauaucgccgauaccacagacgccguuagagauccccagacacuggaaauccuggacaucaccccuugcagcuucggcggagugucugugaucaccccuggcaccaacaccagcaaucagguggcagugcuguaccagggcgugaacuguaccgaagugcccguggccauucacgccgaucagcugacaccuacauggcggguguacuccaccggcagcaauguguuucagaccagagccggcugucugaucggagccgagcacgugaacaauagcuacgagugcgacauccccaucggcgcuggaaucugcgccagcuaccagacacagacaaacagcccucggagagccagaagcguggccagccagagcgugauugccuacacaaugucucugggcgccgagaacagcguggccuacuccaacaacucuaucgcuauccccaccaacuucaccaucagcgugaccacagagauccugccuguguccaugaccaagaccagcguggacugcaccauguacaucugcggcgauuccaccgagugcuccaaccugcugcugcaguacggcagcuucugcacccagcugaauagagcccugacagggaucgccguggaacaggacaagaacacccaagagguguucgcccaagugaagcagaucuacaagaccccuccuaucaaggacuucggcggcuucaauuucagccagauucugcccgauccuagcaagcccagcaagcggagcuucaucgaggaccugcuguucaacaaagugacacuggccgacgccggcuucaucaagcaguauggcgauugucugggcgacauugccgccagggaucugauuugcgcccagaaguuuaacggacugacagugcugccuccucugcugaccgaugagaugaucgcccaguacacaucugcccugcuggccggcacaaucacaagcggcuggacauuuggagcaggcgccgcucugcagauccccuuugcuaugcagauggccuaccgguucaacggcaucggagugacccagaaugugcuguacgagaaccagaagcugaucgccaaccaguucaacagcgccaucggcaagauccaggacagccugagcagcacagcaagcgcccugggaaagcugcaggacguggucaaccagaaugcccaggcacugaacacccuggucaagcagcuguccuccaacuucggcgccaucagcucugugcugaacgauauccugagcagacuggacccuccugaggccgaggugcagaucgacagacugaucacaggcagacugcagagccuccagacauacgugacccagcagcugaucagagccgccgagauuagagccucugccaaucuggccgccaccaagaugucugagugugugcugggccagagcaagagaguggacuuuugcggcaagggcuaccaccugaugagcuucccucagucugccccucacggcgugguguuucugcacgugacauaugugcccgcucaagagaagaauuucaccaccgcuccagccaucugccacgacggcaaagcccacuuuccuagagaaggcguguucguguccaacggcacccauugguucgugacacagcggaacuucuacgagccccagaucaucaccaccgacaacaccuucgugucuggcaacugcgacgucgugaucggcauugugaacaauaccguguacgacccucugcagcccgagcuggacagcuucaaagaggaacuggacaaguacuuuaagaaccacacaagccccgacguggaccugggcgauaucagcggaaucaaugccagcgucgugaacauccagaaagagaucgaccggcugaacgagguggccaagaaucugaacgagagccugaucgaccugcaagaacuggggaaguacgagcaguacaucaaguggcccugguacaucuggcugggcuuuaucgccggacugauugccaucgugaucgucacaaucaugcuguguugcaugaccagcugcuguagcugccugaagggcuguuguagcuguggcagcugcugcaaguucgacgaggacgauucugagcccgugcugaagggcgugaaacugcacuacacaugaugacucgagcugguacugcaugcacgcaaugcuagcugccccuuucccguccuggguaccccgagucucccccgaccucgggucccagguaugcucccaccuccaccugccccacucaccaccucugcuaguuccagacaccucccaagcacgcagcaaugcagcucaaaacgcuuagccuagccacacccccacgggaaacagcagugauuaaccuuuagcaauaaacgaaaguuuaacuaagcuauacuaaccccaggguuggucaauuucgugccagccacacccuggagcuagcaaaaaaaaaaaaaaaaaaaaaaaaaaaaaaaaaaaaaaaaaaaaaaaaaaaaaaaaaaaaaaaaaaaaaaaaaaaaaaaaaaaaaaaaaaaaaaaaaaaa

SEQ ID NO: 26479 - RNA, 4264 nt, Artificial Sequence
  SARS-CoV-2/Wuhan/WIV05/2019__EPI_ISL_402128 spike protein mRNA gc mod (1-1273)(K986P_V987P_K986P_V987P_H69del_V70del_Y144del_N501Y_A570 D_D614G_P681H_T716I_S982A_D1118H)
agaauaaacuaguauucuucugguccccacagacucagagagaacccgccaccauguucguguuccuggugcugcugccucugguguccagccagugugugaaccugaccaccagaacacagcugccuccagccuacaccaacagcuuuaccagaggcguguacuaccccgacaagguguucagauccagcgugcugcacucuacccaggaccuguuccugccuuucuucagcaacgugaccugguuccacgccaucuccggcaccaauggcaccaagagauucgacaaccccgugcugcccuucaacgacgggguguacuuugccagcaccgagaaguccaacaucaucagaggcuggaucuucggcaccacacuggacagcaagacccagagccugcugaucgugaacaacgccaccaacguggucaucaaagugugcgaguuccaguucugcaacgaccccuuccugggcgucuaccacaagaacaacaagagcuggauggaaagcgaguuccggguguacagcagcgccaacaacugcaccuucgaguacgugucccagccuuuccugauggaccuggaaggcaagcagggcaacuucaagaaccugcgcgaguucguguuuaagaacaucgacggcuacuucaagaucuacagcaagcacaccccuaucaaccucgugcgggaucugccucagggcuucucugcucuggaaccccugguggaucugcccaucggcaucaacaucacccgguuucagacacugcuggcccugcacagaagcuaccugacaccuggcgauagcagcagcggauggacagcuggugccgccgcuuacuaugugggcuaccugcagccuagaaccuuccugcugaaguacaacgagaacggcaccaucaccgacgccguggauugugcucuggauccucugagcgagacaaagugcacccugaaguccuucaccguggaaaagggcaucuaccagaccagcaacuuccgggugcagcccaccgaauccaucgugcgguuccccaauaucaccaaucugugccccuucggcgagguguucaaugccaccagauucgccucuguguacgccuggaaccggaagcggaucagcaauugcguggccgacuacuccgugcuguacaacuccgccagcuucagcaccuucaagugcuacggcguguccccuaccaagcugaacgaccugugcuucacaaacguguacgccgacagcuucgugauccggggagaugaagugcggcagauugccccuggacagacaggcaagaucgccgacuacaacuacaagcugcccgacgacuucaccggcugugugauugccuggaacagcaacaaccuggacuccaaagucggcggcaacuacaauuaccuguaccggcuguuccggaaguccaaucugaagcccuucgagcgggacaucuccaccgagaucuaucaggccggcagcaccccuuguaacggcguggaaggcuucaacugcuacuucccacugcaguccuacggcuuucagcccacauacggcgugggcuaucagcccuacagagugguggugcugagcuucgaacugcugcaugccccugccacagugugcggcccuaagaaaagcaccaaucucgugaagaacaaaugcgugaacuucaacuucaacggccugaccggcaccggcgugcugacagagagcaacaagaaguuccugccauuccagcaguuuggccgggauaucgacgauaccacagacgccguuagagauccccagacacuggaaauccuggacaucaccccuugcagcuucggcggagugucugugaucaccccuggcaccaacaccagcaaucagguggcagugcuguaccagggcgugaacuguaccgaagugcccguggccauucacgccgaucagcugacaccuacauggcggguguacuccaccggcagcaauguguuucagaccagagccggcugucugaucggagccgagcacgugaacaauagcuacgagugcgacauccccaucggcgcuggaaucugcgccagcuaccagacacagacaaacagccaccggagagccagaagcguggccagccagagcaucauugccuacacaaugucucugggcgccgagaacagcguggccuacuccaacaacucuaucgcuauccccaucaacuucaccaucagcgugaccacagagauccugccuguguccaugaccaagaccagcguggacugcaccauguacaucugcggcgauuccaccgagugcuccaaccugcugcugcaguacggcagcuucugcacccagcugaauagagcccugacagggaucgccguggaacaggacaagaacacccaagagguguucgcccaagugaagcagaucuacaagaccccuccuaucaaggacuucggcggcuucaauuucagccagauucugcccgauccuagcaagcccagcaagcggagcuucaucgaggaccugcuguucaacaaagugacacuggccgacgccggcuucaucaagcaguauggcgauugucugggcgacauugccgccagggaucugauuugcgcccagaaguuuaacggacugacagugcugccuccucugcugaccgaugagaugaucgcccaguacacaucugcccugcuggccggcacaaucacaagcggcuggacauuuggagcaggcgccgcucugcagauccccuuugcuaugcagauggccuaccgguucaacggcaucggagugacccagaaugugcuguacgagaaccagaagcugaucgccaaccaguucaacagcgccaucggcaagauccaggacagccugagcagcacagcaagcgcccugggaaagcugcaggacguggucaaccagaaugcccaggcacugaacacccuggucaagcagcuguccuccaacuucggcgccaucagcucugugcugaacgauauccuggccagacuggacccuccugaggccgaggugcagaucgacagacugaucacaggcagacugcagagccuccagacauacgugacccagcagcugaucagagccgccgagauuagagccucugccaaucuggccgccaccaagaugucugagugugugcugggccagagcaagagaguggacuuuugcggcaagggcuaccaccugaugagcuucccucagucugccccucacggcgugguguuucugcacgugacauaugugcccgcucaagagaagaauuucaccaccgcuccagccaucugccacgacggcaaagcccacuuuccuagagaaggcguguucguguccaacggcacccauugguucgugacacagcggaacuucuacgagccccagaucaucaccacccacaacaccuucgugucuggcaacugcgacgucgugaucggcauugugaacaauaccguguacgacccucugcagcccgagcuggacagcuucaaagaggaacuggacaaguacuuuaagaaccacacaagccccgacguggaccugggcgauaucagcggaaucaaugccagcgucgugaacauccagaaagagaucgaccggcugaacgagguggccaagaaucugaacgagagccugaucgaccugcaagaacuggggaaguacgagcaguacaucaaguggcccugguacaucuggcugggcuuuaucgccggacugauugccaucgugauggucacaaucaugcuguguugcaugaccagcugcuguagcugccugaagggcuguuguagcuguggcagcugcugcaaguucgacgaggacgauucugagcccgugcugaagggcgugaaacugcacuacacaugaugacucgagcugguacugcaugcacgcaaugcuagcugccccuuucccguccuggguaccccgagucucccccgaccucgggucccagguaugcucccaccuccaccugccccacucaccaccucugcuaguuccagacaccucccaagcacgcagcaaugcagcucaaaacgcuuagccuagccacacccccacgggaaacagcagugauuaaccuuuagcaauaaacgaaaguuuaacuaagcuauacuaaccccaggguuggucaauuucgugccagccacacccuggagcuagcaaaaaaaaaaaaaaaaaaaaaaaaaaaaaaaaaaaaaaaaaaaaaaaaaaaaaaaaaaaaaaaaaaaaaaaaaaaaaaaaaaaaaaaaaaaaaaaaaaaa

SEQ ID NO: 26480 - RNA, 4273 nt, Artificial Sequence
  SARS-CoV-2/Wuhan/WIV05/2019__EPI_ISL_402128 spike protein mRNA gc mod (1-1273)(K986P_V987P_K986P_V987P_K417N_E484K_N501Y_D614G)
agaauaaacuaguauucuucugguccccacagacucagagagaacccgccaccauguucguguuccuggugcugcugccucugguguccagccagugugugaaccugaccaccagaacacagcugccuccagccuacaccaacagcuuuaccagaggcguguacuaccccgacaagguguucagauccagcgugcugcacucuacccaggaccuguuccugccuuucuucagcaacgugaccugguuccacgccauccacguguccggcaccaauggcaccaagagauucgacaaccccgugcugcccuucaacgacgggguguacuuugccagcaccgagaaguccaacaucaucagaggcuggaucuucggcaccacacuggacagcaagacccagagccugcugaucgugaacaacgccaccaacguggucaucaaagugugcgaguuccaguucugcaacgaccccuuccugggcgucuacuaccacaagaacaacaagagcuggauggaaagcgaguuccggguguacagcagcgccaacaacugcaccuucgaguacgugucccagccuuuccugauggaccuggaaggcaagcagggcaacuucaagaaccugcgcgaguucguguuuaagaacaucgacggcuacuucaagaucuacagcaagcacaccccuaucaaccucgugcgggaucugccucagggcuucucugcucuggaaccccugguggaucugcccaucggcaucaacaucacccgguuucagacacugcuggcccugcacagaagcuaccugacaccuggcgauagcagcagcggauggacagcuggugccgccgcuuacuaugugggcuaccugcagccuagaaccuuccugcugaaguacaacgagaacggcaccaucaccgacgccguggauugugcucuggauccucugagcgagacaaagugcacccugaaguccuucaccguggaaaagggcaucuaccagaccagcaacuuccgggugcagcccaccgaauccaucgugcgguuccccaauaucaccaaucugugccccuucggcgagguguucaaugccaccagauucgccucuguguacgccuggaaccggaagcggaucagcaauugcguggccgacuacuccgugcuguacaacuccgccagcuucagcaccuucaagugcuacggcguguccccuaccaagcugaacgaccugugcuucacaaacguguacgccgacagcuucgugauccggggagaugaagugcggcagauugccccuggacagacaggcaacaucgccgacuacaacuacaagcugcccgacgacuucaccggcugugugauugccuggaacagcaacaaccuggacuccaaagucggcggcaacuacaauuaccuguaccggcuguuccggaaguccaaucugaagcccuucgagcgggacaucuccaccgagaucuaucaggccggcagcaccccuuguaacggcgugaagggcuucaacugcuacuucccacugcaguccuacggcuuucagcccacauacggcgugggcuaucagcccuacagagugguggugcugagcuucgaacugcugcaugccccugccacagugugcggcccuaagaaaagcaccaaucucgugaagaacaaaugcgugaacuucaacuucaacggccugaccggcaccggcgugcugacagagagcaacaagaaguuccugccauuccagcaguuuggccgggauaucgccgauaccacagacgccguuagagauccccagacacuggaaauccuggacaucaccccuugcagcuucggcggagugucugugaucaccccuggcaccaacaccagcaaucagguggcagugcuguaccagggcgugaacuguaccgaagugcccguggccauucacgccgaucagcugacaccuacauggcggguguacuccaccggcagcaauguguuucagaccagagccggcugucugaucggagccgagcacgugaacaauagcuacgagugcgacauccccaucggcgcuggaaucugcgccagcuaccagacacagacaaacagcccucggagagccagaagcguggccagccagagcaucauugccuacacaaugucucugggcgccgagaacagcguggccuacuccaacaacucuaucgcuauccccaccaacuucaccaucagcgugaccacagagauccugccuguguccaugaccaagaccagcguggacugcaccauguacaucugcggcgauuccaccgagugcuccaaccugcugcugcaguacggcagcuucugcacccagcugaauagagcccugacagggaucgccguggaacaggacaagaacacccaagagguguucgcccaagugaagcagaucuacaagaccccuccuaucaaggacuucggcggcuucaauuucagccagauucugcccgauccuagcaagcccagcaagcggagcuucaucgaggaccugcuguucaacaaagugacacuggccgacgccggcuucaucaagcaguauggcgauugucugggcgacauugccgccagggaucugauuugcgcccagaaguuuaacggacugacagugcugccuccucugcugaccgaugagaugaucgcccaguacacaucugcccugcuggccggcacaaucacaagcggcuggacauuuggagcaggcgccgcucugcagauccccuuugcuaugcagauggccuaccgguucaacggcaucggagugacccagaaugugcuguacgagaaccagaagcugaucgccaaccaguucaacagcgccaucggcaagauccaggacagccugagcagcacagcaagcgcccugggaaagcugcaggacguggucaaccagaaugcccaggcacugaacacccuggucaagcagcuguccuccaacuucggcgccaucagcucugugcugaacgauauccugagcagacuggacccuccugaggccgaggugcagaucgacagacugaucacaggcagacugcagagccuccagacauacgugacccagcagcugaucagagccgccgagauuagagccucugccaaucuggccgccaccaagaugucugagugugugcugggccagagcaagagaguggacuuuugcggcaagggcuaccaccugaugagcuucccucagucugccccucacggcgugguguuucugcacgugacauaugugcccgcucaagagaagaauuucaccaccgcuccagccaucugccacgacggcaaagcccacuuuccuagagaaggcguguucguguccaacggcacccauugguucgugacacagcggaacuucuacgagccccagaucaucaccaccgacaacaccuucgugucuggcaacugcgacgucgugaucggcauugugaacaauaccguguacgacccucugcagcccgagcuggacagcuucaaagaggaacuggacaaguacuuuaagaaccacacaagccccgacguggaccugggcgauaucagcggaaucaaugccagcgucgugaacauccagaaagagaucgaccggcugaacgagguggccaagaaucugaacgagagccugaucgaccugcaagaacuggggaaguacgagcaguacaucaaguggcccugguacaucuggcugggcuuuaucgccggacugauugccaucgugauggucacaaucaugcuguguugcaugaccagcugcuguagcugccugaagggcuguuguagcuguggcagcugcugcaaguucgacgaggacgauucugagcccgugcugaagggcgugaaacugcacuacacaugaugacucgagcugguacugcaugcacgcaaugcuagcugccccuuucccguccuggguaccccgagucucccccgaccucgggucccagguaugcucccaccuccaccugccccacucaccaccucugcuaguuccagacaccucccaagcacgcagcaaugcagcucaaaacgcuuagccuagccacacccccacgggaaacagcagugauuaaccuuuagcaauaaacgaaaguuuaacuaagcuauacuaaccccaggguuggucaauuucgugccagccacacccuggagcuagcaaaaaaaaaaaaaaaaaaaaaaaaaaaaaaaaaaaaaaaaaaaaaaaaaaaaaaaaaaaaaaaaaaaaaaaaaaaaaaaaaaaaaaaaaaaaaaaaaaaa

SEQ ID NO: 26481 - RNA, 4264 nt, Artificial Sequence
  SARS-CoV-2/Wuhan/WIV05/2019__EPI_ISL_402128 spike protein mRNA gc mod (1-1273)(K986P_V987P_K986P_V987P_L18F_D80A_D215G_L242del_A243del_ L244del_R246I_K417N_E484K_N501Y_D614G_A701V)
agaauaaacuaguauucuucugguccccacagacucagagagaacccgccaccauguucguguuccuggugcugcugccucugguguccagccagugugugaacuucaccaccagaacacagcugccuccagccuacaccaacagcuuuaccagaggcguguacuaccccgacaagguguucagauccagcgugcugcacucuacccaggaccuguuccugccuuucuucagcaacgugaccugguuccacgccauccacguguccggcaccaauggcaccaagagauucgccaaccccgugcugcccuucaacgacgggguguacuuugccagcaccgagaaguccaacaucaucagaggcuggaucuucggcaccacacuggacagcaagacccagagccugcugaucgugaacaacgccaccaacguggucaucaaagugugcgaguuccaguucugcaacgaccccuuccugggcgucuacuaccacaagaacaacaagagcuggauggaaagcgaguuccggguguacagcagcgccaacaacugcaccuucgaguacgugucccagccuuuccugauggaccuggaaggcaagcagggcaacuucaagaaccugcgcgaguucguguuuaagaacaucgacggcuacuucaagaucuacagcaagcacaccccuaucaaccucgugcggggccugccucagggcuucucugcucuggaaccccugguggaucugcccaucggcaucaacaucacccgguuucagacacugcacaucagcuaccugacaccuggcgauagcagcagcggauggacagcuggugccgccgcuuacuaugugggcuaccugcagccuagaaccuuccugcugaaguacaacgagaacggcaccaucaccgacgccguggauugugcucuggauccucugagcgagacaaagugcacccugaaguccuucaccguggaaaagggcaucuaccagaccagcaacuuccgggugcagcccaccgaauccaucgugcgguuccccaauaucaccaaucugugccccuucggcgagguguucaaugccaccagauucgccucuguguacgccuggaaccggaagcggaucagcaauugcguggccgacuacuccgugcuguacaacuccgccagcuucagcaccuucaagugcuacggcguguccccuaccaagcugaacgaccugugcuucacaaacguguacgccgacagcuucgugauccggggagaugaagugcggcagauugccccuggacagacaggcaacaucgccgacuacaacuacaagcugcccgacgacuucaccggcugugugauugccuggaacagcaacaaccuggacuccaaagucggcggcaacuacaauuaccuguaccggcuguuccggaaguccaaucugaagcccuucgagcgggacaucuccaccgagaucuaucaggccggcagcaccccuuguaacggcgugaagggcuucaacugcuacuucccacugcaguccuacggcuuucagcccacauacggcgugggcuaucagcccuacagagugguggugcugagcuucgaacugcugcaugccccugccacagugugcggcccuaagaaaagcaccaaucucgugaagaacaaaugcgugaacuucaacuucaacggccugaccggcaccggcgugcugacagagagcaacaagaaguuccugccauuccagcaguuuggccgggauaucgccgauaccacagacgccguuagagauccccagacacuggaaauccuggacaucaccccuugcagcuucggcggagugucugugaucaccccuggcaccaacaccagcaaucagguggcagugcuguaccagggcgugaacuguaccgaagugcccguggccauucacgccgaucagcugacaccuacauggcggguguacuccaccggcagcaauguguuucagaccagagccggcugucugaucggagccgagcacgugaacaauagcuacgagugcgacauccccaucggcgcuggaaucugcgccagcuaccagacacagacaaacagcccucggagagccagaagcguggccagccagagcaucauugccuacacaaugucucugggcguggagaacagcguggccuacuccaacaacucuaucgcuauccccaccaacuucaccaucagcgugaccacagagauccugccuguguccaugaccaagaccagcguggacugcaccauguacaucugcggcgauuccaccgagugcuccaaccugcugcugcaguacggcagcuucugcacccagcugaauagagcccugacagggaucgccguggaacaggacaagaacacccaagagguguucgcccaagugaagcagaucuacaagaccccuccuaucaaggacuucggcggcuucaauuucagccagauucugcccgauccuagcaagcccagcaagcggagcuucaucgaggaccugcuguucaacaaagugacacuggccgacgccggcuucaucaagcaguauggcgauugucugggcgacauugccgccagggaucugauuugcgcccagaaguuuaacggacugacagugcugccuccucugcugaccgaugagaugaucgcccaguacacaucugcccugcuggccggcacaaucacaagcggcuggacauuuggagcaggcgccgcucugcagauccccuuugcuaugcagauggccuaccgguucaacggcaucggagugacccagaaugugcuguacgagaaccagaagcugaucgccaaccaguucaacagcgccaucggcaagauccaggacagccugagcagcacagcaagcgcccugggaaagcugcaggacguggucaaccagaaugcccaggcacugaacacccuggucaagcagcuguccuccaacuucggcgccaucagcucugugcugaacgauauccugagcagacuggacccuccugaggccgaggugcagaucgacagacugaucacaggcagacugcagagccuccagacauacgugacccagcagcugaucagagccgccgagauuagagccucugccaaucuggccgccaccaagaugucugagugugugcugggccagagcaagagaguggacuuuugcggcaagggcuaccaccugaugagcuucccucagucugccccucacggcgugguguuucugcacgugacauaugugcccgcucaagagaagaauuucaccaccgcuccagccaucugccacgacggcaaagcccacuuuccuagagaaggcguguucguguccaacggcacccauugguucgugacacagcggaacuucuacgagccccagaucaucaccaccgacaacaccuucgugucuggcaacugcgacgucgugaucggcauugugaacaauaccguguacgacccucugcagcccgagcuggacagcuucaaagaggaacuggacaaguacuuuaagaaccacacaagccccgacguggaccugggcgauaucagcggaaucaaugccagcgucgugaacauccagaaagagaucgaccggcugaacgagguggccaagaaucugaacgagagccugaucgaccugcaagaacuggggaaguacgagcaguacaucaaguggcccugguacaucuggcugggcuuuaucgccggacugauugccaucgugauggucacaaucaugcuguguugcaugaccagcugcuguagcugccugaagggcuguuguagcuguggcagcugcugcaaguucgacgaggacgauucugagcccgugcugaagggcgugaaacugcacuacacaugaugacucgagcugguacugcaugcacgcaaugcuagcugccccuuucccguccuggguaccccgagucucccccgaccucgggucccagguaugcucccaccuccaccugccccacucaccaccucugcuaguuccagacaccucccaagcacgcagcaaugcagcucaaaacgcuuagccuagccacacccccacgggaaacagcagugauuaaccuuuagcaauaaacgaaaguuuaacuaagcuauacuaaccccaggguuggucaauuucgugccagccacacccuggagcuagcaaaaaaaaaaaaaaaaaaaaaaaaaaaaaaaaaaaaaaaaaaaaaaaaaaaaaaaaaaaaaaaaaaaaaaaaaaaaaaaaaaaaaaaaaaaaaaaaaaaa

SEQ ID NO: 26482 - RNA, 4273 nt, Artificial Sequence
  SARS-CoV-2/Wuhan/WIV05/2019__EPI_ISL_402128 spike protein mRNA gc mod (1-1273)(K986P_V987P_K986P_V987P_E484K_D614G)
agaauaaacuaguauucuucugguccccacagacucagagagaacccgccaccauguucguguuccuggugcugcugccucugguguccagccagugugugaaccugaccaccagaacacagcugccuccagccuacaccaacagcuuuaccagaggcguguacuaccccgacaagguguucagauccagcgugcugcacucuacccaggaccuguuccugccuuucuucagcaacgugaccugguuccacgccauccacguguccggcaccaauggcaccaagagauucgacaaccccgugcugcccuucaacgacgggguguacuuugccagcaccgagaaguccaacaucaucagaggcuggaucuucggcaccacacuggacagcaagacccagagccugcugaucgugaacaacgccaccaacguggucaucaaagugugcgaguuccaguucugcaacgaccccuuccugggcgucuacuaccacaagaacaacaagagcuggauggaaagcgaguuccggguguacagcagcgccaacaacugcaccuucgaguacgugucccagccuuuccugauggaccuggaaggcaagcagggcaacuucaagaaccugcgcgaguucguguuuaagaacaucgacggcuacuucaagaucuacagcaagcacaccccuaucaaccucgugcgggaucugccucagggcuucucugcucuggaaccccugguggaucugcccaucggcaucaacaucacccgguuucagacacugcuggcccugcacagaagcuaccugacaccuggcgauagcagcagcggauggacagcuggugccgccgcuuacuaugugggcuaccugcagccuagaaccuuccugcugaaguacaacgagaacggcaccaucaccgacgccguggauugugcucuggauccucugagcgagacaaagugcacccugaaguccuucaccguggaaaagggcaucuaccagaccagcaacuuccgggugcagcccaccgaauccaucgugcgguuccccaauaucaccaaucugugccccuucggcgagguguucaaugccaccagauucgccucuguguacgccuggaaccggaagcggaucagcaauugcguggccgacuacuccgugcuguacaacuccgccagcuucagcaccuucaagugcuacggcguguccccuaccaagcugaacgaccugugcuucacaaacguguacgccgacagcuucgugauccggggagaugaagugcggcagauugccccuggacagacaggcaagaucgccgacuacaacuacaagcugcccgacgacuucaccggcugugugauugccuggaacagcaacaaccuggacuccaaagucggcggcaacuacaauuaccuguaccggcuguuccggaaguccaaucugaagcccuucgagcgggacaucuccaccgagaucuaucaggccggcagcaccccuuguaacggcgugaagggcuucaacugcuacuucccacugcaguccuacggcuuucagcccacaaauggcgugggcuaucagcccuacagagugguggugcugagcuucgaacugcugcaugccccugccacagugugcggcccuaagaaaagcaccaaucucgugaagaacaaaugcgugaacuucaacuucaacggccugaccggcaccggcgugcugacagagagcaacaagaaguuccugccauuccagcaguuuggccgggauaucgccgauaccacagacgccguuagagauccccagacacuggaaauccuggacaucaccccuugcagcuucggcggagugucugugaucaccccuggcaccaacaccagcaaucagguggcagugcuguaccagggcgugaacuguaccgaagugcccguggccauucacgccgaucagcugacaccuacauggcggguguacuccaccggcagcaauguguuucagaccagagccggcugucugaucggagccgagcacgugaacaauagcuacgagugcgacauccccaucggcgcuggaaucugcgccagcuaccagacacagacaaacagcccucggagagccagaagcguggccagccagagcaucauugccuacacaaugucucugggcgccgagaacagcguggccuacuccaacaacucuaucgcuauccccaccaacuucaccaucagcgugaccacagagauccugccuguguccaugaccaagaccagcguggacugcaccauguacaucugcggcgauuccaccgagugcuccaaccugcugcugcaguacggcagcuucugcacccagcugaauagagcccugacagggaucgccguggaacaggacaagaacacccaagagguguucgcccaagugaagcagaucuacaagaccccuccuaucaaggacuucggcggcuucaauuucagccagauucugcccgauccuagcaagcccagcaagcggagcuucaucgaggaccugcuguucaacaaagugacacuggccgacgccggcuucaucaagcaguauggcgauugucugggcgacauugccgccagggaucugauuugcgcccagaaguuuaacggacugacagugcugccuccucugcugaccgaugagaugaucgcccaguacacaucugcccugcuggccggcacaaucacaagcggcuggacauuuggagcaggcgccgcucugcagauccccuuugcuaugcagauggccuaccgguucaacggcaucggagugacccagaaugugcuguacgagaaccagaagcugaucgccaaccaguucaacagcgccaucggcaagauccaggacagccugagcagcacagcaagcgcccugggaaagcugcaggacguggucaaccagaaugcccaggcacugaacacccuggucaagcagcuguccuccaacuucggcgccaucagcucugugcugaacgauauccugagcagacuggacccuccugaggccgaggugcagaucgacagacugaucacaggcagacugcagagccuccagacauacgugacccagcagcugaucagagccgccgagauuagagccucugccaaucuggccgccaccaagaugucugagugugugcugggccagagcaagagaguggacuuuugcggcaagggcuaccaccugaugagcuucccucagucugccccucacggcgugguguuucugcacgugacauaugugcccgcucaagagaagaauuucaccaccgcuccagccaucugccacgacggcaaagcccacuuuccuagagaaggcguguucguguccaacggcacccauugguucgugacacagcggaacuucuacgagccccagaucaucaccaccgacaacaccuucgugucuggcaacugcgacgucgugaucggcauugugaacaauaccguguacgacccucugcagcccgagcuggacagcuucaaagaggaacuggacaaguacuuuaagaaccacacaagccccgacguggaccugggcgauaucagcggaaucaaugccagcgucgugaacauccagaaagagaucgaccggcugaacgagguggccaagaaucugaacgagagccugaucgaccugcaagaacuggggaaguacgagcaguacaucaaguggcccugguacaucuggcugggcuuuaucgccggacugauugccaucgugauggucacaaucaugcuguguugcaugaccagcugcuguagcugccugaagggcuguuguagcuguggcagcugcugcaaguucgacgaggacgauucugagcccgugcugaagggcgugaaacugcacuacacaugaugacucgagcugguacugcaugcacgcaaugcuagcugccccuuucccguccuggguaccccgagucucccccgaccucgggucccagguaugcucccaccuccaccugccccacucaccaccucugcuaguuccagacaccucccaagcacgcagcaaugcagcucaaaacgcuuagccuagccacacccccacgggaaacagcagugauuaaccuuuagcaauaaacgaaaguuuaacuaagcuauacuaaccccaggguuggucaauuucgugccagccacacccuggagcuagcaaaaaaaaaaaaaaaaaaaaaaaaaaaaaaaaaaaaaaaaaaaaaaaaaaaaaaaaaaaaaaaaaaaaaaaaaaaaaaaaaaaaaaaaaaaaaaaaaaaa

SEQ ID NO: 26483 - RNA, 4273 nt, Artificial Sequence
  SARS-CoV-2/Wuhan/WIV05/2019__EPI_ISL_402128 spike protein mRNA gc mod (1-1273)(K986P_V987P_K986P_V987P_L18F_T20N_P26S_D138Y_R190S_K417T _E484K_N501Y_D614G_H655Y_T1027I)
agaauaaacuaguauucuucugguccccacagacucagagagaacccgccaccauguucguguuccuggugcugcugccucugguguccagccagugugugaacuucaccaacagaacacagcugccuagcgccuacaccaacagcuuuaccagaggcguguacuaccccgacaagguguucagauccagcgugcugcacucuacccaggaccuguuccugccuuucuucagcaacgugaccugguuccacgccauccacguguccggcaccaauggcaccaagagauucgacaaccccgugcugcccuucaacgacgggguguacuuugccagcaccgagaaguccaacaucaucagaggcuggaucuucggcaccacacuggacagcaagacccagagccugcugaucgugaacaacgccaccaacguggucaucaaagugugcgaguuccaguucugcaacuaccccuuccugggcgucuacuaccacaagaacaacaagagcuggauggaaagcgaguuccggguguacagcagcgccaacaacugcaccuucgaguacgugucccagccuuuccugauggaccuggaaggcaagcagggcaacuucaagaaccugagcgaguucguguuuaagaacaucgacggcuacuucaagaucuacagcaagcacaccccuaucaaccucgugcgggaucugccucagggcuucucugcucuggaaccccugguggaucugcccaucggcaucaacaucacccgguuucagacacugcuggcccugcacagaagcuaccugacaccuggcgauagcagcagcggauggacagcuggugccgccgcuuacuaugugggcuaccugcagccuagaaccuuccugcugaaguacaacgagaacggcaccaucaccgacgccguggauugugcucuggauccucugagcgagacaaagugcacccugaaguccuucaccguggaaaagggcaucuaccagaccagcaacuuccgggugcagcccaccgaauccaucgugcgguuccccaauaucaccaaucugugccccuucggcgagguguucaaugccaccagauucgccucuguguacgccuggaaccggaagcggaucagcaauugcguggccgacuacuccgugcuguacaacuccgccagcuucagcaccuucaagugcuacggcguguccccuaccaagcugaacgaccugugcuucacaaacguguacgccgacagcuucgugauccggggagaugaagugcggcagauugccccuggacagacaggcaccaucgccgacuacaacuacaagcugcccgacgacuucaccggcugugugauugccuggaacagcaacaaccuggacuccaaagucggcggcaacuacaauuaccuguaccggcuguuccggaaguccaaucugaagcccuucgagcgggacaucuccaccgagaucuaucaggccggcagcaccccuuguaacggcgugaagggcuucaacugcuacuucccacugcaguccuacggcuuucagcccacauacggcgugggcuaucagcccuacagagugguggugcugagcuucgaacugcugcaugccccugccacagugugcggcccuaagaaaagcaccaaucucgugaagaacaaaugcgugaacuucaacuucaacggccugaccggcaccggcgugcugacagagagcaacaagaaguuccugccauuccagcaguuuggccgggauaucgccgauaccacagacgccguuagagauccccagacacuggaaauccuggacaucaccccuugcagcuucggcggagugucugugaucaccccuggcaccaacaccagcaaucagguggcagugcuguaccagggcgugaacuguaccgaagugcccguggccauucacgccgaucagcugacaccuacauggcggguguacuccaccggcagcaauguguuucagaccagagccggcugucugaucggagccgaguacgugaacaauagcuacgagugcgacauccccaucggcgcuggaaucugcgccagcuaccagacacagacaaacagcccucggagagccagaagcguggccagccagagcaucauugccuacacaaugucucugggcgccgagaacagcguggccuacuccaacaacucuaucgcuauccccaccaacuucaccaucagcgugaccacagagauccugccuguguccaugaccaagaccagcguggacugcaccauguacaucugcggcgauuccaccgagugcuccaaccugcugcugcaguacggcagcuucugcacccagcugaauagagcccugacagggaucgccguggaacaggacaagaacacccaagagguguucgcccaagugaagcagaucuacaagaccccuccuaucaaggacuucggcggcuucaauuucagccagauucugcccgauccuagcaagcccagcaagcggagcuucaucgaggaccugcuguucaacaaagugacacuggccgacgccggcuucaucaagcaguauggcgauugucugggcgacauugccgccagggaucugauuugcgcccagaaguuuaacggacugacagugcugccuccucugcugaccgaugagaugaucgcccaguacacaucugcccugcuggccggcacaaucacaagcggcuggacauuuggagcaggcgccgcucugcagauccccuuugcuaugcagauggccuaccgguucaacggcaucggagugacccagaaugugcuguacgagaaccagaagcugaucgccaaccaguucaacagcgccaucggcaagauccaggacagccugagcagcacagcaagcgcccugggaaagcugcaggacguggucaaccagaaugcccaggcacugaacacccuggucaagcagcuguccuccaacuucggcgccaucagcucugugcugaacgauauccugagcagacuggacccuccugaggccgaggugcagaucgacagacugaucacaggcagacugcagagccuccagacauacgugacccagcagcugaucagagccgccgagauuagagccucugccaaucuggccgccaucaagaugucugagugugugcugggccagagcaagagaguggacuuuugcggcaagggcuaccaccugaugagcuucccucagucugccccucacggcgugguguuucugcacgugacauaugugcccgcucaagagaagaauuucaccaccgcuccagccaucugccacgacggcaaagcccacuuuccuagagaaggcguguucguguccaacggcacccauugguucgugacacagcggaacuucuacgagccccagaucaucaccaccgacaacaccuucgugucuggcaacugcgacgucgugaucggcauugugaacaauaccguguacgacccucugcagcccgagcuggacagcuucaaagaggaacuggacaaguacuuuaagaaccacacaagccccgacguggaccugggcgauaucagcggaaucaaugccagcgucgugaacauccagaaagagaucgaccggcugaacgagguggccaagaaucugaacgagagccugaucgaccugcaagaacuggggaaguacgagcaguacaucaaguggcccugguacaucuggcugggcuuuaucgccggacugauugccaucgugauggucacaaucaugcuguguugcaugaccagcugcuguagcugccugaagggcuguuguagcuguggcagcugcugcaaguucgacgaggacgauucugagcccgugcugaagggcgugaaacugcacuacacaugaugacucgagcugguacugcaugcacgcaaugcuagcugccccuuucccguccuggguaccccgagucucccccgaccucgggucccagguaugcucccaccuccaccugccccacucaccaccucugcuaguuccagacaccucccaagcacgcagcaaugcagcucaaaacgcuuagccuagccacacccccacgggaaacagcagugauuaaccuuuagcaauaaacgaaaguuuaacuaagcuauacuaaccccaggguuggucaauuucgugccagccacacccuggagcuagcaaaaaaaaaaaaaaaaaaaaaaaaaaaaaaaaaaaaaaaaaaaaaaaaaaaaaaaaaaaaaaaaaaaaaaaaaaaaaaaaaaaaaaaaaaaaaaaaaaaa

SEQ ID NO: 26484 - RNA, 4273 nt, Artificial Sequence
  SARS-CoV-2/Wuhan/WIV05/2019__EPI_ISL_402128 spike protein mRNA gc mod (1-1273)(K986P_V987P_K986P_V987P_S13I_W152C_L452R_D614G)
agaauaaacuaguauucuucugguccccacagacucagagagaacccgccaccauguucguguuccuggugcugcugccucugguguccauccagugugugaaccugaccaccagaacacagcugccuccagccuacaccaacagcuuuaccagaggcguguacuaccccgacaagguguucagauccagcgugcugcacucuacccaggaccuguuccugccuuucuucagcaacgugaccugguuccacgccauccacguguccggcaccaauggcaccaagagauucgacaaccccgugcugcccuucaacgacgggguguacuuugccagcaccgagaaguccaacaucaucagaggcuggaucuucggcaccacacuggacagcaagacccagagccugcugaucgugaacaacgccaccaacguggucaucaaagugugcgaguuccaguucugcaacgaccccuuccugggcgucuacuaccacaagaacaacaagagcugcauggaaagcgaguuccggguguacagcagcgccaacaacugcaccuucgaguacgugucccagccuuuccugauggaccuggaaggcaagcagggcaacuucaagaaccugcgcgaguucguguuuaagaacaucgacggcuacuucaagaucuacagcaagcacaccccuaucaaccucgugcgggaucugccucagggcuucucugcucuggaaccccugguggaucugcccaucggcaucaacaucacccgguuucagacacugcuggcccugcacagaagcuaccugacaccuggcgauagcagcagcggauggacagcuggugccgccgcuuacuaugugggcuaccugcagccuagaaccuuccugcugaaguacaacgagaacggcaccaucaccgacgccguggauugugcucuggauccucugagcgagacaaagugcacccugaaguccuucaccguggaaaagggcaucuaccagaccagcaacuuccgggugcagcccaccgaauccaucgugcgguuccccaauaucaccaaucugugccccuucggcgagguguucaaugccaccagauucgccucuguguacgccuggaaccggaagcggaucagcaauugcguggccgacuacuccgugcuguacaacuccgccagcuucagcaccuucaagugcuacggcguguccccuaccaagcugaacgaccugugcuucacaaacguguacgccgacagcuucgugauccggggagaugaagugcggcagauugccccuggacagacaggcaagaucgccgacuacaacuacaagcugcccgacgacuucaccggcugugugauugccuggaacagcaacaaccuggacuccaaagucggcggcaacuacaauuaccgcuaccggcuguuccggaaguccaaucugaagcccuucgagcgggacaucuccaccgagaucuaucaggccggcagcaccccuuguaacggcguggaaggcuucaacugcuacuucccacugcaguccuacggcuuucagcccacaaauggcgugggcuaucagcccuacagagugguggugcugagcuucgaacugcugcaugccccugccacagugugcggcccuaagaaaagcaccaaucucgugaagaacaaaugcgugaacuucaacuucaacggccugaccggcaccggcgugcugacagagagcaacaagaaguuccugccauuccagcaguuuggccgggauaucgccgauaccacagacgccguuagagauccccagacacuggaaauccuggacaucaccccuugcagcuucggcggagugucugugaucaccccuggcaccaacaccagcaaucagguggcagugcuguaccagggcgugaacuguaccgaagugcccguggccauucacgccgaucagcugacaccuacauggcggguguacuccaccggcagcaauguguuucagaccagagccggcugucugaucggagccgagcacgugaacaauagcuacgagugcgacauccccaucggcgcuggaaucugcgccagcuaccagacacagacaaacagcccucggagagccagaagcguggccagccagagcaucauugccuacacaaugucucugggcgccgagaacagcguggccuacuccaacaacucuaucgcuauccccaccaacuucaccaucagcgugaccacagagauccugccuguguccaugaccaagaccagcguggacugcaccauguacaucugcggcgauuccaccgagugcuccaaccugcugcugcaguacggcagcuucugcacccagcugaauagagcccugacagggaucgccguggaacaggacaagaacacccaagagguguucgcccaagugaagcagaucuacaagaccccuccuaucaaggacuucggcggcuucaauuucagccagauucugcccgauccuagcaagcccagcaagcggagcuucaucgaggaccugcuguucaacaaagugacacuggccgacgccggcuucaucaagcaguauggcgauugucugggcgacauugccgccagggaucugauuugcgcccagaaguuuaacggacugacagugcugccuccucugcugaccgaugagaugaucgcccaguacacaucugcccugcuggccggcacaaucacaagcggcuggacauuuggagcaggcgccgcucugcagauccccuuugcuaugcagauggccuaccgguucaacggcaucggagugacccagaaugugcuguacgagaaccagaagcugaucgccaaccaguucaacagcgccaucggcaagauccaggacagccugagcagcacagcaagcgcccugggaaagcugcaggacguggucaaccagaaugcccaggcacugaacacccuggucaagcagcuguccuccaacuucggcgccaucagcucugugcugaacgauauccugagcagacuggacccuccugaggccgaggugcagaucgacagacugaucacaggcagacugcagagccuccagacauacgugacccagcagcugaucagagccgccgagauuagagccucugccaaucuggccgccaccaagaugucugagugugugcugggccagagcaagagaguggacuuuugcggcaagggcuaccaccugaugagcuucccucagucugccccucacggcgugguguuucugcacgugacauaugugcccgcucaagagaagaauuucaccaccgcuccagccaucugccacgacggcaaagcccacuuuccuagagaaggcguguucguguccaacggcacccauugguucgugacacagcggaacuucuacgagccccagaucaucaccaccgacaacaccuucgugucuggcaacugcgacgucgugaucggcauugugaacaauaccguguacgacccucugcagcccgagcuggacagcuucaaagaggaacuggacaaguacuuuaagaaccacacaagccccgacguggaccugggcgauaucagcggaaucaaugccagcgucgugaacauccagaaagagaucgaccggcugaacgagguggccaagaaucugaacgagagccugaucgaccugcaagaacuggggaaguacgagcaguacaucaaguggcccugguacaucuggcugggcuuuaucgccggacugauugccaucgugauggucacaaucaugcuguguugcaugaccagcugcuguagcugccugaagggcuguuguagcuguggcagcugcugcaaguucgacgaggacgauucugagcccgugcugaagggcgugaaacugcacuacacaugaugacucgagcugguacugcaugcacgcaaugcuagcugccccuuucccguccuggguaccccgagucucccccgaccucgggucccagguaugcucccaccuccaccugccccacucaccaccucugcuaguuccagacaccucccaagcacgcagcaaugcagcucaaaacgcuuagccuagccacacccccacgggaaacagcagugauuaaccuuuagcaauaaacgaaaguuuaacuaagcuauacuaaccccaggguuggucaauuucgugccagccacacccuggagcuagcaaaaaaaaaaaaaaaaaaaaaaaaaaaaaaaaaaaaaaaaaaaaaaaaaaaaaaaaaaaaaaaaaaaaaaaaaaaaaaaaaaaaaaaaaaaaaaaaaaaa

SEQ ID NO: 26485 - RNA, 1430 nt, Artificial Sequence
  SARS-CoV-2/Wuhan/WIV05/2019__EPI_ISL_402128 spike protein mRNA gc (1-15,334-528) Ferritin construct
gggaaauaagagagaaaagaagaguaagaagaaauauaagaccccggcgccgccaccauguucguguuccugguccuccugccccuggugagcucccagugcaaccugugccccuucggcgagguguucaacgccacccgguucgccagcgucuacgccuggaaccgcaagcggaucuccaacugcguggcggacuacagcgugcuguacaacuccgccagcuucuccacguucaagugcuacggcgucagccccaccaagcucaacgaccugugcuucaccaacguguacgccgacuccuucgugauccgcggggacgagguccggcagaucgcccccggccagaccgggaagaucgccgacuacaacuacaagcugccggacgacuucacgggcugcgugaucgcguggaacagcaacaaccucgacuccaaggucgggggcaacuacaacuaccuguaccgccuguuccgcaagagcaaccucaagcccuucgagcgggacaucuccaccgagaucuaccaggccggcagcacccccugcaacgggguggagggcuucaacugcuacuucccccugcaguccuacggguuccagccgaccaacggcgugggguaccagcccuaccggguggucgugcugagcuucgagcuccugcacgcccccgccacggugugcggccccaagggcggggguggaagcggcggggguggaagugacaucaucaagcuccugaacgagcaggucaacaaggagaugcaguccagcaaccuguacauguccaugagcuccuggugcuacacccacagccucgacggcgccgggcuguuccuguucgaccacgccgcggaggaguacgagcacgccaagaagcucaucaucuuccugaacgagaacaacgugcccgugcagcugaccuccaucagcgccccggagcacaaguucgagggccucacgcagaucuuccagaaggccuacgagcacgagcagcacaucuccgagagcaucaacaacaucguggaccacgccaucaaguccaaggaccacgcgaccuucaacuuccugcagugguacgucgccgagcagcacgaggaggaggugcuguucaaggacauccucgacaagaucgagcugaucgggaacgagaaccacggccuguaccucgccgaccaguacgugaaggggaucgccaagagccgcaaguccugauaauaggcuggagccucgguggccuagcuucuugccccuugggccuccccccagccccuccuccccuuccugcacccguacccccguggucuuugaauaaagucugagugggcggcaaaaaaaaaaaaaaaaaaaaaaaaaaaaaaaaaaaaaaaaaaaaaaaaaaaaaaaaaaaaaaaaaaaaaaaaaaaaaaaaaaaaaaaaaaaaaaaaaaaaucuag

SEQ ID NO: 26486 - RNA, 1028 nt, Artificial Sequence
  SARS-CoV-2/Wuhan/WIV05/2019__EPI_ISL_402128 spike protein mRNA gc (334-528) Foldon construct
gggaaauaagagagaaaagaagaguaagaagaaauauaagaccccggcgccgccaccaugcccaugggcagccugcagccgcucgccacccuguaccugcucgggaugcugguggccuccguccuggcgaaccugugccccuucggcgagguguucaacgccacccgguucgccagcgucuacgccuggaaccgcaagcggaucuccaacugcguggcggacuacagcgugcuguacaacuccgccagcuucuccacguucaagugcuacggcgucagccccaccaagcucaacgaccugugcuucaccaacguguacgccgacuccuucgugauccgcggggacgagguccggcagaucgcccccggccagaccgggaagaucgccgacuacaacuacaagcugccggacgacuucacgggcugcgugaucgcguggaacagcaacaaccucgacuccaaggucgggggcaacuacaacuaccuguaccgccuguuccgcaagagcaaccucaagcccuucgagcgggacaucuccaccgagaucuaccaggccggcagcacccccugcaacgggguggagggcuucaacugcuacuucccccugcaguccuacggguuccagccgaccaacggcgugggguaccagcccuaccggguggucgugcugagcuucgagcuccugcacgcccccgccacggugugcggccccaagggcagcggcggguacauccccgaggccccgcgcgacggccaggccuacgugcggaaggacggcgaguggguccugcugagcaccuuccucugauaauaggcuggagccucgguggccuagcuucuugccccuugggccuccccccagccccuccuccccuuccugcacccguacccccguggucuuugaauaaagucugagugggcggcaaaaaaaaaaaaaaaaaaaaaaaaaaaaaaaaaaaaaaaaaaaaaaaaaaaaaaaaaaaaaaaaaaaaaaaaaaaaaaaaaaaaaaaaaaaaaaaaaaaaucuag

SEQ ID NO: 26487 - RNA, 1406 nt, Artificial Sequence
  SARS-CoV-2/Wuhan/WIV05/2019__EPI_ISL_402128 spike protein mRNA gc (1-15,334-528) LumSynth construct
gggaaauaagagagaaaagaagaguaagaagaaauauaagaccccggcgccgccaccauguucguguuccugguccuccugccccuggugagcucccagugcaaccugugccccuucggcgagguguucaacgccacccgguucgccagcgucuacgccuggaaccgcaagcggaucuccaacugcguggcggacuacagcgugcuguacaacuccgccagcuucuccacguucaagugcuacggcgucagccccaccaagcucaacgaccugugcuucaccaacguguacgccgacuccuucgugauccgcggggacgagguccggcagaucgcccccggccagaccgggaagaucgccgacuacaacuacaagcugccggacgacuucacgggcugcgugaucgcguggaacagcaacaaccucgacuccaaggucgggggcaacuacaacuaccuguaccgccuguuccgcaagagcaaccucaagcccuucgagcgggacaucuccaccgagaucuaccaggccggcagcacccccugcaacgggguggagggcuucaacugcuacuucccccugcaguccuacggguuccagccgaccaacggcgugggguaccagcccuaccggguggucgugcugagcuucgagcuccugcacgcccccgccacggugugcggccccaagggcggcggcggcuccggaggcggagguagcgggggacagaucuacgagggcaagcugaccgccgaggggcuccgcuucggcaucguggccagccgguucaaccacgcgcuggucgaccgccugguggagggggccaucgacgccaucgugcggcacggcgggcgcgaggaggacaucacccucguccgggugcccggcuccugggagaucccgguggccgccggcgagcuggcccgcaaggaggacaucgacgcggucaucgccaucggggugcugauccggggcgccacgccccacuucgacuacaucgccagcgagguguccaaggggcucgcggaccugagccuggagcuccgcaagcccaucaccuucggcgucaucaccgccgacacccuggagcaggccaucgagcgggccgggacgaagcacggcaacaagggcugggaggccgcgcuguccgccaucgagauggccaaccucuucaagagccugcgcugauaauaggcuggagccucgguggccuagcuucuugccccuugggccuccccccagccccuccuccccuuccugcacccguacccccguggucuuugaauaaagucugagugggcggcaaaaaaaaaaaaaaaaaaaaaaaaaaaaaaaaaaaaaaaaaaaaaaaaaaaaaaaaaaaaaaaaaaaaaaaaaaaaaaaaaaaaaaaaaaaaaaaaaaaaucuag

SEQ ID NO: 26488 - RNA, 1367 nt, Artificial Sequence
  SARS-CoV-2/Wuhan/WIV05/2019__EPI_ISL_402128 spike protein mRNA gc (334-528) LumSynth construct
gggaaauaagagagaaaagaagaguaagaagaaauauaagaccccggcgccgccaccaugcagaucuacgagggcaagcugaccgccgaggggcuccgcuucggcaucguggccagccgguucaaccacgcgcuggucgaccgccugguggagggggccaucgacgccaucgugcggcacggcgggcgcgaggaggacaucacccucguccgggugcccggcuccugggagaucccgguggccgccggcgagcuggcccgcaaggaggacaucgacgcggucaucgccaucggggugcugauccggggcgccacgccccacuucgacuacaucgccagcgagguguccaaggggcucgcggaccugagccuggagcuccgcaagcccaucaccuucggcgucaucaccgccgacacccuggagcaggccaucgagcgggccgggacgaagcacggcaacaagggcugggaggccgcgcuguccgccaucgagauggccaaccucuucaagagccugcgcggcgggggcgggagcggcgggggcggcuccgggggcgggaaccugugccccuucggcgagguguucaacgccacccgguucgccagcgucuacgccuggaaccgcaagcggaucuccaacugcguggcggacuacagcgugcuguacaacuccgccagcuucuccacguucaagugcuacggcgucagccccaccaagcucaacgaccugugcuucaccaacguguacgccgacuccuucgugauccgcggggacgagguccggcagaucgcccccggccagaccgggaagaucgccgacuacaacuacaagcugccggacgacuucacgggcugcgugaucgcguggaacagcaacaaccucgacuccaaggucgggggcaacuacaacuaccuguaccgccuguuccgcaagagcaaccucaagcccuucgagcgggacaucuccaccgagaucuaccaggccggcagcacccccugcaacgggguggagggcuucaacugcuacuucccccugcaguccuacggguuccagccgaccaacggcgugggguaccagcccuaccggguggucgugcugagcuucgagcuccugcacgcccccgccacggugugcggccccaagugauaauaggcuggagccucgguggccuagcuucuugccccuugggccuccccccagccccuccuccccuuccugcacccguacccccguggucuuugaauaaagucugagugggcggcaaaaaaaaaaaaaaaaaaaaaaaaaaaaaaaaaaaaaaaaaaaaaaaaaaaaaaaaaaaaaaaaaaaaaaaaaaaaaaaaaaaaaaaaaaaaaaaaaaaaucuag

SEQ ID NO: 26489 - RNA, 4100 nt, Artificial Sequence
  SARS-CoV-2/Wuhan/WIV05/2019__EPI_ISL_402128 spike protein mRNA gc (1-1273)
gggaaauaagagagaaaagaagaguaagaagaaauauaagaccccggcgccgccaccauguucguguuccugguccuccugccccuggugagcucccagugcgugaaccucaccacccgcacgcagcugccgcccgccuacaccaacagcuucacccggggcgucuacuaccccgacaagguguuccgcuccagcgugcugcacuccacccaggaccucuuccugcccuucuucagcaacgucacgugguuccacgccauccacguguccgggaccaacggcaccaagcgguucgacaacccggugcugcccuucaacgacggggucuacuucgcgagcaccgagaaguccaacaucauccgcggcuggaucuucgggacgacccucgacagcaagacccagucccugcugaucgugaacaacgccaccaacguggucaucaaggugugcgaguuccaguucugcaacgaccccuuccucggcguguacuaccacaagaacaacaagagcuggauggaguccgaguuccgggucuacagcuccgccaacaacugcacguucgaguacgugagccagcccuuccugauggaccuggagggcaagcaggggaacuucaagaaccuccgcgaguucguguucaagaacaucgacggcuacuucaagaucuacuccaagcacaccccgaucaaccugguccgggaccugccccagggguucagcgcccucgagccccugguggaccugcccaucggcaucaacaucacccgcuuccagacccuccuggcccugcaccgguccuaccucacgccgggggacagcagcuccggcuggaccgcgggcgccgccgccuacuacgugggguaccugcagccccgcaccuuccugcucaaguacaacgagaacggcaccaucacggacgcggucgacugcgcccuggacccccugagcgagaccaagugcacccucaaguccuucaccguggagaaggggaucuaccagacgagcaacuuccgggugcagcccaccgaguccaucguccgcuucccgaacaucaccaaccugugccccuucggcgagguguucaacgccacccgguucgccagcgucuacgccuggaaccgcaagcggaucuccaacugcguggcggacuacagcgugcuguacaacuccgccagcuucuccacguucaagugcuacggcgucagccccaccaagcucaacgaccugugcuucaccaacguguacgccgacuccuucgugauccgcggggacgagguccggcagaucgcccccggccagaccgggaagaucgccgacuacaacuacaagcugccggacgacuucacgggcugcgugaucgcguggaacagcaacaaccucgacuccaaggucgggggcaacuacaacuaccuguaccgccuguuccgcaagagcaaccucaagcccuucgagcgggacaucuccaccgagaucuaccaggccggcagcacccccugcaacgggguggagggcuucaacugcuacuucccccugcaguccuacggguuccagccgaccaacggcgugggguaccagcccuaccggguggucgugcugagcuucgagcuccugcacgcccccgccacggugugcggccccaagaaguccaccaaccuggucaagaacaagugcgugaacuucaacuucaacggccucaccgggaccggcgugcugaccgagagcaacaagaaguuccugccguuccagcaguucgggcgcgacaucgccgacacgaccgacgcgguccgcgacccccagacccuggagauccucgacaucacccccugcagcuucggcgggguguccgugaucacgccgggcaccaacaccagcaaccaggucgccgugcuguaccaggacgugaacugcaccgagguccccguggccauccacgccgaccagcugacgcccaccuggcggguguacuccaccggcagcaacgucuuccagacccgcgccgggugccucaucggcgcggagcacgugaacaacuccuacgagugcgacauccccaucggggccggcaucugcgccagcuaccagacgcagaccaacuccccgcggcgcgcccggagcguggcgucccagagcaucaucgccuacaccaugucccugggcgccgagaacagcgucgccuacuccaacaacagcaucgccauccccaccaacuucacgaucuccgugaccaccgagauccugcccgugagcaugaccaagacgagcgucgacugcaccauguacaucugcggggacuccaccgagugcagcaaccuccugcugcaguacggcuccuucugcacccagcucaaccgcgcgcugacggggaucgccguggagcaggacaagaacacccaggagguguucgcccaggucaagcagaucuacaagacgcccccgaucaaggacuucggcggguucaacuucagccagauccugcccgaccccuccaagcccagcaagcgguccuucaucgaggaccuccuguucaacaaggugacccuggccgacgccggcuucaucaagcaguacggcgacugccucggggacaucgcggcccgcgaccugaucugcgcccagaaguucaacggccugaccgugcucccgccccugcugaccgacgagaugaucgcccaguacaccagcgcccuccuggcggggaccaucacguccggcuggaccuucggggccggcgccgcccugcagauccccuucgcgaugcagauggccuaccgguucaacggcaucggggucacccagaacgugcucuacgagaaccagaagcugaucgccaaccaguucaacagcgccaucggcaagauccaggacucccugagcuccaccgccagcgcgcucgggaagcugcaggacguggucaaccagaacgcccaggcccugaacacgcucgugaagcagcuguccagcaacuucggcgccaucuccagcgugcugaacgacauccucucccgccuggacaaggucgaggccgaggugcagaucgaccggcugaucaccgggcgccuccagagccugcagaccuacgugacccagcagcugauccgggcggccgagauccgcgccagcgccaaccucgccgcgaccaagauguccgagugcguccugggccagagcaagcggguggacuucugcggcaagggguaccaccugauguccuucccccagagcgccccgcacggcguggucuuccuccacgugacguacguccccgcccaggagaagaacuucaccaccgcccccgcgaucugccacgacgggaaggcccacuucccccgcgagggcguguucguguccaacgggacccacugguucgucacgcagcggaacuucuacgagccgcagaucaucaccaccgacaacaccuucgugagcggcaacugcgacguggucaucggcaucgugaacaacacgguguacgacccccugcagcccgagcuggacuccuucaaggaggagcucgacaaguacuucaagaaccacaccagccccgacgucgaccugggggacaucuccggcaucaacgccagcguggugaacauccagaaggagaucgaccgccugaacgaggucgccaagaaccucaacgagucccugaucgaccugcaggagcucgggaaguacgagcaguacaucaaguggccgugguacaucuggcugggcuucaucgccggccugaucgcgaucgugauggugaccaucaugcucugcugcaugaccagcugcugcuccugccugaaggggugcugcagcugcggcuccugcugcaaguucgacgaggacgacagcgagcccguccugaagggggugaagcuccacuacacgugauaauaggcuggagccucgguggccuagcuucuugccccuugggccuccccccagccccuccuccccuuccugcacccguacccccguggucuuugaauaaagucugagugggcggcaaaaaaaaaaaaaaaaaaaaaaaaaaaaaaaaaaaaaaaaaaaaaaaaaaaaaaaaaaaaaaaaaaaaaaaaaaaaaaaaaaaaaaaaaaaaaaaaaaaaucuag

SEQ ID NO: 26490 - RNA, 4100 nt, Artificial Sequence
  SARS-CoV-2/Wuhan/WIV05/2019__EPI_ISL_402128 spike protein mRNA gc (1-1273)(D614G)
gggaaauaagagagaaaagaagaguaagaagaaauauaagaccccggcgccgccaccauguucguguuccugguccuccugccccuggugagcucccagugcgugaaccucaccacccgcacgcagcugccgcccgccuacaccaacagcuucacccggggcgucuacuaccccgacaagguguuccgcuccagcgugcugcacuccacccaggaccucuuccugcccuucuucagcaacgucacgugguuccacgccauccacguguccgggaccaacggcaccaagcgguucgacaacccggugcugcccuucaacgacggggucuacuucgcgagcaccgagaaguccaacaucauccgcggcuggaucuucgggacgacccucgacagcaagacccagucccugcugaucgugaacaacgccaccaacguggucaucaaggugugcgaguuccaguucugcaacgaccccuuccucggcguguacuaccacaagaacaacaagagcuggauggaguccgaguuccgggucuacagcuccgccaacaacugcacguucgaguacgugagccagcccuuccugauggaccuggagggcaagcaggggaacuucaagaaccuccgcgaguucguguucaagaacaucgacggcuacuucaagaucuacuccaagcacaccccgaucaaccugguccgggaccugccccagggguucagcgcccucgagccccugguggaccugcccaucggcaucaacaucacccgcuuccagacccuccuggcccugcaccgguccuaccucacgccgggggacagcagcuccggcuggaccgcgggcgccgccgccuacuacgugggguaccugcagccccgcaccuuccugcucaaguacaacgagaacggcaccaucacggacgcggucgacugcgcccuggacccccugagcgagaccaagugcacccucaaguccuucaccguggagaaggggaucuaccagacgagcaacuuccgggugcagcccaccgaguccaucguccgcuucccgaacaucaccaaccugugccccuucggcgagguguucaacgccacccgguucgccagcgucuacgccuggaaccgcaagcggaucuccaacugcguggcggacuacagcgugcuguacaacuccgccagcuucuccacguucaagugcuacggcgucagccccaccaagcucaacgaccugugcuucaccaacguguacgccgacuccuucgugauccgcggggacgagguccggcagaucgcccccggccagaccgggaagaucgccgacuacaacuacaagcugccggacgacuucacgggcugcgugaucgcguggaacagcaacaaccucgacuccaaggucgggggcaacuacaacuaccuguaccgccuguuccgcaagagcaaccucaagcccuucgagcgggacaucuccaccgagaucuaccaggccggcagcacccccugcaacgggguggagggcuucaacugcuacuucccccugcaguccuacggguuccagccgaccaacggcgugggguaccagcccuaccggguggucgugcugagcuucgagcuccugcacgcccccgccacggugugcggccccaagaaguccaccaaccuggucaagaacaagugcgugaacuucaacuucaacggccucaccgggaccggcgugcugaccgagagcaacaagaaguuccugccguuccagcaguucgggcgcgacaucgccgacacgaccgacgcgguccgcgacccccagacccuggagauccucgacaucacccccugcagcuucggcgggguguccgugaucacgccgggcaccaacaccagcaaccaggucgccgugcuguaccagggcgugaacugcaccgagguccccguggccauccacgccgaccagcugacgcccaccuggcggguguacuccaccggcagcaacgucuuccagacccgcgccgggugccucaucggcgcggagcacgugaacaacuccuacgagugcgacauccccaucggggccggcaucugcgccagcuaccagacgcagaccaacuccccgcggcgcgcccggagcguggcgucccagagcaucaucgccuacaccaugucccugggcgccgagaacagcgucgccuacuccaacaacagcaucgccauccccaccaacuucacgaucuccgugaccaccgagauccugcccgugagcaugaccaagacgagcgucgacugcaccauguacaucugcggggacuccaccgagugcagcaaccuccugcugcaguacggcuccuucugcacccagcucaaccgcgcgcugacggggaucgccguggagcaggacaagaacacccaggagguguucgcccaggucaagcagaucuacaagacgcccccgaucaaggacuucggcggguucaacuucagccagauccugcccgaccccuccaagcccagcaagcgguccuucaucgaggaccuccuguucaacaaggugacccuggccgacgccggcuucaucaagcaguacggcgacugccucggggacaucgcggcccgcgaccugaucugcgcccagaaguucaacggccugaccgugcucccgccccugcugaccgacgagaugaucgcccaguacaccagcgcccuccuggcggggaccaucacguccggcuggaccuucggggccggcgccgcccugcagauccccuucgcgaugcagauggccuaccgguucaacggcaucggggucacccagaacgugcucuacgagaaccagaagcugaucgccaaccaguucaacagcgccaucggcaagauccaggacucccugagcuccaccgccagcgcgcucgggaagcugcaggacguggucaaccagaacgcccaggcccugaacacgcucgugaagcagcuguccagcaacuucggcgccaucuccagcgugcugaacgacauccucucccgccuggacaaggucgaggccgaggugcagaucgaccggcugaucaccgggcgccuccagagccugcagaccuacgugacccagcagcugauccgggcggccgagauccgcgccagcgccaaccucgccgcgaccaagauguccgagugcguccugggccagagcaagcggguggacuucugcggcaagggguaccaccugauguccuucccccagagcgccccgcacggcguggucuuccuccacgugacguacguccccgcccaggagaagaacuucaccaccgcccccgcgaucugccacgacgggaaggcccacuucccccgcgagggcguguucguguccaacgggacccacugguucgucacgcagcggaacuucuacgagccgcagaucaucaccaccgacaacaccuucgugagcggcaacugcgacguggucaucggcaucgugaacaacacgguguacgacccccugcagcccgagcuggacuccuucaaggaggagcucgacaaguacuucaagaaccacaccagccccgacgucgaccugggggacaucuccggcaucaacgccagcguggugaacauccagaaggagaucgaccgccugaacgaggucgccaagaaccucaacgagucccugaucgaccugcaggagcucgggaaguacgagcaguacaucaaguggccgugguacaucuggcugggcuucaucgccggccugaucgcgaucgugauggugaccaucaugcucugcugcaugaccagcugcugcuccugccugaaggggugcugcagcugcggcuccugcugcaaguucgacgaggacgacagcgagcccguccugaagggggugaagcuccacuacacgugauaauaggcuggagccucgguggccuagcuucuugccccuugggccuccccccagccccuccuccccuuccugcacccguacccccguggucuuugaauaaagucugagugggcggcaaaaaaaaaaaaaaaaaaaaaaaaaaaaaaaaaaaaaaaaaaaaaaaaaaaaaaaaaaaaaaaaaaaaaaaaaaaaaaaaaaaaaaaaaaaaaaaaaaaaucuag

SEQ ID NO: 26491 - RNA, 4100 nt, Artificial Sequence
  SARS-CoV-2/Wuhan/WIV05/2019__EPI_ISL_402128 spike protein mRNA gc (1-1273)(A222V_D614G)
gggaaauaagagagaaaagaagaguaagaagaaauauaagaccccggcgccgccaccauguucguguuccugguccuccugccccuggugagcucccagugcgugaaccucaccacccgcacgcagcugccgcccgccuacaccaacagcuucacccggggcgucuacuaccccgacaagguguuccgcuccagcgugcugcacuccacccaggaccucuuccugcccuucuucagcaacgucacgugguuccacgccauccacguguccgggaccaacggcaccaagcgguucgacaacccggugcugcccuucaacgacggggucuacuucgcgagcaccgagaaguccaacaucauccgcggcuggaucuucgggacgacccucgacagcaagacccagucccugcugaucgugaacaacgccaccaacguggucaucaaggugugcgaguuccaguucugcaacgaccccuuccucggcguguacuaccacaagaacaacaagagcuggauggaguccgaguuccgggucuacagcuccgccaacaacugcacguucgaguacgugagccagcccuuccugauggaccuggagggcaagcaggggaacuucaagaaccuccgcgaguucguguucaagaacaucgacggcuacuucaagaucuacuccaagcacaccccgaucaaccugguccgggaccugccccagggguucagcguccucgagccccugguggaccugcccaucggcaucaacaucacccgcuuccagacccuccuggcccugcaccgguccuaccucacgccgggggacagcagcuccggcuggaccgcgggcgccgccgccuacuacgugggguaccugcagccccgcaccuuccugcucaaguacaacgagaacggcaccaucacggacgcggucgacugcgcccuggacccccugagcgagaccaagugcacccucaaguccuucaccguggagaaggggaucuaccagacgagcaacuuccgggugcagcccaccgaguccaucguccgcuucccgaacaucaccaaccugugccccuucggcgagguguucaacgccacccgguucgccagcgucuacgccuggaaccgcaagcggaucuccaacugcguggcggacuacagcgugcuguacaacuccgccagcuucuccacguucaagugcuacggcgucagccccaccaagcucaacgaccugugcuucaccaacguguacgccgacuccuucgugauccgcggggacgagguccggcagaucgcccccggccagaccgggaagaucgccgacuacaacuacaagcugccggacgacuucacgggcugcgugaucgcguggaacagcaacaaccucgacuccaaggucgggggcaacuacaacuaccuguaccgccuguuccgcaagagcaaccucaagcccuucgagcgggacaucuccaccgagaucuaccaggccggcagcacccccugcaacgggguggagggcuucaacugcuacuucccccugcaguccuacggguuccagccgaccaacggcgugggguaccagcccuaccggguggucgugcugagcuucgagcuccugcacgcccccgccacggugugcggccccaagaaguccaccaaccuggucaagaacaagugcgugaacuucaacuucaacggccucaccgggaccggcgugcugaccgagagcaacaagaaguuccugccguuccagcaguucgggcgcgacaucgccgacacgaccgacgcgguccgcgacccccagacccuggagauccucgacaucacccccugcagcuucggcgggguguccgugaucacgccgggcaccaacaccagcaaccaggucgccgugcuguaccagggcgugaacugcaccgagguccccguggccauccacgccgaccagcugacgcccaccuggcggguguacuccaccggcagcaacgucuuccagacccgcgccgggugccucaucggcgcggagcacgugaacaacuccuacgagugcgacauccccaucggggccggcaucugcgccagcuaccagacgcagaccaacuccccgcggcgcgcccggagcguggcgucccagagcaucaucgccuacaccaugucccugggcgccgagaacagcgucgccuacuccaacaacagcaucgccauccccaccaacuucacgaucuccgugaccaccgagauccugcccgugagcaugaccaagacgagcgucgacugcaccauguacaucugcggggacuccaccgagugcagcaaccuccugcugcaguacggcuccuucugcacccagcucaaccgcgcgcugacggggaucgccguggagcaggacaagaacacccaggagguguucgcccaggucaagcagaucuacaagacgcccccgaucaaggacuucggcggguucaacuucagccagauccugcccgaccccuccaagcccagcaagcgguccuucaucgaggaccuccuguucaacaaggugacccuggccgacgccggcuucaucaagcaguacggcgacugccucggggacaucgcggcccgcgaccugaucugcgcccagaaguucaacggccugaccgugcucccgccccugcugaccgacgagaugaucgcccaguacaccagcgcccuccuggcggggaccaucacguccggcuggaccuucggggccggcgccgcccugcagauccccuucgcgaugcagauggccuaccgguucaacggcaucggggucacccagaacgugcucuacgagaaccagaagcugaucgccaaccaguucaacagcgccaucggcaagauccaggacucccugagcuccaccgccagcgcgcucgggaagcugcaggacguggucaaccagaacgcccaggcccugaacacgcucgugaagcagcuguccagcaacuucggcgccaucuccagcgugcugaacgacauccucucccgccuggacaaggucgaggccgaggugcagaucgaccggcugaucaccgggcgccuccagagccugcagaccuacgugacccagcagcugauccgggcggccgagauccgcgccagcgccaaccucgccgcgaccaagauguccgagugcguccugggccagagcaagcggguggacuucugcggcaagggguaccaccugauguccuucccccagagcgccccgcacggcguggucuuccuccacgugacguacguccccgcccaggagaagaacuucaccaccgcccccgcgaucugccacgacgggaaggcccacuucccccgcgagggcguguucguguccaacgggacccacugguucgucacgcagcggaacuucuacgagccgcagaucaucaccaccgacaacaccuucgugagcggcaacugcgacguggucaucggcaucgugaacaacacgguguacgacccccugcagcccgagcuggacuccuucaaggaggagcucgacaaguacuucaagaaccacaccagccccgacgucgaccugggggacaucuccggcaucaacgccagcguggugaacauccagaaggagaucgaccgccugaacgaggucgccaagaaccucaacgagucccugaucgaccugcaggagcucgggaaguacgagcaguacaucaaguggccgugguacaucuggcugggcuucaucgccggccugaucgcgaucgugauggugaccaucaugcucugcugcaugaccagcugcugcuccugccugaaggggugcugcagcugcggcuccugcugcaaguucgacgaggacgacagcgagcccguccugaagggggugaagcuccacuacacgugauaauaggcuggagccucgguggccuagcuucuugccccuugggccuccccccagccccuccuccccuuccugcacccguacccccguggucuuugaauaaagucugagugggcggcaaaaaaaaaaaaaaaaaaaaaaaaaaaaaaaaaaaaaaaaaaaaaaaaaaaaaaaaaaaaaaaaaaaaaaaaaaaaaaaaaaaaaaaaaaaaaaaaaaaaucuag

SEQ ID NO: 26492 - RNA, 4100 nt, Artificial Sequence
  SARS-CoV-2/Wuhan/WIV05/2019__EPI_ISL_402128 spike protein mRNA gc (1-1273)(N439K_D614G)
gggaaauaagagagaaaagaagaguaagaagaaauauaagaccccggcgccgccaccauguucguguuccugguccuccugccccuggugagcucccagugcgugaaccucaccacccgcacgcagcugccgcccgccuacaccaacagcuucacccggggcgucuacuaccccgacaagguguuccgcuccagcgugcugcacuccacccaggaccucuuccugcccuucuucagcaacgucacgugguuccacgccauccacguguccgggaccaacggcaccaagcgguucgacaacccggugcugcccuucaacgacggggucuacuucgcgagcaccgagaaguccaacaucauccgcggcuggaucuucgggacgacccucgacagcaagacccagucccugcugaucgugaacaacgccaccaacguggucaucaaggugugcgaguuccaguucugcaacgaccccuuccucggcguguacuaccacaagaacaacaagagcuggauggaguccgaguuccgggucuacagcuccgccaacaacugcacguucgaguacgugagccagcccuuccugauggaccuggagggcaagcaggggaacuucaagaaccuccgcgaguucguguucaagaacaucgacggcuacuucaagaucuacuccaagcacaccccgaucaaccugguccgggaccugccccagggguucagcgcccucgagccccugguggaccugcccaucggcaucaacaucacccgcuuccagacccuccuggcccugcaccgguccuaccucacgccgggggacagcagcuccggcuggaccgcgggcgccgccgccuacuacgugggguaccugcagccccgcaccuuccugcucaaguacaacgagaacggcaccaucacggacgcggucgacugcgcccuggacccccugagcgagaccaagugcacccucaaguccuucaccguggagaaggggaucuaccagacgagcaacuuccgggugcagcccaccgaguccaucguccgcuucccgaacaucaccaaccugugccccuucggcgagguguucaacgccacccgguucgccagcgucuacgccuggaaccgcaagcggaucuccaacugcguggcggacuacagcgugcuguacaacuccgccagcuucuccacguucaagugcuacggcgucagccccaccaagcucaacgaccugugcuucaccaacguguacgccgacuccuucgugauccgcggggacgagguccggcagaucgcccccggccagaccgggaagaucgccgacuacaacuacaagcugccggacgacuucacgggcugcgugaucgcguggaacagcaagaaccucgacuccaaggucgggggcaacuacaacuaccuguaccgccuguuccgcaagagcaaccucaagcccuucgagcgggacaucuccaccgagaucuaccaggccggcagcacccccugcaacgggguggagggcuucaacugcuacuucccccugcaguccuacggguuccagccgaccaacggcgugggguaccagcccuaccggguggucgugcugagcuucgagcuccugcacgcccccgccacggugugcggccccaagaaguccaccaaccuggucaagaacaagugcgugaacuucaacuucaacggccucaccgggaccggcgugcugaccgagagcaacaagaaguuccugccguuccagcaguucgggcgcgacaucgccgacacgaccgacgcgguccgcgacccccagacccuggagauccucgacaucacccccugcagcuucggcgggguguccgugaucacgccgggcaccaacaccagcaaccaggucgccgugcuguaccagggcgugaacugcaccgagguccccguggccauccacgccgaccagcugacgcccaccuggcggguguacuccaccggcagcaacgucuuccagacccgcgccgggugccucaucggcgcggagcacgugaacaacuccuacgagugcgacauccccaucggggccggcaucugcgccagcuaccagacgcagaccaacuccccgcggcgcgcccggagcguggcgucccagagcaucaucgccuacaccaugucccugggcgccgagaacagcgucgccuacuccaacaacagcaucgccauccccaccaacuucacgaucuccgugaccaccgagauccugcccgugagcaugaccaagacgagcgucgacugcaccauguacaucugcggggacuccaccgagugcagcaaccuccugcugcaguacggcuccuucugcacccagcucaaccgcgcgcugacggggaucgccguggagcaggacaagaacacccaggagguguucgcccaggucaagcagaucuacaagacgcccccgaucaaggacuucggcggguucaacuucagccagauccugcccgaccccuccaagcccagcaagcgguccuucaucgaggaccuccuguucaacaaggugacccuggccgacgccggcuucaucaagcaguacggcgacugccucggggacaucgcggcccgcgaccugaucugcgcccagaaguucaacggccugaccgugcucccgccccugcugaccgacgagaugaucgcccaguacaccagcgcccuccuggcggggaccaucacguccggcuggaccuucggggccggcgccgcccugcagauccccuucgcgaugcagauggccuaccgguucaacggcaucggggucacccagaacgugcucuacgagaaccagaagcugaucgccaaccaguucaacagcgccaucggcaagauccaggacucccugagcuccaccgccagcgcgcucgggaagcugcaggacguggucaaccagaacgcccaggcccugaacacgcucgugaagcagcuguccagcaacuucggcgccaucuccagcgugcugaacgacauccucucccgccuggacaaggucgaggccgaggugcagaucgaccggcugaucaccgggcgccuccagagccugcagaccuacgugacccagcagcugauccgggcggccgagauccgcgccagcgccaaccucgccgcgaccaagauguccgagugcguccugggccagagcaagcggguggacuucugcggcaagggguaccaccugauguccuucccccagagcgccccgcacggcguggucuuccuccacgugacguacguccccgcccaggagaagaacuucaccaccgcccccgcgaucugccacgacgggaaggcccacuucccccgcgagggcguguucguguccaacgggacccacugguucgucacgcagcggaacuucuacgagccgcagaucaucaccaccgacaacaccuucgugagcggcaacugcgacguggucaucggcaucgugaacaacacgguguacgacccccugcagcccgagcuggacuccuucaaggaggagcucgacaaguacuucaagaaccacaccagccccgacgucgaccugggggacaucuccggcaucaacgccagcguggugaacauccagaaggagaucgaccgccugaacgaggucgccaagaaccucaacgagucccugaucgaccugcaggagcucgggaaguacgagcaguacaucaaguggccgugguacaucuggcugggcuucaucgccggccugaucgcgaucgugauggugaccaucaugcucugcugcaugaccagcugcugcuccugccugaaggggugcugcagcugcggcuccugcugcaaguucgacgaggacgacagcgagcccguccugaagggggugaagcuccacuacacgugauaauaggcuggagccucgguggccuagcuucuugccccuugggccuccccccagccccuccuccccuuccugcacccguacccccguggucuuugaauaaagucugagugggcggcaaaaaaaaaaaaaaaaaaaaaaaaaaaaaaaaaaaaaaaaaaaaaaaaaaaaaaaaaaaaaaaaaaaaaaaaaaaaaaaaaaaaaaaaaaaaaaaaaaaaucuag

SEQ ID NO: 26493 - RNA, 4100 nt, Artificial Sequence
  SARS-CoV-2/Wuhan/WIV05/2019__EPI_ISL_402128 spike protein mRNA gc (1-1273)(S477N_D614G)
gggaaauaagagagaaaagaagaguaagaagaaauauaagaccccggcgccgccaccauguucguguuccugguccuccugccccuggugagcucccagugcgugaaccucaccacccgcacgcagcugccgcccgccuacaccaacagcuucacccggggcgucuacuaccccgacaagguguuccgcuccagcgugcugcacuccacccaggaccucuuccugcccuucuucagcaacgucacgugguuccacgccauccacguguccgggaccaacggcaccaagcgguucgacaacccggugcugcccuucaacgacggggucuacuucgcgagcaccgagaaguccaacaucauccgcggcuggaucuucgggacgacccucgacagcaagacccagucccugcugaucgugaacaacgccaccaacguggucaucaaggugugcgaguuccaguucugcaacgaccccuuccucggcguguacuaccacaagaacaacaagagcuggauggaguccgaguuccgggucuacagcuccgccaacaacugcacguucgaguacgugagccagcccuuccugauggaccuggagggcaagcaggggaacuucaagaaccuccgcgaguucguguucaagaacaucgacggcuacuucaagaucuacuccaagcacaccccgaucaaccugguccgggaccugccccagggguucagcgcccucgagccccugguggaccugcccaucggcaucaacaucacccgcuuccagacccuccuggcccugcaccgguccuaccucacgccgggggacagcagcuccggcuggaccgcgggcgccgccgccuacuacgugggguaccugcagccccgcaccuuccugcucaaguacaacgagaacggcaccaucacggacgcggucgacugcgcccuggacccccugagcgagaccaagugcacccucaaguccuucaccguggagaaggggaucuaccagacgagcaacuuccgggugcagcccaccgaguccaucguccgcuucccgaacaucaccaaccugugccccuucggcgagguguucaacgccacccgguucgccagcgucuacgccuggaaccgcaagcggaucuccaacugcguggcggacuacagcgugcuguacaacuccgccagcuucuccacguucaagugcuacggcgucagccccaccaagcucaacgaccugugcuucaccaacguguacgccgacuccuucgugauccgcggggacgagguccggcagaucgcccccggccagaccgggaagaucgccgacuacaacuacaagcugccggacgacuucacgggcugcgugaucgcguggaacagcaacaaccucgacuccaaggucgggggcaacuacaacuaccuguaccgccuguuccgcaagagcaaccucaagcccuucgagcgggacaucuccaccgagaucuaccaggccggcaacacccccugcaacgggguggagggcuucaacugcuacuucccccugcaguccuacggguuccagccgaccaacggcgugggguaccagcccuaccggguggucgugcugagcuucgagcuccugcacgcccccgccacggugugcggccccaagaaguccaccaaccuggucaagaacaagugcgugaacuucaacuucaacggccucaccgggaccggcgugcugaccgagagcaacaagaaguuccugccguuccagcaguucgggcgcgacaucgccgacacgaccgacgcgguccgcgacccccagacccuggagauccucgacaucacccccugcagcuucggcgggguguccgugaucacgccgggcaccaacaccagcaaccaggucgccgugcuguaccagggcgugaacugcaccgagguccccguggccauccacgccgaccagcugacgcccaccuggcggguguacuccaccggcagcaacgucuuccagacccgcgccgggugccucaucggcgcggagcacgugaacaacuccuacgagugcgacauccccaucggggccggcaucugcgccagcuaccagacgcagaccaacuccccgcggcgcgcccggagcguggcgucccagagcaucaucgccuacaccaugucccugggcgccgagaacagcgucgccuacuccaacaacagcaucgccauccccaccaacuucacgaucuccgugaccaccgagauccugcccgugagcaugaccaagacgagcgucgacugcaccauguacaucugcggggacuccaccgagugcagcaaccuccugcugcaguacggcuccuucugcacccagcucaaccgcgcgcugacggggaucgccguggagcaggacaagaacacccaggagguguucgcccaggucaagcagaucuacaagacgcccccgaucaaggacuucggcggguucaacuucagccagauccugcccgaccccuccaagcccagcaagcgguccuucaucgaggaccuccuguucaacaaggugacccuggccgacgccggcuucaucaagcaguacggcgacugccucggggacaucgcggcccgcgaccugaucugcgcccagaaguucaacggccugaccgugcucccgccccugcugaccgacgagaugaucgcccaguacaccagcgcccuccuggcggggaccaucacguccggcuggaccuucggggccggcgccgcccugcagauccccuucgcgaugcagauggccuaccgguucaacggcaucggggucacccagaacgugcucuacgagaaccagaagcugaucgccaaccaguucaacagcgccaucggcaagauccaggacucccugagcuccaccgccagcgcgcucgggaagcugcaggacguggucaaccagaacgcccaggcccugaacacgcucgugaagcagcuguccagcaacuucggcgccaucuccagcgugcugaacgacauccucucccgccuggacaaggucgaggccgaggugcagaucgaccggcugaucaccgggcgccuccagagccugcagaccuacgugacccagcagcugauccgggcggccgagauccgcgccagcgccaaccucgccgcgaccaagauguccgagugcguccugggccagagcaagcggguggacuucugcggcaagggguaccaccugauguccuucccccagagcgccccgcacggcguggucuuccuccacgugacguacguccccgcccaggagaagaacuucaccaccgcccccgcgaucugccacgacgggaaggcccacuucccccgcgagggcguguucguguccaacgggacccacugguucgucacgcagcggaacuucuacgagccgcagaucaucaccaccgacaacaccuucgugagcggcaacugcgacguggucaucggcaucgugaacaacacgguguacgacccccugcagcccgagcuggacuccuucaaggaggagcucgacaaguacuucaagaaccacaccagccccgacgucgaccugggggacaucuccggcaucaacgccagcguggugaacauccagaaggagaucgaccgccugaacgaggucgccaagaaccucaacgagucccugaucgaccugcaggagcucgggaaguacgagcaguacaucaaguggccgugguacaucuggcugggcuucaucgccggccugaucgcgaucgugauggugaccaucaugcucugcugcaugaccagcugcugcuccugccugaaggggugcugcagcugcggcuccugcugcaaguucgacgaggacgacagcgagcccguccugaagggggugaagcuccacuacacgugauaauaggcuggagccucgguggccuagcuucuugccccuugggccuccccccagccccuccuccccuuccugcacccguacccccguggucuuugaauaaagucugagugggcggcaaaaaaaaaaaaaaaaaaaaaaaaaaaaaaaaaaaaaaaaaaaaaaaaaaaaaaaaaaaaaaaaaaaaaaaaaaaaaaaaaaaaaaaaaaaaaaaaaaaaucuag

SEQ ID NO: 26494 - RNA, 4100 nt, Artificial Sequence
  SARS-CoV-2/Wuhan/WIV05/2019__EPI_ISL_402128 spike protein mRNA gc (1-1273)(N501Y_D614G)
gggaaauaagagagaaaagaagaguaagaagaaauauaagaccccggcgccgccaccauguucguguuccugguccuccugccccuggugagcucccagugcgugaaccucaccacccgcacgcagcugccgcccgccuacaccaacagcuucacccggggcgucuacuaccccgacaagguguuccgcuccagcgugcugcacuccacccaggaccucuuccugcccuucuucagcaacgucacgugguuccacgccauccacguguccgggaccaacggcaccaagcgguucgacaacccggugcugcccuucaacgacggggucuacuucgcgagcaccgagaaguccaacaucauccgcggcuggaucuucgggacgacccucgacagcaagacccagucccugcugaucgugaacaacgccaccaacguggucaucaaggugugcgaguuccaguucugcaacgaccccuuccucggcguguacuaccacaagaacaacaagagcuggauggaguccgaguuccgggucuacagcuccgccaacaacugcacguucgaguacgugagccagcccuuccugauggaccuggagggcaagcaggggaacuucaagaaccuccgcgaguucguguucaagaacaucgacggcuacuucaagaucuacuccaagcacaccccgaucaaccugguccgggaccugccccagggguucagcgcccucgagccccugguggaccugcccaucggcaucaacaucacccgcuuccagacccuccuggcccugcaccgguccuaccucacgccgggggacagcagcuccggcuggaccgcgggcgccgccgccuacuacgugggguaccugcagccccgcaccuuccugcucaaguacaacgagaacggcaccaucacggacgcggucgacugcgcccuggacccccugagcgagaccaagugcacccucaaguccuucaccguggagaaggggaucuaccagacgagcaacuuccgggugcagcccaccgaguccaucguccgcuucccgaacaucaccaaccugugccccuucggcgagguguucaacgccacccgguucgccagcgucuacgccuggaaccgcaagcggaucuccaacugcguggcggacuacagcgugcuguacaacuccgccagcuucuccacguucaagugcuacggcgucagccccaccaagcucaacgaccugugcuucaccaacguguacgccgacuccuucgugauccgcggggacgagguccggcagaucgcccccggccagaccgggaagaucgccgacuacaacuacaagcugccggacgacuucacgggcugcgugaucgcguggaacagcaacaaccucgacuccaaggucgggggcaacuacaacuaccuguaccgccuguuccgcaagagcaaccucaagcccuucgagcgggacaucuccaccgagaucuaccaggccggcagcacccccugcaacgggguggagggcuucaacugcuacuucccccugcaguccuacggguuccagccgaccuacggcgugggguaccagcccuaccggguggucgugcugagcuucgagcuccugcacgcccccgccacggugugcggccccaagaaguccaccaaccuggucaagaacaagugcgugaacuucaacuucaacggccucaccgggaccggcgugcugaccgagagcaacaagaaguuccugccguuccagcaguucgggcgcgacaucgccgacacgaccgacgcgguccgcgacccccagacccuggagauccucgacaucacccccugcagcuucggcgggguguccgugaucacgccgggcaccaacaccagcaaccaggucgccgugcuguaccagggcgugaacugcaccgagguccccguggccauccacgccgaccagcugacgcccaccuggcggguguacuccaccggcagcaacgucuuccagacccgcgccgggugccucaucggcgcggagcacgugaacaacuccuacgagugcgacauccccaucggggccggcaucugcgccagcuaccagacgcagaccaacuccccgcggcgcgcccggagcguggcgucccagagcaucaucgccuacaccaugucccugggcgccgagaacagcgucgccuacuccaacaacagcaucgccauccccaccaacuucacgaucuccgugaccaccgagauccugcccgugagcaugaccaagacgagcgucgacugcaccauguacaucugcggggacuccaccgagugcagcaaccuccugcugcaguacggcuccuucugcacccagcucaaccgcgcgcugacggggaucgccguggagcaggacaagaacacccaggagguguucgcccaggucaagcagaucuacaagacgcccccgaucaaggacuucggcggguucaacuucagccagauccugcccgaccccuccaagcccagcaagcgguccuucaucgaggaccuccuguucaacaaggugacccuggccgacgccggcuucaucaagcaguacggcgacugccucggggacaucgcggcccgcgaccugaucugcgcccagaaguucaacggccugaccgugcucccgccccugcugaccgacgagaugaucgcccaguacaccagcgcccuccuggcggggaccaucacguccggcuggaccuucggggccggcgccgcccugcagauccccuucgcgaugcagauggccuaccgguucaacggcaucggggucacccagaacgugcucuacgagaaccagaagcugaucgccaaccaguucaacagcgccaucggcaagauccaggacucccugagcuccaccgccagcgcgcucgggaagcugcaggacguggucaaccagaacgcccaggcccugaacacgcucgugaagcagcuguccagcaacuucggcgccaucuccagcgugcugaacgacauccucucccgccuggacaaggucgaggccgaggugcagaucgaccggcugaucaccgggcgccuccagagccugcagaccuacgugacccagcagcugauccgggcggccgagauccgcgccagcgccaaccucgccgcgaccaagauguccgagugcguccugggccagagcaagcggguggacuucugcggcaagggguaccaccugauguccuucccccagagcgccccgcacggcguggucuuccuccacgugacguacguccccgcccaggagaagaacuucaccaccgcccccgcgaucugccacgacgggaaggcccacuucccccgcgagggcguguucguguccaacgggacccacugguucgucacgcagcggaacuucuacgagccgcagaucaucaccaccgacaacaccuucgugagcggcaacugcgacguggucaucggcaucgugaacaacacgguguacgacccccugcagcccgagcuggacuccuucaaggaggagcucgacaaguacuucaagaaccacaccagccccgacgucgaccugggggacaucuccggcaucaacgccagcguggugaacauccagaaggagaucgaccgccugaacgaggucgccaagaaccucaacgagucccugaucgaccugcaggagcucgggaaguacgagcaguacaucaaguggccgugguacaucuggcugggcuucaucgccggccugaucgcgaucgugauggugaccaucaugcucugcugcaugaccagcugcugcuccugccugaaggggugcugcagcugcggcuccugcugcaaguucgacgaggacgacagcgagcccguccugaagggggugaagcuccacuacacgugauaauaggcuggagccucgguggccuagcuucuugccccuugggccuccccccagccccuccuccccuuccugcacccguacccccguggucuuugaauaaagucugagugggcggcaaaaaaaaaaaaaaaaaaaaaaaaaaaaaaaaaaaaaaaaaaaaaaaaaaaaaaaaaaaaaaaaaaaaaaaaaaaaaaaaaaaaaaaaaaaaaaaaaaaaucuag

SEQ ID NO: 26495 - RNA, 4094 nt, Artificial Sequence
  SARS-CoV-2/Wuhan/WIV05/2019__EPI_ISL_402128 spike protein mRNA gc (1-1273)(H69del_V70del_D614G)
gggaaauaagagagaaaagaagaguaagaagaaauauaagaccccggcgccgccaccauguucguguuccugguccuccugccccuggugagcucccagugcgugaaccucaccacccgcacgcagcugccgcccgccuacaccaacagcuucacccggggcgucuacuaccccgacaagguguuccgcuccagcgugcugcacuccacccaggaccucuuccugcccuucuucagcaacgucacgugguuccacgccaucuccgggaccaacggcaccaagcgguucgacaacccggugcugcccuucaacgacggggucuacuucgcgagcaccgagaaguccaacaucauccgcggcuggaucuucgggacgacccucgacagcaagacccagucccugcugaucgugaacaacgccaccaacguggucaucaaggugugcgaguuccaguucugcaacgaccccuuccucggcguguacuaccacaagaacaacaagagcuggauggaguccgaguuccgggucuacagcuccgccaacaacugcacguucgaguacgugagccagcccuuccugauggaccuggagggcaagcaggggaacuucaagaaccuccgcgaguucguguucaagaacaucgacggcuacuucaagaucuacuccaagcacaccccgaucaaccugguccgggaccugccccagggguucagcgcccucgagccccugguggaccugcccaucggcaucaacaucacccgcuuccagacccuccuggcccugcaccgguccuaccucacgccgggggacagcagcuccggcuggaccgcgggcgccgccgccuacuacgugggguaccugcagccccgcaccuuccugcucaaguacaacgagaacggcaccaucacggacgcggucgacugcgcccuggacccccugagcgagaccaagugcacccucaaguccuucaccguggagaaggggaucuaccagacgagcaacuuccgggugcagcccaccgaguccaucguccgcuucccgaacaucaccaaccugugccccuucggcgagguguucaacgccacccgguucgccagcgucuacgccuggaaccgcaagcggaucuccaacugcguggcggacuacagcgugcuguacaacuccgccagcuucuccacguucaagugcuacggcgucagccccaccaagcucaacgaccugugcuucaccaacguguacgccgacuccuucgugauccgcggggacgagguccggcagaucgcccccggccagaccgggaagaucgccgacuacaacuacaagcugccggacgacuucacgggcugcgugaucgcguggaacagcaacaaccucgacuccaaggucgggggcaacuacaacuaccuguaccgccuguuccgcaagagcaaccucaagcccuucgagcgggacaucuccaccgagaucuaccaggccggcagcacccccugcaacgggguggagggcuucaacugcuacuucccccugcaguccuacggguuccagccgaccaacggcgugggguaccagcccuaccggguggucgugcugagcuucgagcuccugcacgcccccgccacggugugcggccccaagaaguccaccaaccuggucaagaacaagugcgugaacuucaacuucaacggccucaccgggaccggcgugcugaccgagagcaacaagaaguuccugccguuccagcaguucgggcgcgacaucgccgacacgaccgacgcgguccgcgacccccagacccuggagauccucgacaucacccccugcagcuucggcgggguguccgugaucacgccgggcaccaacaccagcaaccaggucgccgugcuguaccagggcgugaacugcaccgagguccccguggccauccacgccgaccagcugacgcccaccuggcggguguacuccaccggcagcaacgucuuccagacccgcgccgggugccucaucggcgcggagcacgugaacaacuccuacgagugcgacauccccaucggggccggcaucugcgccagcuaccagacgcagaccaacuccccgcggcgcgcccggagcguggcgucccagagcaucaucgccuacaccaugucccugggcgccgagaacagcgucgccuacuccaacaacagcaucgccauccccaccaacuucacgaucuccgugaccaccgagauccugcccgugagcaugaccaagacgagcgucgacugcaccauguacaucugcggggacuccaccgagugcagcaaccuccugcugcaguacggcuccuucugcacccagcucaaccgcgcgcugacggggaucgccguggagcaggacaagaacacccaggagguguucgcccaggucaagcagaucuacaagacgcccccgaucaaggacuucggcggguucaacuucagccagauccugcccgaccccuccaagcccagcaagcgguccuucaucgaggaccuccuguucaacaaggugacccuggccgacgccggcuucaucaagcaguacggcgacugccucggggacaucgcggcccgcgaccugaucugcgcccagaaguucaacggccugaccgugcucccgccccugcugaccgacgagaugaucgcccaguacaccagcgcccuccuggcggggaccaucacguccggcuggaccuucggggccggcgccgcccugcagauccccuucgcgaugcagauggccuaccgguucaacggcaucggggucacccagaacgugcucuacgagaaccagaagcugaucgccaaccaguucaacagcgccaucggcaagauccaggacucccugagcuccaccgccagcgcgcucgggaagcugcaggacguggucaaccagaacgcccaggcccugaacacgcucgugaagcagcuguccagcaacuucggcgccaucuccagcgugcugaacgacauccucucccgccuggacaaggucgaggccgaggugcagaucgaccggcugaucaccgggcgccuccagagccugcagaccuacgugacccagcagcugauccgggcggccgagauccgcgccagcgccaaccucgccgcgaccaagauguccgagugcguccugggccagagcaagcggguggacuucugcggcaagggguaccaccugauguccuucccccagagcgccccgcacggcguggucuuccuccacgugacguacguccccgcccaggagaagaacuucaccaccgcccccgcgaucugccacgacgggaaggcccacuucccccgcgagggcguguucguguccaacgggacccacugguucgucacgcagcggaacuucuacgagccgcagaucaucaccaccgacaacaccuucgugagcggcaacugcgacguggucaucggcaucgugaacaacacgguguacgacccccugcagcccgagcuggacuccuucaaggaggagcucgacaaguacuucaagaaccacaccagccccgacgucgaccugggggacaucuccggcaucaacgccagcguggugaacauccagaaggagaucgaccgccugaacgaggucgccaagaaccucaacgagucccugaucgaccugcaggagcucgggaaguacgagcaguacaucaaguggccgugguacaucuggcugggcuucaucgccggccugaucgcgaucgugauggugaccaucaugcucugcugcaugaccagcugcugcuccugccugaaggggugcugcagcugcggcuccugcugcaaguucgacgaggacgacagcgagcccguccugaagggggugaagcuccacuacacgugauaauaggcuggagccucgguggccuagcuucuugccccuugggccuccccccagccccuccuccccuuccugcacccguacccccguggucuuugaauaaagucugagugggcggcaaaaaaaaaaaaaaaaaaaaaaaaaaaaaaaaaaaaaaaaaaaaaaaaaaaaaaaaaaaaaaaaaaaaaaaaaaaaaaaaaaaaaaaaaaaaaaaaaaaaucuag

SEQ ID NO: 26496 - RNA, 4100 nt, Artificial Sequence
  SARS-CoV-2/Wuhan/WIV05/2019__EPI_ISL_402128 spike protein mRNA gc (1-1273)(Y453F_D614G)
gggaaauaagagagaaaagaagaguaagaagaaauauaagaccccggcgccgccaccauguucguguuccugguccuccugccccuggugagcucccagugcgugaaccucaccacccgcacgcagcugccgcccgccuacaccaacagcuucacccggggcgucuacuaccccgacaagguguuccgcuccagcgugcugcacuccacccaggaccucuuccugcccuucuucagcaacgucacgugguuccacgccauccacguguccgggaccaacggcaccaagcgguucgacaacccggugcugcccuucaacgacggggucuacuucgcgagcaccgagaaguccaacaucauccgcggcuggaucuucgggacgacccucgacagcaagacccagucccugcugaucgugaacaacgccaccaacguggucaucaaggugugcgaguuccaguucugcaacgaccccuuccucggcguguacuaccacaagaacaacaagagcuggauggaguccgaguuccgggucuacagcuccgccaacaacugcacguucgaguacgugagccagcccuuccugauggaccuggagggcaagcaggggaacuucaagaaccuccgcgaguucguguucaagaacaucgacggcuacuucaagaucuacuccaagcacaccccgaucaaccugguccgggaccugccccagggguucagcgcccucgagccccugguggaccugcccaucggcaucaacaucacccgcuuccagacccuccuggcccugcaccgguccuaccucacgccgggggacagcagcuccggcuggaccgcgggcgccgccgccuacuacgugggguaccugcagccccgcaccuuccugcucaaguacaacgagaacggcaccaucacggacgcggucgacugcgcccuggacccccugagcgagaccaagugcacccucaaguccuucaccguggagaaggggaucuaccagacgagcaacuuccgggugcagcccaccgaguccaucguccgcuucccgaacaucaccaaccugugccccuucggcgagguguucaacgccacccgguucgccagcgucuacgccuggaaccgcaagcggaucuccaacugcguggcggacuacagcgugcuguacaacuccgccagcuucuccacguucaagugcuacggcgucagccccaccaagcucaacgaccugugcuucaccaacguguacgccgacuccuucgugauccgcggggacgagguccggcagaucgcccccggccagaccgggaagaucgccgacuacaacuacaagcugccggacgacuucacgggcugcgugaucgcguggaacagcaacaaccucgacuccaaggucgggggcaacuacaacuaccuguuccgccuguuccgcaagagcaaccucaagcccuucgagcgggacaucuccaccgagaucuaccaggccggcagcacccccugcaacgggguggagggcuucaacugcuacuucccccugcaguccuacggguuccagccgaccaacggcgugggguaccagcccuaccggguggucgugcugagcuucgagcuccugcacgcccccgccacggugugcggccccaagaaguccaccaaccuggucaagaacaagugcgugaacuucaacuucaacggccucaccgggaccggcgugcugaccgagagcaacaagaaguuccugccguuccagcaguucgggcgcgacaucgccgacacgaccgacgcgguccgcgacccccagacccuggagauccucgacaucacccccugcagcuucggcgggguguccgugaucacgccgggcaccaacaccagcaaccaggucgccgugcuguaccagggcgugaacugcaccgagguccccguggccauccacgccgaccagcugacgcccaccuggcggguguacuccaccggcagcaacgucuuccagacccgcgccgggugccucaucggcgcggagcacgugaacaacuccuacgagugcgacauccccaucggggccggcaucugcgccagcuaccagacgcagaccaacuccccgcggcgcgcccggagcguggcgucccagagcaucaucgccuacaccaugucccugggcgccgagaacagcgucgccuacuccaacaacagcaucgccauccccaccaacuucacgaucuccgugaccaccgagauccugcccgugagcaugaccaagacgagcgucgacugcaccauguacaucugcggggacuccaccgagugcagcaaccuccugcugcaguacggcuccuucugcacccagcucaaccgcgcgcugacggggaucgccguggagcaggacaagaacacccaggagguguucgcccaggucaagcagaucuacaagacgcccccgaucaaggacuucggcggguucaacuucagccagauccugcccgaccccuccaagcccagcaagcgguccuucaucgaggaccuccuguucaacaaggugacccuggccgacgccggcuucaucaagcaguacggcgacugccucggggacaucgcggcccgcgaccugaucugcgcccagaaguucaacggccugaccgugcucccgccccugcugaccgacgagaugaucgcccaguacaccagcgcccuccuggcggggaccaucacguccggcuggaccuucggggccggcgccgcccugcagauccccuucgcgaugcagauggccuaccgguucaacggcaucggggucacccagaacgugcucuacgagaaccagaagcugaucgccaaccaguucaacagcgccaucggcaagauccaggacucccugagcuccaccgccagcgcgcucgggaagcugcaggacguggucaaccagaacgcccaggcccugaacacgcucgugaagcagcuguccagcaacuucggcgccaucuccagcgugcugaacgacauccucucccgccuggacaaggucgaggccgaggugcagaucgaccggcugaucaccgggcgccuccagagccugcagaccuacgugacccagcagcugauccgggcggccgagauccgcgccagcgccaaccucgccgcgaccaagauguccgagugcguccugggccagagcaagcggguggacuucugcggcaagggguaccaccugauguccuucccccagagcgccccgcacggcguggucuuccuccacgugacguacguccccgcccaggagaagaacuucaccaccgcccccgcgaucugccacgacgggaaggcccacuucccccgcgagggcguguucguguccaacgggacccacugguucgucacgcagcggaacuucuacgagccgcagaucaucaccaccgacaacaccuucgugagcggcaacugcgacguggucaucggcaucgugaacaacacgguguacgacccccugcagcccgagcuggacuccuucaaggaggagcucgacaaguacuucaagaaccacaccagccccgacgucgaccugggggacaucuccggcaucaacgccagcguggugaacauccagaaggagaucgaccgccugaacgaggucgccaagaaccucaacgagucccugaucgaccugcaggagcucgggaaguacgagcaguacaucaaguggccgugguacaucuggcugggcuucaucgccggccugaucgcgaucgugauggugaccaucaugcucugcugcaugaccagcugcugcuccugccugaaggggugcugcagcugcggcuccugcugcaaguucgacgaggacgacagcgagcccguccugaagggggugaagcuccacuacacgugauaauaggcuggagccucgguggccuagcuucuugccccuugggccuccccccagccccuccuccccuuccugcacccguacccccguggucuuugaauaaagucugagugggcggcaaaaaaaaaaaaaaaaaaaaaaaaaaaaaaaaaaaaaaaaaaaaaaaaaaaaaaaaaaaaaaaaaaaaaaaaaaaaaaaaaaaaaaaaaaaaaaaaaaaaucuag

SEQ ID NO: 26497 - RNA, 4100 nt, Artificial Sequence
  SARS-CoV-2/Wuhan/WIV05/2019__EPI_ISL_402128 spike protein mRNA gc (1-1273)(D614G_I692V)
gggaaauaagagagaaaagaagaguaagaagaaauauaagaccccggcgccgccaccauguucguguuccugguccuccugccccuggugagcucccagugcgugaaccucaccacccgcacgcagcugccgcccgccuacaccaacagcuucacccggggcgucuacuaccccgacaagguguuccgcuccagcgugcugcacuccacccaggaccucuuccugcccuucuucagcaacgucacgugguuccacgccauccacguguccgggaccaacggcaccaagcgguucgacaacccggugcugcccuucaacgacggggucuacuucgcgagcaccgagaaguccaacaucauccgcggcuggaucuucgggacgacccucgacagcaagacccagucccugcugaucgugaacaacgccaccaacguggucaucaaggugugcgaguuccaguucugcaacgaccccuuccucggcguguacuaccacaagaacaacaagagcuggauggaguccgaguuccgggucuacagcuccgccaacaacugcacguucgaguacgugagccagcccuuccugauggaccuggagggcaagcaggggaacuucaagaaccuccgcgaguucguguucaagaacaucgacggcuacuucaagaucuacuccaagcacaccccgaucaaccugguccgggaccugccccagggguucagcgcccucgagccccugguggaccugcccaucggcaucaacaucacccgcuuccagacccuccuggcccugcaccgguccuaccucacgccgggggacagcagcuccggcuggaccgcgggcgccgccgccuacuacgugggguaccugcagccccgcaccuuccugcucaaguacaacgagaacggcaccaucacggacgcggucgacugcgcccuggacccccugagcgagaccaagugcacccucaaguccuucaccguggagaaggggaucuaccagacgagcaacuuccgggugcagcccaccgaguccaucguccgcuucccgaacaucaccaaccugugccccuucggcgagguguucaacgccacccgguucgccagcgucuacgccuggaaccgcaagcggaucuccaacugcguggcggacuacagcgugcuguacaacuccgccagcuucuccacguucaagugcuacggcgucagccccaccaagcucaacgaccugugcuucaccaacguguacgccgacuccuucgugauccgcggggacgagguccggcagaucgcccccggccagaccgggaagaucgccgacuacaacuacaagcugccggacgacuucacgggcugcgugaucgcguggaacagcaacaaccucgacuccaaggucgggggcaacuacaacuaccuguaccgccuguuccgcaagagcaaccucaagcccuucgagcgggacaucuccaccgagaucuaccaggccggcagcacccccugcaacgggguggagggcuucaacugcuacuucccccugcaguccuacggguuccagccgaccaacggcgugggguaccagcccuaccggguggucgugcugagcuucgagcuccugcacgcccccgccacggugugcggccccaagaaguccaccaaccuggucaagaacaagugcgugaacuucaacuucaacggccucaccgggaccggcgugcugaccgagagcaacaagaaguuccugccguuccagcaguucgggcgcgacaucgccgacacgaccgacgcgguccgcgacccccagacccuggagauccucgacaucacccccugcagcuucggcgggguguccgugaucacgccgggcaccaacaccagcaaccaggucgccgugcuguaccagggcgugaacugcaccgagguccccguggccauccacgccgaccagcugacgcccaccuggcggguguacuccaccggcagcaacgucuuccagacccgcgccgggugccucaucggcgcggagcacgugaacaacuccuacgagugcgacauccccaucggggccggcaucugcgccagcuaccagacgcagaccaacuccccgcggcgcgcccggagcguggcgucccagagcgucaucgccuacaccaugucccugggcgccgagaacagcgucgccuacuccaacaacagcaucgccauccccaccaacuucacgaucuccgugaccaccgagauccugcccgugagcaugaccaagacgagcgucgacugcaccauguacaucugcggggacuccaccgagugcagcaaccuccugcugcaguacggcuccuucugcacccagcucaaccgcgcgcugacggggaucgccguggagcaggacaagaacacccaggagguguucgcccaggucaagcagaucuacaagacgcccccgaucaaggacuucggcggguucaacuucagccagauccugcccgaccccuccaagcccagcaagcgguccuucaucgaggaccuccuguucaacaaggugacccuggccgacgccggcuucaucaagcaguacggcgacugccucggggacaucgcggcccgcgaccugaucugcgcccagaaguucaacggccugaccgugcucccgccccugcugaccgacgagaugaucgcccaguacaccagcgcccuccuggcggggaccaucacguccggcuggaccuucggggccggcgccgcccugcagauccccuucgcgaugcagauggccuaccgguucaacggcaucggggucacccagaacgugcucuacgagaaccagaagcugaucgccaaccaguucaacagcgccaucggcaagauccaggacucccugagcuccaccgccagcgcgcucgggaagcugcaggacguggucaaccagaacgcccaggcccugaacacgcucgugaagcagcuguccagcaacuucggcgccaucuccagcgugcugaacgacauccucucccgccuggacaaggucgaggccgaggugcagaucgaccggcugaucaccgggcgccuccagagccugcagaccuacgugacccagcagcugauccgggcggccgagauccgcgccagcgccaaccucgccgcgaccaagauguccgagugcguccugggccagagcaagcggguggacuucugcggcaagggguaccaccugauguccuucccccagagcgccccgcacggcguggucuuccuccacgugacguacguccccgcccaggagaagaacuucaccaccgcccccgcgaucugccacgacgggaaggcccacuucccccgcgagggcguguucguguccaacgggacccacugguucgucacgcagcggaacuucuacgagccgcagaucaucaccaccgacaacaccuucgugagcggcaacugcgacguggucaucggcaucgugaacaacacgguguacgacccccugcagcccgagcuggacuccuucaaggaggagcucgacaaguacuucaagaaccacaccagccccgacgucgaccugggggacaucuccggcaucaacgccagcguggugaacauccagaaggagaucgaccgccugaacgaggucgccaagaaccucaacgagucccugaucgaccugcaggagcucgggaaguacgagcaguacaucaaguggccgugguacaucuggcugggcuucaucgccggccugaucgcgaucgugauggugaccaucaugcucugcugcaugaccagcugcugcuccugccugaaggggugcugcagcugcggcuccugcugcaaguucgacgaggacgacagcgagcccguccugaagggggugaagcuccacuacacgugauaauaggcuggagccucgguggccuagcuucuugccccuugggccuccccccagccccuccuccccuuccugcacccguacccccguggucuuugaauaaagucugagugggcggcaaaaaaaaaaaaaaaaaaaaaaaaaaaaaaaaaaaaaaaaaaaaaaaaaaaaaaaaaaaaaaaaaaaaaaaaaaaaaaaaaaaaaaaaaaaaaaaaaaaaucuag

SEQ ID NO: 26498 - RNA, 4100 nt, Artificial Sequence
  SARS-CoV-2/Wuhan/WIV05/2019__EPI_ISL_402128 spike protein mRNA gc (1-1273)(D614G_M1229I)
gggaaauaagagagaaaagaagaguaagaagaaauauaagaccccggcgccgccaccauguucguguuccugguccuccugccccuggugagcucccagugcgugaaccucaccacccgcacgcagcugccgcccgccuacaccaacagcuucacccggggcgucuacuaccccgacaagguguuccgcuccagcgugcugcacuccacccaggaccucuuccugcccuucuucagcaacgucacgugguuccacgccauccacguguccgggaccaacggcaccaagcgguucgacaacccggugcugcccuucaacgacggggucuacuucgcgagcaccgagaaguccaacaucauccgcggcuggaucuucgggacgacccucgacagcaagacccagucccugcugaucgugaacaacgccaccaacguggucaucaaggugugcgaguuccaguucugcaacgaccccuuccucggcguguacuaccacaagaacaacaagagcuggauggaguccgaguuccgggucuacagcuccgccaacaacugcacguucgaguacgugagccagcccuuccugauggaccuggagggcaagcaggggaacuucaagaaccuccgcgaguucguguucaagaacaucgacggcuacuucaagaucuacuccaagcacaccccgaucaaccugguccgggaccugccccagggguucagcgcccucgagccccugguggaccugcccaucggcaucaacaucacccgcuuccagacccuccuggcccugcaccgguccuaccucacgccgggggacagcagcuccggcuggaccgcgggcgccgccgccuacuacgugggguaccugcagccccgcaccuuccugcucaaguacaacgagaacggcaccaucacggacgcggucgacugcgcccuggacccccugagcgagaccaagugcacccucaaguccuucaccguggagaaggggaucuaccagacgagcaacuuccgggugcagcccaccgaguccaucguccgcuucccgaacaucaccaaccugugccccuucggcgagguguucaacgccacccgguucgccagcgucuacgccuggaaccgcaagcggaucuccaacugcguggcggacuacagcgugcuguacaacuccgccagcuucuccacguucaagugcuacggcgucagccccaccaagcucaacgaccugugcuucaccaacguguacgccgacuccuucgugauccgcggggacgagguccggcagaucgcccccggccagaccgggaagaucgccgacuacaacuacaagcugccggacgacuucacgggcugcgugaucgcguggaacagcaacaaccucgacuccaaggucgggggcaacuacaacuaccuguaccgccuguuccgcaagagcaaccucaagcccuucgagcgggacaucuccaccgagaucuaccaggccggcagcacccccugcaacgggguggagggcuucaacugcuacuucccccugcaguccuacggguuccagccgaccaacggcgugggguaccagcccuaccggguggucgugcugagcuucgagcuccugcacgcccccgccacggugugcggccccaagaaguccaccaaccuggucaagaacaagugcgugaacuucaacuucaacggccucaccgggaccggcgugcugaccgagagcaacaagaaguuccugccguuccagcaguucgggcgcgacaucgccgacacgaccgacgcgguccgcgacccccagacccuggagauccucgacaucacccccugcagcuucggcgggguguccgugaucacgccgggcaccaacaccagcaaccaggucgccgugcuguaccagggcgugaacugcaccgagguccccguggccauccacgccgaccagcugacgcccaccuggcggguguacuccaccggcagcaacgucuuccagacccgcgccgggugccucaucggcgcggagcacgugaacaacuccuacgagugcgacauccccaucggggccggcaucugcgccagcuaccagacgcagaccaacuccccgcggcgcgcccggagcguggcgucccagagcaucaucgccuacaccaugucccugggcgccgagaacagcgucgccuacuccaacaacagcaucgccauccccaccaacuucacgaucuccgugaccaccgagauccugcccgugagcaugaccaagacgagcgucgacugcaccauguacaucugcggggacuccaccgagugcagcaaccuccugcugcaguacggcuccuucugcacccagcucaaccgcgcgcugacggggaucgccguggagcaggacaagaacacccaggagguguucgcccaggucaagcagaucuacaagacgcccccgaucaaggacuucggcggguucaacuucagccagauccugcccgaccccuccaagcccagcaagcgguccuucaucgaggaccuccuguucaacaaggugacccuggccgacgccggcuucaucaagcaguacggcgacugccucggggacaucgcggcccgcgaccugaucugcgcccagaaguucaacggccugaccgugcucccgccccugcugaccgacgagaugaucgcccaguacaccagcgcccuccuggcggggaccaucacguccggcuggaccuucggggccggcgccgcccugcagauccccuucgcgaugcagauggccuaccgguucaacggcaucggggucacccagaacgugcucuacgagaaccagaagcugaucgccaaccaguucaacagcgccaucggcaagauccaggacucccugagcuccaccgccagcgcgcucgggaagcugcaggacguggucaaccagaacgcccaggcccugaacacgcucgugaagcagcuguccagcaacuucggcgccaucuccagcgugcugaacgacauccucucccgccuggacaaggucgaggccgaggugcagaucgaccggcugaucaccgggcgccuccagagccugcagaccuacgugacccagcagcugauccgggcggccgagauccgcgccagcgccaaccucgccgcgaccaagauguccgagugcguccugggccagagcaagcggguggacuucugcggcaagggguaccaccugauguccuucccccagagcgccccgcacggcguggucuuccuccacgugacguacguccccgcccaggagaagaacuucaccaccgcccccgcgaucugccacgacgggaaggcccacuucccccgcgagggcguguucguguccaacgggacccacugguucgucacgcagcggaacuucuacgagccgcagaucaucaccaccgacaacaccuucgugagcggcaacugcgacguggucaucggcaucgugaacaacacgguguacgacccccugcagcccgagcuggacuccuucaaggaggagcucgacaaguacuucaagaaccacaccagccccgacgucgaccugggggacaucuccggcaucaacgccagcguggugaacauccagaaggagaucgaccgccugaacgaggucgccaagaaccucaacgagucccugaucgaccugcaggagcucgggaaguacgagcaguacaucaaguggccgugguacaucuggcugggcuucaucgccggccugaucgcgaucgugaucgugaccaucaugcucugcugcaugaccagcugcugcuccugccugaaggggugcugcagcugcggcuccugcugcaaguucgacgaggacgacagcgagcccguccugaagggggugaagcuccacuacacgugauaauaggcuggagccucgguggccuagcuucuugccccuugggccuccccccagccccuccuccccuuccugcacccguacccccguggucuuugaauaaagucugagugggcggcaaaaaaaaaaaaaaaaaaaaaaaaaaaaaaaaaaaaaaaaaaaaaaaaaaaaaaaaaaaaaaaaaaaaaaaaaaaaaaaaaaaaaaaaaaaaaaaaaaaaucuag

SEQ ID NO: 26499 - RNA, 4094 nt, Artificial Sequence
  SARS-CoV-2/Wuhan/WIV05/2019__EPI_ISL_402128 spike protein mRNA gc (1-1273)(H69del_V70del_A222V_Y453F_S477N_D614G_I692V)
gggaaauaagagagaaaagaagaguaagaagaaauauaagaccccggcgccgccaccauguucguguuccugguccuccugccccuggugagcucccagugcgugaaccucaccacccgcacgcagcugccgcccgccuacaccaacagcuucacccggggcgucuacuaccccgacaagguguuccgcuccagcgugcugcacuccacccaggaccucuuccugcccuucuucagcaacgucacgugguuccacgccaucuccgggaccaacggcaccaagcgguucgacaacccggugcugcccuucaacgacggggucuacuucgcgagcaccgagaaguccaacaucauccgcggcuggaucuucgggacgacccucgacagcaagacccagucccugcugaucgugaacaacgccaccaacguggucaucaaggugugcgaguuccaguucugcaacgaccccuuccucggcguguacuaccacaagaacaacaagagcuggauggaguccgaguuccgggucuacagcuccgccaacaacugcacguucgaguacgugagccagcccuuccugauggaccuggagggcaagcaggggaacuucaagaaccuccgcgaguucguguucaagaacaucgacggcuacuucaagaucuacuccaagcacaccccgaucaaccugguccgggaccugccccagggguucagcguccucgagccccugguggaccugcccaucggcaucaacaucacccgcuuccagacccuccuggcccugcaccgguccuaccucacgccgggggacagcagcuccggcuggaccgcgggcgccgccgccuacuacgugggguaccugcagccccgcaccuuccugcucaaguacaacgagaacggcaccaucacggacgcggucgacugcgcccuggacccccugagcgagaccaagugcacccucaaguccuucaccguggagaaggggaucuaccagacgagcaacuuccgggugcagcccaccgaguccaucguccgcuucccgaacaucaccaaccugugccccuucggcgagguguucaacgccacccgguucgccagcgucuacgccuggaaccgcaagcggaucuccaacugcguggcggacuacagcgugcuguacaacuccgccagcuucuccacguucaagugcuacggcgucagccccaccaagcucaacgaccugugcuucaccaacguguacgccgacuccuucgugauccgcggggacgagguccggcagaucgcccccggccagaccgggaagaucgccgacuacaacuacaagcugccggacgacuucacgggcugcgugaucgcguggaacagcaacaaccucgacuccaaggucgggggcaacuacaacuaccuguuccgccuguuccgcaagagcaaccucaagcccuucgagcgggacaucuccaccgagaucuaccaggccggcaacacccccugcaacgggguggagggcuucaacugcuacuucccccugcaguccuacggguuccagccgaccaacggcgugggguaccagcccuaccggguggucgugcugagcuucgagcuccugcacgcccccgccacggugugcggccccaagaaguccaccaaccuggucaagaacaagugcgugaacuucaacuucaacggccucaccgggaccggcgugcugaccgagagcaacaagaaguuccugccguuccagcaguucgggcgcgacaucgccgacacgaccgacgcgguccgcgacccccagacccuggagauccucgacaucacccccugcagcuucggcgggguguccgugaucacgccgggcaccaacaccagcaaccaggucgccgugcuguaccagggcgugaacugcaccgagguccccguggccauccacgccgaccagcugacgcccaccuggcggguguacuccaccggcagcaacgucuuccagacccgcgccgggugccucaucggcgcggagcacgugaacaacuccuacgagugcgacauccccaucggggccggcaucugcgccagcuaccagacgcagaccaacuccccgcggcgcgcccggagcguggcgucccagagcgucaucgccuacaccaugucccugggcgccgagaacagcgucgccuacuccaacaacagcaucgccauccccaccaacuucacgaucuccgugaccaccgagauccugcccgugagcaugaccaagacgagcgucgacugcaccauguacaucugcggggacuccaccgagugcagcaaccuccugcugcaguacggcuccuucugcacccagcucaaccgcgcgcugacggggaucgccguggagcaggacaagaacacccaggagguguucgcccaggucaagcagaucuacaagacgcccccgaucaaggacuucggcggguucaacuucagccagauccugcccgaccccuccaagcccagcaagcgguccuucaucgaggaccuccuguucaacaaggugacccuggccgacgccggcuucaucaagcaguacggcgacugccucggggacaucgcggcccgcgaccugaucugcgcccagaaguucaacggccugaccgugcucccgccccugcugaccgacgagaugaucgcccaguacaccagcgcccuccuggcggggaccaucacguccggcuggaccuucggggccggcgccgcccugcagauccccuucgcgaugcagauggccuaccgguucaacggcaucggggucacccagaacgugcucuacgagaaccagaagcugaucgccaaccaguucaacagcgccaucggcaagauccaggacucccugagcuccaccgccagcgcgcucgggaagcugcaggacguggucaaccagaacgcccaggcccugaacacgcucgugaagcagcuguccagcaacuucggcgccaucuccagcgugcugaacgacauccucucccgccuggacaaggucgaggccgaggugcagaucgaccggcugaucaccgggcgccuccagagccugcagaccuacgugacccagcagcugauccgggcggccgagauccgcgccagcgccaaccucgccgcgaccaagauguccgagugcguccugggccagagcaagcggguggacuucugcggcaagggguaccaccugauguccuucccccagagcgccccgcacggcguggucuuccuccacgugacguacguccccgcccaggagaagaacuucaccaccgcccccgcgaucugccacgacgggaaggcccacuucccccgcgagggcguguucguguccaacgggacccacugguucgucacgcagcggaacuucuacgagccgcagaucaucaccaccgacaacaccuucgugagcggcaacugcgacguggucaucggcaucgugaacaacacgguguacgacccccugcagcccgagcuggacuccuucaaggaggagcucgacaaguacuucaagaaccacaccagccccgacgucgaccugggggacaucuccggcaucaacgccagcguggugaacauccagaaggagaucgaccgccugaacgaggucgccaagaaccucaacgagucccugaucgaccugcaggagcucgggaaguacgagcaguacaucaaguggccgugguacaucuggcugggcuucaucgccggccugaucgcgaucgugauggugaccaucaugcucugcugcaugaccagcugcugcuccugccugaaggggugcugcagcugcggcuccugcugcaaguucgacgaggacgacagcgagcccguccugaagggggugaagcuccacuacacgugauaauaggcuggagccucgguggccuagcuucuugccccuugggccuccccccagccccuccuccccuuccugcacccguacccccguggucuuugaauaaagucugagugggcggcaaaaaaaaaaaaaaaaaaaaaaaaaaaaaaaaaaaaaaaaaaaaaaaaaaaaaaaaaaaaaaaaaaaaaaaaaaaaaaaaaaaaaaaaaaaaaaaaaaaaucuag

SEQ ID NO: 26500 - RNA, 4094 nt, Artificial Sequence
  SARS-CoV-2/Wuhan/WIV05/2019__EPI_ISL_402128 spike protein mRNA gc (1-1273)(H69del_V70del_Y453F_D614G_I692V_M1229I)
gggaaauaagagagaaaagaagaguaagaagaaauauaagaccccggcgccgccaccauguucguguuccugguccuccugccccuggugagcucccagugcgugaaccucaccacccgcacgcagcugccgcccgccuacaccaacagcuucacccggggcgucuacuaccccgacaagguguuccgcuccagcgugcugcacuccacccaggaccucuuccugcccuucuucagcaacgucacgugguuccacgccaucuccgggaccaacggcaccaagcgguucgacaacccggugcugcccuucaacgacggggucuacuucgcgagcaccgagaaguccaacaucauccgcggcuggaucuucgggacgacccucgacagcaagacccagucccugcugaucgugaacaacgccaccaacguggucaucaaggugugcgaguuccaguucugcaacgaccccuuccucggcguguacuaccacaagaacaacaagagcuggauggaguccgaguuccgggucuacagcuccgccaacaacugcacguucgaguacgugagccagcccuuccugauggaccuggagggcaagcaggggaacuucaagaaccuccgcgaguucguguucaagaacaucgacggcuacuucaagaucuacuccaagcacaccccgaucaaccugguccgggaccugccccagggguucagcgcccucgagccccugguggaccugcccaucggcaucaacaucacccgcuuccagacccuccuggcccugcaccgguccuaccucacgccgggggacagcagcuccggcuggaccgcgggcgccgccgccuacuacgugggguaccugcagccccgcaccuuccugcucaaguacaacgagaacggcaccaucacggacgcggucgacugcgcccuggacccccugagcgagaccaagugcacccucaaguccuucaccguggagaaggggaucuaccagacgagcaacuuccgggugcagcccaccgaguccaucguccgcuucccgaacaucaccaaccugugccccuucggcgagguguucaacgccacccgguucgccagcgucuacgccuggaaccgcaagcggaucuccaacugcguggcggacuacagcgugcuguacaacuccgccagcuucuccacguucaagugcuacggcgucagccccaccaagcucaacgaccugugcuucaccaacguguacgccgacuccuucgugauccgcggggacgagguccggcagaucgcccccggccagaccgggaagaucgccgacuacaacuacaagcugccggacgacuucacgggcugcgugaucgcguggaacagcaacaaccucgacuccaaggucgggggcaacuacaacuaccuguuccgccuguuccgcaagagcaaccucaagcccuucgagcgggacaucuccaccgagaucuaccaggccggcagcacccccugcaacgggguggagggcuucaacugcuacuucccccugcaguccuacggguuccagccgaccaacggcgugggguaccagcccuaccggguggucgugcugagcuucgagcuccugcacgcccccgccacggugugcggccccaagaaguccaccaaccuggucaagaacaagugcgugaacuucaacuucaacggccucaccgggaccggcgugcugaccgagagcaacaagaaguuccugccguuccagcaguucgggcgcgacaucgccgacacgaccgacgcgguccgcgacccccagacccuggagauccucgacaucacccccugcagcuucggcgggguguccgugaucacgccgggcaccaacaccagcaaccaggucgccgugcuguaccagggcgugaacugcaccgagguccccguggccauccacgccgaccagcugacgcccaccuggcggguguacuccaccggcagcaacgucuuccagacccgcgccgggugccucaucggcgcggagcacgugaacaacuccuacgagugcgacauccccaucggggccggcaucugcgccagcuaccagacgcagaccaacuccccgcggcgcgcccggagcguggcgucccagagcgugaucgccuacaccaugucccugggcgccgagaacagcgucgccuacuccaacaacagcaucgccauccccaccaacuucacgaucuccgugaccaccgagauccugcccgugagcaugaccaagacgagcgucgacugcaccauguacaucugcggggacuccaccgagugcagcaaccuccugcugcaguacggcuccuucugcacccagcucaaccgcgcgcugacggggaucgccguggagcaggacaagaacacccaggagguguucgcccaggucaagcagaucuacaagacgcccccgaucaaggacuucggcggguucaacuucagccagauccugcccgaccccuccaagcccagcaagcgguccuucaucgaggaccuccuguucaacaaggugacccuggccgacgccggcuucaucaagcaguacggcgacugccucggggacaucgcggcccgcgaccugaucugcgcccagaaguucaacggccugaccgugcucccgccccugcugaccgacgagaugaucgcccaguacaccagcgcccuccuggcggggaccaucacguccggcuggaccuucggggccggcgccgcccugcagauccccuucgcgaugcagauggccuaccgguucaacggcaucggggucacccagaacgugcucuacgagaaccagaagcugaucgccaaccaguucaacagcgccaucggcaagauccaggacucccugagcuccaccgccagcgcgcucgggaagcugcaggacguggucaaccagaacgcccaggcccugaacacgcucgugaagcagcuguccagcaacuucggcgccaucuccagcgugcugaacgacauccucucccgccuggacaaggucgaggccgaggugcagaucgaccggcugaucaccgggcgccuccagagccugcagaccuacgugacccagcagcugauccgggcggccgagauccgcgccagcgccaaccucgccgcgaccaagauguccgagugcguccugggccagagcaagcggguggacuucugcggcaagggguaccaccugauguccuucccccagagcgccccgcacggcguggucuuccuccacgugacguacguccccgcccaggagaagaacuucaccaccgcccccgcgaucugccacgacgggaaggcccacuucccccgcgagggcguguucguguccaacgggacccacugguucgucacgcagcggaacuucuacgagccgcagaucaucaccaccgacaacaccuucgugagcggcaacugcgacguggucaucggcaucgugaacaacacgguguacgacccccugcagcccgagcuggacuccuucaaggaggagcucgacaaguacuucaagaaccacaccagccccgacgucgaccugggggacaucuccggcaucaacgccagcguggugaacauccagaaggagaucgaccgccugaacgaggucgccaagaaccucaacgagucccugaucgaccugcaggagcucgggaaguacgagcaguacaucaaguggccgugguacaucuggcugggcuucaucgccggccugaucgcgaucgugaucgugaccaucaugcucugcugcaugaccagcugcugcuccugccugaaggggugcugcagcugcggcuccugcugcaaguucgacgaggacgacagcgagcccguccugaagggggugaagcuccacuacacgugauaauaggcuggagccucgguggccuagcuucuugccccuugggccuccccccagccccuccuccccuuccugcacccguacccccguggucuuugaauaaagucugagugggcggcaaaaaaaaaaaaaaaaaaaaaaaaaaaaaaaaaaaaaaaaaaaaaaaaaaaaaaaaaaaaaaaaaaaaaaaaaaaaaaaaaaaaaaaaaaaaaaaaaaaaucuag

SEQ ID NO: 26501 - RNA, 4091 nt, Artificial Sequence
  SARS-CoV-2/Wuhan/WIV05/2019__EPI_ISL_402128 spike protein mRNA gc (1-1273)(H69del_V70del_Y144del_N501Y_A570D_D614G_P681H_T716I_S982 A_D1118H)
gggaaauaagagagaaaagaagaguaagaagaaauauaagaccccggcgccgccaccauguucguguuccugguccuccugccccuggugagcucccagugcgugaaccucaccacccgcacgcagcugccgcccgccuacaccaacagcuucacccggggcgucuacuaccccgacaagguguuccgcuccagcgugcugcacuccacccaggaccucuuccugcccuucuucagcaacgucacgugguuccacgccaucuccgggaccaacggcaccaagcgguucgacaacccggugcugcccuucaacgacggggucuacuucgcgagcaccgagaaguccaacaucauccgcggcuggaucuucgggacgacccucgacagcaagacccagucccugcugaucgugaacaacgccaccaacguggucaucaaggugugcgaguuccaguucugcaacgaccccuuccucggcguguaccacaagaacaacaagagcuggauggaguccgaguuccgggucuacagcuccgccaacaacugcacguucgaguacgugagccagcccuuccugauggaccuggagggcaagcaggggaacuucaagaaccuccgcgaguucguguucaagaacaucgacggcuacuucaagaucuacuccaagcacaccccgaucaaccugguccgggaccugccccagggguucagcgcccucgagccccugguggaccugcccaucggcaucaacaucacccgcuuccagacccuccuggcccugcaccgguccuaccucacgccgggggacagcagcuccggcuggaccgcgggcgccgccgccuacuacgugggguaccugcagccccgcaccuuccugcucaaguacaacgagaacggcaccaucacggacgcggucgacugcgcccuggacccccugagcgagaccaagugcacccucaaguccuucaccguggagaaggggaucuaccagacgagcaacuuccgggugcagcccaccgaguccaucguccgcuucccgaacaucaccaaccugugccccuucggcgagguguucaacgccacccgguucgccagcgucuacgccuggaaccgcaagcggaucuccaacugcguggcggacuacagcgugcuguacaacuccgccagcuucuccacguucaagugcuacggcgucagccccaccaagcucaacgaccugugcuucaccaacguguacgccgacuccuucgugauccgcggggacgagguccggcagaucgcccccggccagaccgggaagaucgccgacuacaacuacaagcugccggacgacuucacgggcugcgugaucgcguggaacagcaacaaccucgacuccaaggucgggggcaacuacaacuaccuguaccgccuguuccgcaagagcaaccucaagcccuucgagcgggacaucuccaccgagaucuaccaggccggcagcacccccugcaacgggguggagggcuucaacugcuacuucccccugcaguccuacggguuccagccgaccuacggcgugggguaccagcccuaccggguggucgugcugagcuucgagcuccugcacgcccccgccacggugugcggccccaagaaguccaccaaccuggucaagaacaagugcgugaacuucaacuucaacggccucaccgggaccggcgugcugaccgagagcaacaagaaguuccugccguuccagcaguucgggcgcgacaucgacgacacgaccgacgcgguccgcgacccccagacccuggagauccucgacaucacccccugcagcuucggcgggguguccgugaucacgccgggcaccaacaccagcaaccaggucgccgugcuguaccagggcgugaacugcaccgagguccccguggccauccacgccgaccagcugacgcccaccuggcggguguacuccaccggcagcaacgucuuccagacccgcgccgggugccucaucggcgcggagcacgugaacaacuccuacgagugcgacauccccaucggggccggcaucugcgccagcuaccagacgcagaccaacucccaccggcgcgcccggagcguggcgucccagagcaucaucgccuacaccaugucccugggcgccgagaacagcgucgccuacuccaacaacagcaucgccauccccaucaacuucacgaucuccgugaccaccgagauccugcccgugagcaugaccaagacgagcgucgacugcaccauguacaucugcggggacuccaccgagugcagcaaccuccugcugcaguacggcuccuucugcacccagcucaaccgcgcgcugacggggaucgccguggagcaggacaagaacacccaggagguguucgcccaggucaagcagaucuacaagacgcccccgaucaaggacuucggcggguucaacuucagccagauccugcccgaccccuccaagcccagcaagcgguccuucaucgaggaccuccuguucaacaaggugacccuggccgacgccggcuucaucaagcaguacggcgacugccucggggacaucgcggcccgcgaccugaucugcgcccagaaguucaacggccugaccgugcucccgccccugcugaccgacgagaugaucgcccaguacaccagcgcccuccuggcggggaccaucacguccggcuggaccuucggggccggcgccgcccugcagauccccuucgcgaugcagauggccuaccgguucaacggcaucggggucacccagaacgugcucuacgagaaccagaagcugaucgccaaccaguucaacagcgccaucggcaagauccaggacucccugagcuccaccgccagcgcgcucgggaagcugcaggacguggucaaccagaacgcccaggcccugaacacgcucgugaagcagcuguccagcaacuucggcgccaucuccagcgugcugaacgacauccucgcccgccuggacaaggucgaggccgaggugcagaucgaccggcugaucaccgggcgccuccagagccugcagaccuacgugacccagcagcugauccgggcggccgagauccgcgccagcgccaaccucgccgcgaccaagauguccgagugcguccugggccagagcaagcggguggacuucugcggcaagggguaccaccugauguccuucccccagagcgccccgcacggcguggucuuccuccacgugacguacguccccgcccaggagaagaacuucaccaccgcccccgcgaucugccacgacgggaaggcccacuucccccgcgagggcguguucguguccaacgggacccacugguucgucacgcagcggaacuucuacgagccgcagaucaucaccacccacaacaccuucgugagcggcaacugcgacguggucaucggcaucgugaacaacacgguguacgacccccugcagcccgagcuggacuccuucaaggaggagcucgacaaguacuucaagaaccacaccagccccgacgucgaccugggggacaucuccggcaucaacgccagcguggugaacauccagaaggagaucgaccgccugaacgaggucgccaagaaccucaacgagucccugaucgaccugcaggagcucgggaaguacgagcaguacaucaaguggccgugguacaucuggcugggcuucaucgccggccugaucgcgaucgugauggugaccaucaugcucugcugcaugaccagcugcugcuccugccugaaggggugcugcagcugcggcuccugcugcaaguucgacgaggacgacagcgagcccguccugaagggggugaagcuccacuacacgugauaauaggcuggagccucgguggccuagcuucuugccccuugggccuccccccagccccuccuccccuuccugcacccguacccccguggucuuugaauaaagucugagugggcggcaaaaaaaaaaaaaaaaaaaaaaaaaaaaaaaaaaaaaaaaaaaaaaaaaaaaaaaaaaaaaaaaaaaaaaaaaaaaaaaaaaaaaaaaaaaaaaaaaaaaucuag

SEQ ID NO: 26502 - RNA, 4100 nt, Artificial Sequence
  SARS-CoV-2/Wuhan/WIV05/2019__EPI_ISL_402128 spike protein mRNA gc (1-1273)(K417N_E484K_N501Y_D614G)
gggaaauaagagagaaaagaagaguaagaagaaauauaagaccccggcgccgccaccauguucguguuccugguccuccugccccuggugagcucccagugcgugaaccucaccacccgcacgcagcugccgcccgccuacaccaacagcuucacccggggcgucuacuaccccgacaagguguuccgcuccagcgugcugcacuccacccaggaccucuuccugcccuucuucagcaacgucacgugguuccacgccauccacguguccgggaccaacggcaccaagcgguucgacaacccggugcugcccuucaacgacggggucuacuucgcgagcaccgagaaguccaacaucauccgcggcuggaucuucgggacgacccucgacagcaagacccagucccugcugaucgugaacaacgccaccaacguggucaucaaggugugcgaguuccaguucugcaacgaccccuuccucggcguguacuaccacaagaacaacaagagcuggauggaguccgaguuccgggucuacagcuccgccaacaacugcacguucgaguacgugagccagcccuuccugauggaccuggagggcaagcaggggaacuucaagaaccuccgcgaguucguguucaagaacaucgacggcuacuucaagaucuacuccaagcacaccccgaucaaccugguccgggaccugccccagggguucagcgcccucgagccccugguggaccugcccaucggcaucaacaucacccgcuuccagacccuccuggcccugcaccgguccuaccucacgccgggggacagcagcuccggcuggaccgcgggcgccgccgccuacuacgugggguaccugcagccccgcaccuuccugcucaaguacaacgagaacggcaccaucacggacgcggucgacugcgcccuggacccccugagcgagaccaagugcacccucaaguccuucaccguggagaaggggaucuaccagacgagcaacuuccgggugcagcccaccgaguccaucguccgcuucccgaacaucaccaaccugugccccuucggcgagguguucaacgccacccgguucgccagcgucuacgccuggaaccgcaagcggaucuccaacugcguggcggacuacagcgugcuguacaacuccgccagcuucuccacguucaagugcuacggcgucagccccaccaagcucaacgaccugugcuucaccaacguguacgccgacuccuucgugauccgcggggacgagguccggcagaucgcccccggccagaccgggaacaucgccgacuacaacuacaagcugccggacgacuucacgggcugcgugaucgcguggaacagcaacaaccucgacuccaaggucgggggcaacuacaacuaccuguaccgccuguuccgcaagagcaaccucaagcccuucgagcgggacaucuccaccgagaucuaccaggccggcagcacccccugcaacggggugaagggcuucaacugcuacuucccccugcaguccuacggguuccagccgaccuacggcgugggguaccagcccuaccggguggucgugcugagcuucgagcuccugcacgcccccgccacggugugcggccccaagaaguccaccaaccuggucaagaacaagugcgugaacuucaacuucaacggccucaccgggaccggcgugcugaccgagagcaacaagaaguuccugccguuccagcaguucgggcgcgacaucgccgacacgaccgacgcgguccgcgacccccagacccuggagauccucgacaucacccccugcagcuucggcgggguguccgugaucacgccgggcaccaacaccagcaaccaggucgccgugcuguaccagggcgugaacugcaccgagguccccguggccauccacgccgaccagcugacgcccaccuggcggguguacuccaccggcagcaacgucuuccagacccgcgccgggugccucaucggcgcggagcacgugaacaacuccuacgagugcgacauccccaucggggccggcaucugcgccagcuaccagacgcagaccaacuccccgcggcgcgcccggagcguggcgucccagagcaucaucgccuacaccaugucccugggcgccgagaacagcgucgccuacuccaacaacagcaucgccauccccaccaacuucacgaucuccgugaccaccgagauccugcccgugagcaugaccaagacgagcgucgacugcaccauguacaucugcggggacuccaccgagugcagcaaccuccugcugcaguacggcuccuucugcacccagcucaaccgcgcgcugacggggaucgccguggagcaggacaagaacacccaggagguguucgcccaggucaagcagaucuacaagacgcccccgaucaaggacuucggcggguucaacuucagccagauccugcccgaccccuccaagcccagcaagcgguccuucaucgaggaccuccuguucaacaaggugacccuggccgacgccggcuucaucaagcaguacggcgacugccucggggacaucgcggcccgcgaccugaucugcgcccagaaguucaacggccugaccgugcucccgccccugcugaccgacgagaugaucgcccaguacaccagcgcccuccuggcggggaccaucacguccggcuggaccuucggggccggcgccgcccugcagauccccuucgcgaugcagauggccuaccgguucaacggcaucggggucacccagaacgugcucuacgagaaccagaagcugaucgccaaccaguucaacagcgccaucggcaagauccaggacucccugagcuccaccgccagcgcgcucgggaagcugcaggacguggucaaccagaacgcccaggcccugaacacgcucgugaagcagcuguccagcaacuucggcgccaucuccagcgugcugaacgacauccucucccgccuggacaaggucgaggccgaggugcagaucgaccggcugaucaccgggcgccuccagagccugcagaccuacgugacccagcagcugauccgggcggccgagauccgcgccagcgccaaccucgccgcgaccaagauguccgagugcguccugggccagagcaagcggguggacuucugcggcaagggguaccaccugauguccuucccccagagcgccccgcacggcguggucuuccuccacgugacguacguccccgcccaggagaagaacuucaccaccgcccccgcgaucugccacgacgggaaggcccacuucccccgcgagggcguguucguguccaacgggacccacugguucgucacgcagcggaacuucuacgagccgcagaucaucaccaccgacaacaccuucgugagcggcaacugcgacguggucaucggcaucgugaacaacacgguguacgacccccugcagcccgagcuggacuccuucaaggaggagcucgacaaguacuucaagaaccacaccagccccgacgucgaccugggggacaucuccggcaucaacgccagcguggugaacauccagaaggagaucgaccgccugaacgaggucgccaagaaccucaacgagucccugaucgaccugcaggagcucgggaaguacgagcaguacaucaaguggccgugguacaucuggcugggcuucaucgccggccugaucgcgaucgugauggugaccaucaugcucugcugcaugaccagcugcugcuccugccugaaggggugcugcagcugcggcuccugcugcaaguucgacgaggacgacagcgagcccguccugaagggggugaagcuccacuacacgugauaauaggcuggagccucgguggccuagcuucuugccccuugggccuccccccagccccuccuccccuuccugcacccguacccccguggucuuugaauaaagucugagugggcggcaaaaaaaaaaaaaaaaaaaaaaaaaaaaaaaaaaaaaaaaaaaaaaaaaaaaaaaaaaaaaaaaaaaaaaaaaaaaaaaaaaaaaaaaaaaaaaaaaaaaucuag

SEQ ID NO: 26503 - RNA, 4091 nt, Artificial Sequence
  SARS-CoV-2/Wuhan/WIV05/2019__EPI_ISL_402128 spike protein mRNA gc (1-1273)(L18F_D80A_D215G_L242del_A243del_L244del_R246I_K417N_E484 K_N501Y_D614G_A701V)
gggaaauaagagagaaaagaagaguaagaagaaauauaagaccccggcgccgccaccauguucguguuccugguccuccugccccuggugagcucccagugcgugaacuucaccacccgcacgcagcugccgcccgccuacaccaacagcuucacccggggcgucuacuaccccgacaagguguuccgcuccagcgugcugcacuccacccaggaccucuuccugcccuucuucagcaacgucacgugguuccacgccauccacguguccgggaccaacggcaccaagcgguucgccaacccggugcugcccuucaacgacggggucuacuucgcgagcaccgagaaguccaacaucauccgcggcuggaucuucgggacgacccucgacagcaagacccagucccugcugaucgugaacaacgccaccaacguggucaucaaggugugcgaguuccaguucugcaacgaccccuuccucggcguguacuaccacaagaacaacaagagcuggauggaguccgaguuccgggucuacagcuccgccaacaacugcacguucgaguacgugagccagcccuuccugauggaccuggagggcaagcaggggaacuucaagaaccuccgcgaguucguguucaagaacaucgacggcuacuucaagaucuacuccaagcacaccccgaucaaccugguccggggccugccccagggguucagcgcccucgagccccugguggaccugcccaucggcaucaacaucacccgcuuccagacccuccacaucuccuaccucacgccgggggacagcagcuccggcuggaccgcgggcgccgccgccuacuacgugggguaccugcagccccgcaccuuccugcucaaguacaacgagaacggcaccaucacggacgcggucgacugcgcccuggacccccugagcgagaccaagugcacccucaaguccuucaccguggagaaggggaucuaccagacgagcaacuuccgggugcagcccaccgaguccaucguccgcuucccgaacaucaccaaccugugccccuucggcgagguguucaacgccacccgguucgccagcgucuacgccuggaaccgcaagcggaucuccaacugcguggcggacuacagcgugcuguacaacuccgccagcuucuccacguucaagugcuacggcgucagccccaccaagcucaacgaccugugcuucaccaacguguacgccgacuccuucgugauccgcggggacgagguccggcagaucgcccccggccagaccgggaacaucgccgacuacaacuacaagcugccggacgacuucacgggcugcgugaucgcguggaacagcaacaaccucgacuccaaggucgggggcaacuacaacuaccuguaccgccuguuccgcaagagcaaccucaagcccuucgagcgggacaucuccaccgagaucuaccaggccggcagcacccccugcaacggggugaagggcuucaacugcuacuucccccugcaguccuacggguuccagccgaccuacggcgugggguaccagcccuaccggguggucgugcugagcuucgagcuccugcacgcccccgccacggugugcggccccaagaaguccaccaaccuggucaagaacaagugcgugaacuucaacuucaacggccucaccgggaccggcgugcugaccgagagcaacaagaaguuccugccguuccagcaguucgggcgcgacaucgccgacacgaccgacgcgguccgcgacccccagacccuggagauccucgacaucacccccugcagcuucggcgggguguccgugaucacgccgggcaccaacaccagcaaccaggucgccgugcuguaccagggcgugaacugcaccgagguccccguggccauccacgccgaccagcugacgcccaccuggcggguguacuccaccggcagcaacgucuuccagacccgcgccgggugccucaucggcgcggagcacgugaacaacuccuacgagugcgacauccccaucggggccggcaucugcgccagcuaccagacgcagaccaacuccccgcggcgcgcccggagcguggcgucccagagcaucaucgccuacaccaugucccugggcguggagaacagcgucgccuacuccaacaacagcaucgccauccccaccaacuucacgaucuccgugaccaccgagauccugcccgugagcaugaccaagacgagcgucgacugcaccauguacaucugcggggacuccaccgagugcagcaaccuccugcugcaguacggcuccuucugcacccagcucaaccgcgcgcugacggggaucgccguggagcaggacaagaacacccaggagguguucgcccaggucaagcagaucuacaagacgcccccgaucaaggacuucggcggguucaacuucagccagauccugcccgaccccuccaagcccagcaagcgguccuucaucgaggaccuccuguucaacaaggugacccuggccgacgccggcuucaucaagcaguacggcgacugccucggggacaucgcggcccgcgaccugaucugcgcccagaaguucaacggccugaccgugcucccgccccugcugaccgacgagaugaucgcccaguacaccagcgcccuccuggcggggaccaucacguccggcuggaccuucggggccggcgccgcccugcagauccccuucgcgaugcagauggccuaccgguucaacggcaucggggucacccagaacgugcucuacgagaaccagaagcugaucgccaaccaguucaacagcgccaucggcaagauccaggacucccugagcuccaccgccagcgcgcucgggaagcugcaggacguggucaaccagaacgcccaggcccugaacacgcucgugaagcagcuguccagcaacuucggcgccaucuccagcgugcugaacgacauccucucccgccuggacaaggucgaggccgaggugcagaucgaccggcugaucaccgggcgccuccagagccugcagaccuacgugacccagcagcugauccgggcggccgagauccgcgccagcgccaaccucgccgcgaccaagauguccgagugcguccugggccagagcaagcggguggacuucugcggcaagggguaccaccugauguccuucccccagagcgccccgcacggcguggucuuccuccacgugacguacguccccgcccaggagaagaacuucaccaccgcccccgcgaucugccacgacgggaaggcccacuucccccgcgagggcguguucguguccaacgggacccacugguucgucacgcagcggaacuucuacgagccgcagaucaucaccaccgacaacaccuucgugagcggcaacugcgacguggucaucggcaucgugaacaacacgguguacgacccccugcagcccgagcuggacuccuucaaggaggagcucgacaaguacuucaagaaccacaccagccccgacgucgaccugggggacaucuccggcaucaacgccagcguggugaacauccagaaggagaucgaccgccugaacgaggucgccaagaaccucaacgagucccugaucgaccugcaggagcucgggaaguacgagcaguacaucaaguggccgugguacaucuggcugggcuucaucgccggccugaucgcgaucgugauggugaccaucaugcucugcugcaugaccagcugcugcuccugccugaaggggugcugcagcugcggcuccugcugcaaguucgacgaggacgacagcgagcccguccugaagggggugaagcuccacuacacgugauaauaggcuggagccucgguggccuagcuucuugccccuugggccuccccccagccccuccuccccuuccugcacccguacccccguggucuuugaauaaagucugagugggcggcaaaaaaaaaaaaaaaaaaaaaaaaaaaaaaaaaaaaaaaaaaaaaaaaaaaaaaaaaaaaaaaaaaaaaaaaaaaaaaaaaaaaaaaaaaaaaaaaaaaaucuag

SEQ ID NO: 26504 - RNA, 4100 nt, Artificial Sequence
  SARS-CoV-2/Wuhan/WIV05/2019__EPI_ISL_402128 spike protein mRNA gc (1-1273)(E484K_D614G)
gggaaauaagagagaaaagaagaguaagaagaaauauaagaccccggcgccgccaccauguucguguuccugguccuccugccccuggugagcucccagugcgugaaccucaccacccgcacgcagcugccgcccgccuacaccaacagcuucacccggggcgucuacuaccccgacaagguguuccgcuccagcgugcugcacuccacccaggaccucuuccugcccuucuucagcaacgucacgugguuccacgccauccacguguccgggaccaacggcaccaagcgguucgacaacccggugcugcccuucaacgacggggucuacuucgcgagcaccgagaaguccaacaucauccgcggcuggaucuucgggacgacccucgacagcaagacccagucccugcugaucgugaacaacgccaccaacguggucaucaaggugugcgaguuccaguucugcaacgaccccuuccucggcguguacuaccacaagaacaacaagagcuggauggaguccgaguuccgggucuacagcuccgccaacaacugcacguucgaguacgugagccagcccuuccugauggaccuggagggcaagcaggggaacuucaagaaccuccgcgaguucguguucaagaacaucgacggcuacuucaagaucuacuccaagcacaccccgaucaaccugguccgggaccugccccagggguucagcgcccucgagccccugguggaccugcccaucggcaucaacaucacccgcuuccagacccuccuggcccugcaccgguccuaccucacgccgggggacagcagcuccggcuggaccgcgggcgccgccgccuacuacgugggguaccugcagccccgcaccuuccugcucaaguacaacgagaacggcaccaucacggacgcggucgacugcgcccuggacccccugagcgagaccaagugcacccucaaguccuucaccguggagaaggggaucuaccagacgagcaacuuccgggugcagcccaccgaguccaucguccgcuucccgaacaucaccaaccugugccccuucggcgagguguucaacgccacccgguucgccagcgucuacgccuggaaccgcaagcggaucuccaacugcguggcggacuacagcgugcuguacaacuccgccagcuucuccacguucaagugcuacggcgucagccccaccaagcucaacgaccugugcuucaccaacguguacgccgacuccuucgugauccgcggggacgagguccggcagaucgcccccggccagaccgggaagaucgccgacuacaacuacaagcugccggacgacuucacgggcugcgugaucgcguggaacagcaacaaccucgacuccaaggucgggggcaacuacaacuaccuguaccgccuguuccgcaagagcaaccucaagcccuucgagcgggacaucuccaccgagaucuaccaggccggcagcacccccugcaacggggugaagggcuucaacugcuacuucccccugcaguccuacggguuccagccgaccaacggcgugggguaccagcccuaccggguggucgugcugagcuucgagcuccugcacgcccccgccacggugugcggccccaagaaguccaccaaccuggucaagaacaagugcgugaacuucaacuucaacggccucaccgggaccggcgugcugaccgagagcaacaagaaguuccugccguuccagcaguucgggcgcgacaucgccgacacgaccgacgcgguccgcgacccccagacccuggagauccucgacaucacccccugcagcuucggcgggguguccgugaucacgccgggcaccaacaccagcaaccaggucgccgugcuguaccagggcgugaacugcaccgagguccccguggccauccacgccgaccagcugacgcccaccuggcggguguacuccaccggcagcaacgucuuccagacccgcgccgggugccucaucggcgcggagcacgugaacaacuccuacgagugcgacauccccaucggggccggcaucugcgccagcuaccagacgcagaccaacuccccgcggcgcgcccggagcguggcgucccagagcaucaucgccuacaccaugucccugggcgccgagaacagcgucgccuacuccaacaacagcaucgccauccccaccaacuucacgaucuccgugaccaccgagauccugcccgugagcaugaccaagacgagcgucgacugcaccauguacaucugcggggacuccaccgagugcagcaaccuccugcugcaguacggcuccuucugcacccagcucaaccgcgcgcugacggggaucgccguggagcaggacaagaacacccaggagguguucgcccaggucaagcagaucuacaagacgcccccgaucaaggacuucggcggguucaacuucagccagauccugcccgaccccuccaagcccagcaagcgguccuucaucgaggaccuccuguucaacaaggugacccuggccgacgccggcuucaucaagcaguacggcgacugccucggggacaucgcggcccgcgaccugaucugcgcccagaaguucaacggccugaccgugcucccgccccugcugaccgacgagaugaucgcccaguacaccagcgcccuccuggcggggaccaucacguccggcuggaccuucggggccggcgccgcccugcagauccccuucgcgaugcagauggccuaccgguucaacggcaucggggucacccagaacgugcucuacgagaaccagaagcugaucgccaaccaguucaacagcgccaucggcaagauccaggacucccugagcuccaccgccagcgcgcucgggaagcugcaggacguggucaaccagaacgcccaggcccugaacacgcucgugaagcagcuguccagcaacuucggcgccaucuccagcgugcugaacgacauccucucccgccuggacaaggucgaggccgaggugcagaucgaccggcugaucaccgggcgccuccagagccugcagaccuacgugacccagcagcugauccgggcggccgagauccgcgccagcgccaaccucgccgcgaccaagauguccgagugcguccugggccagagcaagcggguggacuucugcggcaagggguaccaccugauguccuucccccagagcgccccgcacggcguggucuuccuccacgugacguacguccccgcccaggagaagaacuucaccaccgcccccgcgaucugccacgacgggaaggcccacuucccccgcgagggcguguucguguccaacgggacccacugguucgucacgcagcggaacuucuacgagccgcagaucaucaccaccgacaacaccuucgugagcggcaacugcgacguggucaucggcaucgugaacaacacgguguacgacccccugcagcccgagcuggacuccuucaaggaggagcucgacaaguacuucaagaaccacaccagccccgacgucgaccugggggacaucuccggcaucaacgccagcguggugaacauccagaaggagaucgaccgccugaacgaggucgccaagaaccucaacgagucccugaucgaccugcaggagcucgggaaguacgagcaguacaucaaguggccgugguacaucuggcugggcuucaucgccggccugaucgcgaucgugauggugaccaucaugcucugcugcaugaccagcugcugcuccugccugaaggggugcugcagcugcggcuccugcugcaaguucgacgaggacgacagcgagcccguccugaagggggugaagcuccacuacacgugauaauaggcuggagccucgguggccuagcuucuugccccuugggccuccccccagccccuccuccccuuccugcacccguacccccguggucuuugaauaaagucugagugggcggcaaaaaaaaaaaaaaaaaaaaaaaaaaaaaaaaaaaaaaaaaaaaaaaaaaaaaaaaaaaaaaaaaaaaaaaaaaaaaaaaaaaaaaaaaaaaaaaaaaaaucuag

SEQ ID NO: 26505 - RNA, 4100 nt, Artificial Sequence
  SARS-CoV-2/Wuhan/WIV05/2019__EPI_ISL_402128 spike protein mRNA gc (1-1273)(L18F_T20N_P26S_D138Y_R190S_K417T_E484K_N501Y_D614G_H655Y _T1027I)
gggaaauaagagagaaaagaagaguaagaagaaauauaagaccccggcgccgccaccauguucguguuccugguccuccugccccuggugagcucccagugcgugaacuucaccaaccgcacgcagcugccgagcgccuacaccaacagcuucacccggggcgucuacuaccccgacaagguguuccgcuccagcgugcugcacuccacccaggaccucuuccugcccuucuucagcaacgucacgugguuccacgccauccacguguccgggaccaacggcaccaagcgguucgacaacccggugcugcccuucaacgacggggucuacuucgcgagcaccgagaaguccaacaucauccgcggcuggaucuucgggacgacccucgacagcaagacccagucccugcugaucgugaacaacgccaccaacguggucaucaaggugugcgaguuccaguucugcaacuaccccuuccucggcguguacuaccacaagaacaacaagagcuggauggaguccgaguuccgggucuacagcuccgccaacaacugcacguucgaguacgugagccagcccuuccugauggaccuggagggcaagcaggggaacuucaagaaccucagcgaguucguguucaagaacaucgacggcuacuucaagaucuacuccaagcacaccccgaucaaccugguccgggaccugccccagggguucagcgcccucgagccccugguggaccugcccaucggcaucaacaucacccgcuuccagacccuccuggcccugcaccgguccuaccucacgccgggggacagcagcuccggcuggaccgcgggcgccgccgccuacuacgugggguaccugcagccccgcaccuuccugcucaaguacaacgagaacggcaccaucacggacgcggucgacugcgcccuggacccccugagcgagaccaagugcacccucaaguccuucaccguggagaaggggaucuaccagacgagcaacuuccgggugcagcccaccgaguccaucguccgcuucccgaacaucaccaaccugugccccuucggcgagguguucaacgccacccgguucgccagcgucuacgccuggaaccgcaagcggaucuccaacugcguggcggacuacagcgugcuguacaacuccgccagcuucuccacguucaagugcuacggcgucagccccaccaagcucaacgaccugugcuucaccaacguguacgccgacuccuucgugauccgcggggacgagguccggcagaucgcccccggccagaccgggaccaucgccgacuacaacuacaagcugccggacgacuucacgggcugcgugaucgcguggaacagcaacaaccucgacuccaaggucgggggcaacuacaacuaccuguaccgccuguuccgcaagagcaaccucaagcccuucgagcgggacaucuccaccgagaucuaccaggccggcagcacccccugcaacggggugaagggcuucaacugcuacuucccccugcaguccuacggguuccagccgaccuacggcgugggguaccagcccuaccggguggucgugcugagcuucgagcuccugcacgcccccgccacggugugcggccccaagaaguccaccaaccuggucaagaacaagugcgugaacuucaacuucaacggccucaccgggaccggcgugcugaccgagagcaacaagaaguuccugccguuccagcaguucgggcgcgacaucgccgacacgaccgacgcgguccgcgacccccagacccuggagauccucgacaucacccccugcagcuucggcgggguguccgugaucacgccgggcaccaacaccagcaaccaggucgccgugcuguaccagggcgugaacugcaccgagguccccguggccauccacgccgaccagcugacgcccaccuggcggguguacuccaccggcagcaacgucuuccagacccgcgccgggugccucaucggcgcggaguacgugaacaacuccuacgagugcgacauccccaucggggccggcaucugcgccagcuaccagacgcagaccaacuccccgcggcgcgcccggagcguggcgucccagagcaucaucgccuacaccaugucccugggcgccgagaacagcgucgccuacuccaacaacagcaucgccauccccaccaacuucacgaucuccgugaccaccgagauccugcccgugagcaugaccaagacgagcgucgacugcaccauguacaucugcggggacuccaccgagugcagcaaccuccugcugcaguacggcuccuucugcacccagcucaaccgcgcgcugacggggaucgccguggagcaggacaagaacacccaggagguguucgcccaggucaagcagaucuacaagacgcccccgaucaaggacuucggcggguucaacuucagccagauccugcccgaccccuccaagcccagcaagcgguccuucaucgaggaccuccuguucaacaaggugacccuggccgacgccggcuucaucaagcaguacggcgacugccucggggacaucgcggcccgcgaccugaucugcgcccagaaguucaacggccugaccgugcucccgccccugcugaccgacgagaugaucgcccaguacaccagcgcccuccuggcggggaccaucacguccggcuggaccuucggggccggcgccgcccugcagauccccuucgcgaugcagauggccuaccgguucaacggcaucggggucacccagaacgugcucuacgagaaccagaagcugaucgccaaccaguucaacagcgccaucggcaagauccaggacucccugagcuccaccgccagcgcgcucgggaagcugcaggacguggucaaccagaacgcccaggcccugaacacgcucgugaagcagcuguccagcaacuucggcgccaucuccagcgugcugaacgacauccucucccgccuggacaaggucgaggccgaggugcagaucgaccggcugaucaccgggcgccuccagagccugcagaccuacgugacccagcagcugauccgggcggccgagauccgcgccagcgccaaccucgccgcgaucaagauguccgagugcguccugggccagagcaagcggguggacuucugcggcaagggguaccaccugauguccuucccccagagcgccccgcacggcguggucuuccuccacgugacguacguccccgcccaggagaagaacuucaccaccgcccccgcgaucugccacgacgggaaggcccacuucccccgcgagggcguguucguguccaacgggacccacugguucgucacgcagcggaacuucuacgagccgcagaucaucaccaccgacaacaccuucgugagcggcaacugcgacguggucaucggcaucgugaacaacacgguguacgacccccugcagcccgagcuggacuccuucaaggaggagcucgacaaguacuucaagaaccacaccagccccgacgucgaccugggggacaucuccggcaucaacgccagcguggugaacauccagaaggagaucgaccgccugaacgaggucgccaagaaccucaacgagucccugaucgaccugcaggagcucgggaaguacgagcaguacaucaaguggccgugguacaucuggcugggcuucaucgccggccugaucgcgaucgugauggugaccaucaugcucugcugcaugaccagcugcugcuccugccugaaggggugcugcagcugcggcuccugcugcaaguucgacgaggacgacagcgagcccguccugaagggggugaagcuccacuacacgugauaauaggcuggagccucgguggccuagcuucuugccccuugggccuccccccagccccuccuccccuuccugcacccguacccccguggucuuugaauaaagucugagugggcggcaaaaaaaaaaaaaaaaaaaaaaaaaaaaaaaaaaaaaaaaaaaaaaaaaaaaaaaaaaaaaaaaaaaaaaaaaaaaaaaaaaaaaaaaaaaaaaaaaaaaucuag

SEQ ID NO: 26506 - RNA, 4100 nt, Artificial Sequence
  SARS-CoV-2/Wuhan/WIV05/2019__EPI_ISL_402128 spike protein mRNA gc (1-1273)(S13I_W152C_L452R_D614G)
gggaaauaagagagaaaagaagaguaagaagaaauauaagaccccggcgccgccaccauguucguguuccugguccuccugccccuggugagcauccagugcgugaaccucaccacccgcacgcagcugccgcccgccuacaccaacagcuucacccggggcgucuacuaccccgacaagguguuccgcuccagcgugcugcacuccacccaggaccucuuccugcccuucuucagcaacgucacgugguuccacgccauccacguguccgggaccaacggcaccaagcgguucgacaacccggugcugcccuucaacgacggggucuacuucgcgagcaccgagaaguccaacaucauccgcggcuggaucuucgggacgacccucgacagcaagacccagucccugcugaucgugaacaacgccaccaacguggucaucaaggugugcgaguuccaguucugcaacgaccccuuccucggcguguacuaccacaagaacaacaagagcugcauggaguccgaguuccgggucuacagcuccgccaacaacugcacguucgaguacgugagccagcccuuccugauggaccuggagggcaagcaggggaacuucaagaaccuccgcgaguucguguucaagaacaucgacggcuacuucaagaucuacuccaagcacaccccgaucaaccugguccgggaccugccccagggguucagcgcccucgagccccugguggaccugcccaucggcaucaacaucacccgcuuccagacccuccuggcccugcaccgguccuaccucacgccgggggacagcagcuccggcuggaccgcgggcgccgccgccuacuacgugggguaccugcagccccgcaccuuccugcucaaguacaacgagaacggcaccaucacggacgcggucgacugcgcccuggacccccugagcgagaccaagugcacccucaaguccuucaccguggagaaggggaucuaccagacgagcaacuuccgggugcagcccaccgaguccaucguccgcuucccgaacaucaccaaccugugccccuucggcgagguguucaacgccacccgguucgccagcgucuacgccuggaaccgcaagcggaucuccaacugcguggcggacuacagcgugcuguacaacuccgccagcuucuccacguucaagugcuacggcgucagccccaccaagcucaacgaccugugcuucaccaacguguacgccgacuccuucgugauccgcggggacgagguccggcagaucgcccccggccagaccgggaagaucgccgacuacaacuacaagcugccggacgacuucacgggcugcgugaucgcguggaacagcaacaaccucgacuccaaggucgggggcaacuacaacuaccgcuaccgccuguuccgcaagagcaaccucaagcccuucgagcgggacaucuccaccgagaucuaccaggccggcagcacccccugcaacgggguggagggcuucaacugcuacuucccccugcaguccuacggguuccagccgaccaacggcgugggguaccagcccuaccggguggucgugcugagcuucgagcuccugcacgcccccgccacggugugcggccccaagaaguccaccaaccuggucaagaacaagugcgugaacuucaacuucaacggccucaccgggaccggcgugcugaccgagagcaacaagaaguuccugccguuccagcaguucgggcgcgacaucgccgacacgaccgacgcgguccgcgacccccagacccuggagauccucgacaucacccccugcagcuucggcgggguguccgugaucacgccgggcaccaacaccagcaaccaggucgccgugcuguaccagggcgugaacugcaccgagguccccguggccauccacgccgaccagcugacgcccaccuggcggguguacuccaccggcagcaacgucuuccagacccgcgccgggugccucaucggcgcggagcacgugaacaacuccuacgagugcgacauccccaucggggccggcaucugcgccagcuaccagacgcagaccaacuccccgcggcgcgcccggagcguggcgucccagagcaucaucgccuacaccaugucccugggcgccgagaacagcgucgccuacuccaacaacagcaucgccauccccaccaacuucacgaucuccgugaccaccgagauccugcccgugagcaugaccaagacgagcgucgacugcaccauguacaucugcggggacuccaccgagugcagcaaccuccugcugcaguacggcuccuucugcacccagcucaaccgcgcgcugacggggaucgccguggagcaggacaagaacacccaggagguguucgcccaggucaagcagaucuacaagacgcccccgaucaaggacuucggcggguucaacuucagccagauccugcccgaccccuccaagcccagcaagcgguccuucaucgaggaccuccuguucaacaaggugacccuggccgacgccggcuucaucaagcaguacggcgacugccucggggacaucgcggcccgcgaccugaucugcgcccagaaguucaacggccugaccgugcucccgccccugcugaccgacgagaugaucgcccaguacaccagcgcccuccuggcggggaccaucacguccggcuggaccuucggggccggcgccgcccugcagauccccuucgcgaugcagauggccuaccgguucaacggcaucggggucacccagaacgugcucuacgagaaccagaagcugaucgccaaccaguucaacagcgccaucggcaagauccaggacucccugagcuccaccgccagcgcgcucgggaagcugcaggacguggucaaccagaacgcccaggcccugaacacgcucgugaagcagcuguccagcaacuucggcgccaucuccagcgugcugaacgacauccucucccgccuggacaaggucgaggccgaggugcagaucgaccggcugaucaccgggcgccuccagagccugcagaccuacgugacccagcagcugauccgggcggccgagauccgcgccagcgccaaccucgccgcgaccaagauguccgagugcguccugggccagagcaagcggguggacuucugcggcaagggguaccaccugauguccuucccccagagcgccccgcacggcguggucuuccuccacgugacguacguccccgcccaggagaagaacuucaccaccgcccccgcgaucugccacgacgggaaggcccacuucccccgcgagggcguguucguguccaacgggacccacugguucgucacgcagcggaacuucuacgagccgcagaucaucaccaccgacaacaccuucgugagcggcaacugcgacguggucaucggcaucgugaacaacacgguguacgacccccugcagcccgagcuggacuccuucaaggaggagcucgacaaguacuucaagaaccacaccagccccgacgucgaccugggggacaucuccggcaucaacgccagcguggugaacauccagaaggagaucgaccgccugaacgaggucgccaagaaccucaacgagucccugaucgaccugcaggagcucgggaaguacgagcaguacaucaaguggccgugguacaucuggcugggcuucaucgccggccugaucgcgaucgugauggugaccaucaugcucugcugcaugaccagcugcugcuccugccugaaggggugcugcagcugcggcuccugcugcaaguucgacgaggacgacagcgagcccguccugaagggggugaagcuccacuacacgugauaauaggcuggagccucgguggccuagcuucuugccccuugggccuccccccagccccuccuccccuuccugcacccguacccccguggucuuugaauaaagucugagugggcggcaaaaaaaaaaaaaaaaaaaaaaaaaaaaaaaaaaaaaaaaaaaaaaaaaaaaaaaaaaaaaaaaaaaaaaaaaaaaaaaaaaaaaaaaaaaaaaaaaaaaucuag

SEQ ID NO: 26507 - RNA, 4100 nt, Artificial Sequence; identical to SEQ ID NO: 26489
  SARS-CoV-2/Wuhan/WIV05/2019__EPI_ISL_402128 spike protein mRNA gc (1-1273)

SEQ ID NO: 26508 - RNA, 4100 nt, Artificial Sequence
  SARS-CoV-2/Wuhan/WIV05/2019__EPI_ISL_402128 spike protein mRNA gc (1-1273)(D614G)
gggaaauaagagagaaaagaagaguaagaagaaauauaagaccccggcgccgccaccauguucguguuccugguccuccugccccuggugagcucccagugcgugaaccucaccacccgcacgcagcugccgcccgccuacaccaacagcuucacccggggcgucuacuaccccgacaagguguuccgcuccagcgugcugcacuccacccaggaccucuuccugcccuucuucagcaacgucacgugguuccacgccauccacguguccgggaccaacggcaccaagcgguucgacaacccggugcugcccuucaacgacggggucuacuucgcgagcaccgagaaguccaacaucauccgcggcuggaucuucgggacgacccucgacagcaagacccagucccugcugaucgugaacaacgccaccaacguggucaucaaggugugcgaguuccaguucugcaacgaccccuuccucggcguguacuaccacaagaacaacaagagcuggauggaguccgaguuccgggucuacagcuccgccaacaacugcacguucgaguacgugagccagcccuuccugauggaccuggagggcaagcaggggaacuucaagaaccuccgcgaguucguguucaagaacaucgacggcuacuucaagaucuacuccaagcacaccccgaucaaccugguccgggaccugccccagggguucagcgcccucgagccccugguggaccugcccaucggcaucaacaucacccgcuuccagacccuccuggcccugcaccgguccuaccucacgccgggggacagcagcuccggcuggaccgcgggcgccgccgccuacuacgugggguaccugcagccccgcaccuuccugcucaaguacaacgagaacggcaccaucacggacgcggucgacugcgcccuggacccccugagcgagaccaagugcacccucaaguccuucaccguggagaaggggaucuaccagacgagcaacuuccgggugcagcccaccgaguccaucguccgcuucccgaacaucaccaaccugugccccuucggcgagguguucaacgccacccgguucgccagcgucuacgccuggaaccgcaagcggaucuccaacugcguggcggacuacagcgugcuguacaacuccgccagcuucuccacguucaagugcuacggcgucagccccaccaagcucaacgaccugugcuucaccaacguguacgccgacuccuucgugauccgcggggacgagguccggcagaucgcccccggccagaccgggaagaucgccgacuacaacuacaagcugccggacgacuucacgggcugcgugaucgcguggaacagcaacaaccucgacuccaaggucgggggcaacuacaacuaccuguaccgccuguuccgcaagagcaaccucaagcccuucgagcgggacaucuccaccgagaucuaccaggccggcagcacccccugcaacgggguggagggcuucaacugcuacuucccccugcaguccuacggguuccagccgaccaacggcgugggguaccagcccuaccggguggucgugcugagcuucgagcuccugcacgcccccgccacggugugcggccccaagaaguccaccaaccuggucaagaacaagugcgugaacuucaacuucaacggccucaccgggaccggcgugcugaccgagagcaacaagaaguuccugccguuccagcaguucgggcgcgacaucgccgacacgaccgacgcgguccgcgacccccagacccuggagauccucgacaucacccccugcagcuucggcgggguguccgugaucacgccgggcaccaacaccagcaaccaggucgccgugcuguaccagggcgugaacugcaccgagguccccguggccauccacgccgaccagcugacgcccaccuggcggguguacuccaccgggagcaacgucuuccagacccgcgccggcugccucaucggggcggagcacgugaacaacuccuacgagugcgacauccccaucggcgccggcaucugcgccagcuaccagacgcagaccaacuccccgcggcgcgcccggagcguggcgucccagagcaucaucgccuacaccaugucccugggggccgagaacagcgucgccuacuccaacaacagcaucgccauccccaccaacuucacgaucuccgugaccaccgagauccugcccgugagcaugaccaagacgagcgucgacugcaccauguacaucugcggcgacuccaccgagugcagcaaccuccugcugcaguacggguccuucugcacccagcucaaccgcgcgcugacgggcaucgccguggagcaggacaagaacacccaggagguguucgcccaggucaagcagaucuacaagacgcccccgaucaaggacuucgggggcuucaacuucagccagauccugcccgaccccuccaagcccagcaagcgguccuucaucgaggaccuccuguucaacaaggugacccuggccgacgccggcuucaucaagcaguacggggacugccucggcgacaucgcggcccgcgaccugaucugcgcccagaaguucaacgggcugaccgugcucccgccccugcugaccgacgagaugaucgcccaguacaccagcgcccuccuggcgggcaccaucacguccggguggaccuucggcgccggcgccgcccugcagauccccuucgcgaugcagauggccuaccgguucaacgggaucggcgucacccagaacgugcucuacgagaaccagaagcugaucgccaaccaguucaacagcgccaucgggaagauccaggacucccugagcuccaccgccagcgcgcucggcaagcugcaggacguggucaaccagaacgcccaggcccugaacacgcucgugaagcagcuguccagcaacuucggggccaucuccagcgugcugaacgacauccucucccgccuggacaaggucgaggccgaggugcagaucgaccggcugaucaccggccgccuccagagccugcagaccuacgugacccagcagcugauccgggcggccgagauccgcgccagcgccaaccucgccgcgaccaagauguccgagugcguccugggccagagcaagcggguggacuucugcgggaagggcuaccaccugauguccuucccccagagcgccccgcacgggguggucuuccuccacgugacguacguccccgcccaggagaagaacuucaccaccgcccccgcgaucugccacgacggcaaggcccacuucccccgcgaggggguguucguguccaacggcacccacugguucgucacgcagcggaacuucuacgagccgcagaucaucaccaccgacaacaccuucgugagcggcaacugcgacguggucaucgggaucgugaacaacacgguguacgacccccugcagcccgagcuggacuccuucaaggaggagcucgacaaguacuucaagaaccacaccagccccgacgucgaccugggcgacaucuccgggaucaacgccagcguggugaacauccagaaggagaucgaccgccugaacgaggucgccaagaaccucaacgagucccugaucgaccugcaggagcucggcaaguacgagcaguacaucaaguggccgugguacaucuggcugggcuucaucgccgggcugaucgcgaucgugauggugaccaucaugcucugcugcaugaccagcugcugcuccugccugaagggcugcugcagcugcggguccugcugcaaguucgacgaggacgacagcgagcccguccugaagggcgugaagcuccacuacacgugauaauaggcuggagccucgguggccuagcuucuugccccuugggccuccccccagccccuccuccccuuccugcacccguacccccguggucuuugaauaaagucugagugggcggcaaaaaaaaaaaaaaaaaaaaaaaaaaaaaaaaaaaaaaaaaaaaaaaaaaaaaaaaaaaaaaaaaaaaaaaaaaaaaaaaaaaaaaaaaaaaaaaaaaaaucuag

SEQ ID NO: 26509 - RNA, 4100 nt, Artificial Sequence
  SARS-CoV-2/Wuhan/WIV05/2019__EPI_ISL_402128 spike protein mRNA gc (1-1273)(A222V_D614G)
gggaaauaagagagaaaagaagaguaagaagaaauauaagaccccggcgccgccaccauguucguguuccugguccuccugccccuggugagcucccagugcgugaaccucaccacccgcacgcagcugccgcccgccuacaccaacagcuucacccggggcgucuacuaccccgacaagguguuccgcuccagcgugcugcacuccacccaggaccucuuccugcccuucuucagcaacgucacgugguuccacgccauccacguguccgggaccaacggcaccaagcgguucgacaacccggugcugcccuucaacgacggggucuacuucgcgagcaccgagaaguccaacaucauccgcggcuggaucuucgggacgacccucgacagcaagacccagucccugcugaucgugaacaacgccaccaacguggucaucaaggugugcgaguuccaguucugcaacgaccccuuccucggcguguacuaccacaagaacaacaagagcuggauggaguccgaguuccgggucuacagcuccgccaacaacugcacguucgaguacgugagccagcccuuccugauggaccuggagggcaagcaggggaacuucaagaaccuccgcgaguucguguucaagaacaucgacggcuacuucaagaucuacuccaagcacaccccgaucaaccugguccgggaccugccccagggguucagcgugcucgagccccugguggaccugcccaucggcaucaacaucacccgcuuccagacccuccuggcccugcaccgguccuaccucacgccgggggacagcagcuccggcuggaccgccggcgcggccgccuacuacgucggguaccugcagccccgcaccuuccugcucaaguacaacgagaacggcaccaucacggacgccguggacugcgcgcuggacccccugagcgagaccaagugcacccucaaguccuucaccguggagaaggggaucuaccagacgagcaacuuccggguccagcccaccgaguccaucgugcgcuucccgaacaucaccaaccugugccccuucggcgaggucuucaacgccacccgguucgccagcguguacgccuggaaccgcaagcggaucuccaacugcguggccgacuacagcguccuguacaacuccgcgagcuucuccacguucaagugcuacggcgugagccccaccaagcucaacgaccugugcuucaccaacguguacgccgacuccuucgucauccgcggggacgaggugcggcagaucgcccccggccagaccgggaagaucgccgacuacaacuacaagcugccggacgacuucacgggcugcgugaucgccuggaacagcaacaaccucgacuccaaggucgggggcaacuacaacuaccuguaccgccuguuccgcaagagcaaccucaagcccuucgagcgggacaucuccaccgagaucuaccaggcgggcagcacccccugcaacgggguggagggcuucaacugcuacuucccccugcaguccuacggguuccagccgaccaacggcgugggguaccagcccuaccgggucguggugcugagcuucgagcuccugcacgcccccgccacggucugcggccccaagaaguccaccaaccuggugaagaacaagugcgugaacuucaacuucaacggccucaccgggaccggcguccugaccgagagcaacaagaaguuccugccguuccagcaguucgggcgcgacaucgccgacacgaccgacgccgugcgcgacccccagacccuggagauccucgacaucacccccugcagcuucggcgggguguccgucaucacgccgggcaccaacaccagcaaccagguggcggugcuguaccagggcgucaacugcaccgaggugcccguggccauccacgccgaccagcugacgcccaccuggcgggucuacuccaccgggagcaacguguuccagacccgcgccggcugccucaucggggccgagcacgugaacaacuccuacgagugcgacauccccaucggcgcgggcaucugcgccagcuaccagacgcagaccaacuccccgcggcgcgcccggagcgucgccucccagagcaucaucgcguacaccaugucccugggggccgagaacagcguggccuacuccaacaacagcaucgccauccccaccaacuucacgaucuccgugaccaccgagauccugcccgucagcaugaccaagacgagcguggacugcaccauguacaucugcggcgacuccaccgagugcagcaaccuccugcugcaguacggguccuucugcacccagcucaaccgcgcccugacgggcaucgcgguggagcaggacaagaacacccaggaggucuucgcccaggugaagcagaucuacaagacgcccccgaucaaggacuucgggggcuucaacuucagccagauccugcccgaccccuccaagcccagcaagcgguccuucaucgaggaccuccuguucaacaaggugacccuggccgacgccggcuucaucaagcaguacggggacugccucggcgacaucgccgcgcgcgaccugaucugcgcccagaaguucaacgggcugaccguccucccgccccugcugaccgacgagaugaucgcccaguacaccagcgcccuccuggccggcaccaucacguccggguggaccuucggcgcgggcgccgcccugcagauccccuucgccaugcagauggcguaccgguucaacgggaucggcgugacccagaacgugcucuacgagaaccagaagcugaucgccaaccaguucaacagcgccaucgggaagauccaggacucccugagcuccaccgccagcgcccucggcaagcugcaggacgucgugaaccagaacgcgcaggcccugaacacgcucgugaagcagcuguccagcaacuucggggccaucuccagcguccugaacgacauccucucccgccuggacaagguggaggccgaggugcagaucgaccggcugaucaccggccgccuccagagccugcagaccuacgucacccagcagcugauccgggccgcggagauccgcgccagcgccaaccucgccgccaccaagauguccgagugcgugcugggccagagcaagcggguggacuucugcgggaagggcuaccaccugauguccuucccccagagcgcgccgcacggggucguguuccuccacgucacguacgugcccgcccaggagaagaacuucaccaccgcccccgccaucugccacgacggcaaggcgcacuucccccgcgaggggguguucgucuccaacggcacccacugguucgugacgcagcggaacuucuacgagccgcagaucaucaccaccgacaacaccuucgugagcggcaacugcgacgucgugaucgggaucgugaacaacacggucuacgacccccugcagcccgagcuggacuccuucaaggaggagcucgacaaguacuucaagaaccacaccagccccgacguggaccugggcgacaucuccgggaucaacgccagcguggucaacauccagaaggagaucgaccgccugaacgagguggccaagaaccucaacgagucccugaucgaccugcaggagcucggcaaguacgagcaguacaucaaguggccgugguacaucuggcugggcuucaucgccgggcugaucgccaucgugauggucaccaucaugcucugcugcaugaccagcugcugcuccugccugaagggcugcugcagcugcggguccugcugcaaguucgacgaggacgacagcgagcccgugcugaagggcgugaagcuccacuacacgugauaauaggcuggagccucgguggccuagcuucuugccccuugggccuccccccagccccuccuccccuuccugcacccguacccccguggucuuugaauaaagucugagugggcggcaaaaaaaaaaaaaaaaaaaaaaaaaaaaaaaaaaaaaaaaaaaaaaaaaaaaaaaaaaaaaaaaaaaaaaaaaaaaaaaaaaaaaaaaaaaaaaaaaaaaucuag

SEQ ID NO: 26510 - RNA, 4100 nt, Artificial Sequence
  SARS-CoV-2/Wuhan/WIV05/2019__EPI_ISL_402128 spike protein mRNA gc (1-1273)(N439K_D614G)
gggaaauaagagagaaaagaagaguaagaagaaauauaagaccccggcgccgccaccauguucguguuccugguccuccugccccuggugagcucccagugcgugaaccucaccacccgcacgcagcugccgcccgccuacaccaacagcuucacccggggcgucuacuaccccgacaagguguuccgcuccagcgugcugcacuccacccaggaccucuuccugcccuucuucagcaacgucacgugguuccacgccauccacguguccgggaccaacggcaccaagcgguucgacaacccggugcugcccuucaacgacggggucuacuucgcgagcaccgagaaguccaacaucauccgcggcuggaucuucgggacgacccucgacagcaagacccagucccugcugaucgugaacaacgccaccaacguggucaucaaggugugcgaguuccaguucugcaacgaccccuuccucggcguguacuaccacaagaacaacaagagcuggauggaguccgaguuccgggucuacagcuccgccaacaacugcacguucgaguacgugagccagcccuuccugauggaccuggagggcaagcaggggaacuucaagaaccuccgcgaguucguguucaagaacaucgacggcuacuucaagaucuacuccaagcacaccccgaucaaccugguccgggaccugccccagggguucagcgcccucgagccccugguggaccugcccaucggcaucaacaucacccgcuuccagacccuccuggcccugcaccgguccuaccucacgccgggggacagcagcuccggcuggaccgcgggcgccgccgccuacuacgugggguaccugcagccccgcaccuuccugcucaaguacaacgagaacggcaccaucacggacgcggucgacugcgcccuggacccccugagcgagaccaagugcacccucaaguccuucaccguggagaaggggaucuaccagacgagcaacuuccgggugcagcccaccgaguccaucguccgcuucccgaacaucaccaaccugugccccuucggcgagguguucaacgccacccgguucgccagcgucuacgccuggaaccgcaagcggaucuccaacugcguggcggacuacagcgugcuguacaacuccgccagcuucuccacguucaagugcuacggcgucagccccaccaagcucaacgaccugugcuucaccaacguguacgccgacuccuucgugauccgcggggacgagguccggcagaucgcccccggccagaccgggaagaucgccgacuacaacuacaagcugccggacgacuucacgggcugcgugaucgcguggaacagcaagaaccucgacuccaaggucgggggcaacuacaacuaccuguaccgccuguuccgcaagagcaaccucaagcccuucgagcgggacaucuccaccgagaucuaccaggccggcagcacccccugcaacgggguggagggcuucaacugcuacuucccccugcaguccuacggguuccagccgaccaacggcgugggguaccagcccuaccggguggucgugcugagcuucgagcuccugcacgcccccgccacggugugcggccccaagaaguccaccaaccuggucaagaacaagugcgugaacuucaacuucaacggccucaccgggaccggcgugcugaccgagagcaacaagaaguuccugccguuccagcaguucgggcgcgacaucgccgacacgaccgacgcgguccgcgacccccagacccuggagauccucgacaucacccccugcagcuucggcgggguguccgugaucacgccgggcaccaacaccagcaaccaggucgccgugcuguaccagggcgugaacugcaccgagguccccguggccauccacgccgaccagcugacgcccaccuggcggguguacuccaccgggagcaacgucuuccagacccgcgccggcugccucaucggggcggagcacgugaacaacuccuacgagugcgacauccccaucggcgccggcaucugcgccagcuaccagacgcagaccaacuccccgcggcgcgcccggagcguggcgucccagagcaucaucgccuacaccaugucccugggggccgagaacagcgucgccuacuccaacaacagcaucgccauccccaccaacuucacgaucuccgugaccaccgagauccugcccgugagcaugaccaagacgagcgucgacugcaccauguacaucugcggcgacuccaccgagugcagcaaccuccugcugcaguacggguccuucugcacccagcucaaccgcgcgcugacgggcaucgccguggagcaggacaagaacacccaggagguguucgcccaggucaagcagaucuacaagacgcccccgaucaaggacuucgggggcuucaacuucagccagauccugcccgaccccuccaagcccagcaagcgguccuucaucgaggaccuccuguucaacaaggugacccuggccgacgccggcuucaucaagcaguacggggacugccucggcgacaucgcggcccgcgaccugaucugcgcccagaaguucaacgggcugaccgugcucccgccccugcugaccgacgagaugaucgcccaguacaccagcgcccuccuggcgggcaccaucacguccggguggaccuucggcgccggcgccgcccugcagauccccuucgcgaugcagauggccuaccgguucaacgggaucggcgucacccagaacgugcucuacgagaaccagaagcugaucgccaaccaguucaacagcgccaucgggaagauccaggacucccugagcuccaccgccagcgcgcucggcaagcugcaggacguggucaaccagaacgcccaggcccugaacacgcucgugaagcagcuguccagcaacuucggggccaucuccagcgugcugaacgacauccucucccgccuggacaaggucgaggccgaggugcagaucgaccggcugaucaccggccgccuccagagccugcagaccuacgugacccagcagcugauccgggcggccgagauccgcgccagcgccaaccucgccgcgaccaagauguccgagugcguccugggccagagcaagcggguggacuucugcgggaagggcuaccaccugauguccuucccccagagcgccccgcacgggguggucuuccuccacgugacguacguccccgcccaggagaagaacuucaccaccgcccccgcgaucugccacgacggcaaggcccacuucccccgcgaggggguguucguguccaacggcacccacugguucgucacgcagcggaacuucuacgagccgcagaucaucaccaccgacaacaccuucgugagcggcaacugcgacguggucaucgggaucgugaacaacacgguguacgacccccugcagcccgagcuggacuccuucaaggaggagcucgacaaguacuucaagaaccacaccagccccgacgucgaccugggcgacaucuccgggaucaacgccagcguggugaacauccagaaggagaucgaccgccugaacgaggucgccaagaaccucaacgagucccugaucgaccugcaggagcucggcaaguacgagcaguacaucaaguggccgugguacaucuggcugggcuucaucgccgggcugaucgcgaucgugauggugaccaucaugcucugcugcaugaccagcugcugcuccugccugaagggcugcugcagcugcggguccugcugcaaguucgacgaggacgacagcgagcccguccugaagggcgugaagcuccacuacacgugauaauaggcuggagccucgguggccuagcuucuugccccuugggccuccccccagccccuccuccccuuccugcacccguacccccguggucuuugaauaaagucugagugggcggcaaaaaaaaaaaaaaaaaaaaaaaaaaaaaaaaaaaaaaaaaaaaaaaaaaaaaaaaaaaaaaaaaaaaaaaaaaaaaaaaaaaaaaaaaaaaaaaaaaaaucuag

SEQ ID NO: 26511 - RNA, 4100 nt, Artificial Sequence
  SARS-CoV-2/Wuhan/WIV05/2019__EPI_ISL_402128 spike protein mRNA gc (1-1273)(S477N_D614G)
gggaaauaagagagaaaagaagaguaagaagaaauauaagaccccggcgccgccaccauguucguguuccugguccuccugccccuggugagcucccagugcgugaaccucaccacccgcacgcagcugccgcccgccuacaccaacagcuucacccggggcgucuacuaccccgacaagguguuccgcuccagcgugcugcacuccacccaggaccucuuccugcccuucuucagcaacgucacgugguuccacgccauccacguguccgggaccaacggcaccaagcgguucgacaacccggugcugcccuucaacgacggggucuacuucgcgagcaccgagaaguccaacaucauccgcggcuggaucuucgggacgacccucgacagcaagacccagucccugcugaucgugaacaacgccaccaacguggucaucaaggugugcgaguuccaguucugcaacgaccccuuccucggcguguacuaccacaagaacaacaagagcuggauggaguccgaguuccgggucuacagcuccgccaacaacugcacguucgaguacgugagccagcccuuccugauggaccuggagggcaagcaggggaacuucaagaaccuccgcgaguucguguucaagaacaucgacggcuacuucaagaucuacuccaagcacaccccgaucaaccugguccgggaccugccccagggguucagcgcccucgagccccugguggaccugcccaucggcaucaacaucacccgcuuccagacccuccuggcccugcaccgguccuaccucacgccgggggacagcagcuccggcuggaccgcgggcgccgccgccuacuacgugggguaccugcagccccgcaccuuccugcucaaguacaacgagaacggcaccaucacggacgcggucgacugcgcccuggacccccugagcgagaccaagugcacccucaaguccuucaccguggagaaggggaucuaccagacgagcaacuuccgggugcagcccaccgaguccaucguccgcuucccgaacaucaccaaccugugccccuucggcgagguguucaacgccacccgguucgccagcgucuacgccuggaaccgcaagcggaucuccaacugcguggcggacuacagcgugcuguacaacuccgccagcuucuccacguucaagugcuacggcgucagccccaccaagcucaacgaccugugcuucaccaacguguacgccgacuccuucgugauccgcggggacgagguccggcagaucgcccccggccagaccgggaagaucgccgacuacaacuacaagcugccggacgacuucacgggcugcgugaucgcguggaacagcaacaaccucgacuccaaggucgggggcaacuacaacuaccuguaccgccuguuccgcaagagcaaccucaagcccuucgagcgggacaucuccaccgagaucuaccaggccggcaacacccccugcaacgggguggagggcuucaacugcuacuucccccugcagagcuacggguuccagccgaccaacggcgugggguaccagcccuaccggguggucgugcuguccuucgagcuccugcacgcccccgccacggugugcggccccaagaaguccaccaaccuggucaagaacaagugcgugaacuucaacuucaacggccucaccgggaccggcgugcugaccgagagcaacaagaaguuccugccguuccagcaguucgggcgcgacaucgccgacacgaccgacgcgguccgcgacccccagacccuggagauccucgacaucacccccugcagcuucggcggggugagcgugaucacgccgggcaccaacaccuccaaccaggucgccgugcuguaccagggcgugaacugcaccgagguccccguggccauccacgccgaccagcugacgcccaccuggcggguguacagcaccggguccaacgucuuccagacccgcgccggcugccucaucggggcggagcacgugaacaacagcuacgagugcgacauccccaucggcgccggcaucugcgccuccuaccagacgcagaccaacagcccgcggcgcgcccgguccguggcgagccaguccaucaucgccuacaccaugagccugggggccgagaacuccgucgccuacagcaacaacuccaucgccauccccaccaacuucacgaucagcgugaccaccgagauccugcccguguccaugaccaagacgagcgucgacugcaccauguacaucugcggcgacagcaccgagugcuccaaccuccugcugcaguacgggagcuucugcacccagcucaaccgcgcgcugacgggcaucgccguggagcaggacaagaacacccaggagguguucgcccaggucaagcagaucuacaagacgcccccgaucaaggacuucgggggcuucaacuucucccagauccugcccgaccccagcaagcccuccaagcggagcuucaucgaggaccuccuguucaacaaggugacccuggccgacgccggcuucaucaagcaguacggggacugccucggcgacaucgcggcccgcgaccugaucugcgcccagaaguucaacgggcugaccgugcucccgccccugcugaccgacgagaugaucgcccaguacaccuccgcccuccuggcgggcaccaucacgagcggguggaccuucggcgccggcgccgcccugcagauccccuucgcgaugcagauggccuaccgguucaacgggaucggcgucacccagaacgugcucuacgagaaccagaagcugaucgccaaccaguucaacuccgccaucgggaagauccaggacagccuguccagcaccgccuccgcgcucggcaagcugcaggacguggucaaccagaacgcccaggcccugaacacgcucgugaagcagcugagcuccaacuucggggccaucagcuccgugcugaacgacauccucagccgccuggacaaggucgaggccgaggugcagaucgaccggcugaucaccggccgccuccagucccugcagaccuacgugacccagcagcugauccgggcggccgagauccgcgccagcgccaaccucgccgcgaccaagaugagcgagugcguccugggccaguccaagcggguggacuucugcgggaagggcuaccaccugaugagcuucccccaguccgccccgcacgggguggucuuccuccacgugacguacguccccgcccaggagaagaacuucaccaccgcccccgcgaucugccacgacggcaaggcccacuucccccgcgaggggguguucgugagcaacggcacccacugguucgucacgcagcggaacuucuacgagccgcagaucaucaccaccgacaacaccuucguguccggcaacugcgacguggucaucgggaucgugaacaacacgguguacgacccccugcagcccgagcuggacagcuucaaggaggagcucgacaaguacuucaagaaccacaccucccccgacgucgaccugggcgacaucagcgggaucaacgccuccguggugaacauccagaaggagaucgaccgccugaacgaggucgccaagaaccucaacgagagccugaucgaccugcaggagcucggcaaguacgagcaguacaucaaguggccgugguacaucuggcugggcuucaucgccgggcugaucgcgaucgugauggugaccaucaugcucugcugcaugaccuccugcugcagcugccugaagggcugcugcuccugcgggagcugcugcaaguucgacgaggacgacuccgagcccguccugaagggcgugaagcuccacuacacgugauaauaggcuggagccucgguggccuagcuucuugccccuugggccuccccccagccccuccuccccuuccugcacccguacccccguggucuuugaauaaagucugagugggcggcaaaaaaaaaaaaaaaaaaaaaaaaaaaaaaaaaaaaaaaaaaaaaaaaaaaaaaaaaaaaaaaaaaaaaaaaaaaaaaaaaaaaaaaaaaaaaaaaaaaaucuag

SEQ ID NO: 26512 - RNA, 4100 nt, Artificial Sequence
  SARS-CoV-2/Wuhan/WIV05/2019__EPI_ISL_402128 spike protein mRNA gc (1-1273)(N501Y_D614G)
gggaaauaagagagaaaagaagaguaagaagaaauauaagaccccggcgccgccaccauguucguguuccugguccuccugccccuggugagcucccagugcgugaaccucaccacccgcacgcagcugccgcccgccuacaccaacagcuucacccggggcgucuacuaccccgacaagguguuccgcuccagcgugcugcacuccacccaggaccucuuccugcccuucuucagcaacgucacgugguuccacgccauccacguguccgggaccaacggcaccaagcgguucgacaacccggugcugcccuucaacgacggggucuacuucgcgagcaccgagaaguccaacaucauccgcggcuggaucuucgggacgacccucgacagcaagacccagucccugcugaucgugaacaacgccaccaacguggucaucaaggugugcgaguuccaguucugcaacgaccccuuccucggcguguacuaccacaagaacaacaagagcuggauggaguccgaguuccgggucuacagcuccgccaacaacugcacguucgaguacgugagccagcccuuccugauggaccuggagggcaagcaggggaacuucaagaaccuccgcgaguucguguucaagaacaucgacggcuacuucaagaucuacuccaagcacaccccgaucaaccugguccgggaccugccccagggguucagcgcccucgagccccugguggaccugcccaucggcaucaacaucacccgcuuccagacccuccuggcccugcaccgguccuaccucacgccgggggacagcagcuccggcuggaccgcgggcgccgccgccuacuacgugggguaccugcagccccgcaccuuccugcucaaguacaacgagaacggcaccaucacggacgcggucgacugcgcccuggacccccugagcgagaccaagugcacccucaaguccuucaccguggagaaggggaucuaccagacgagcaacuuccgggugcagcccaccgaguccaucguccgcuucccgaacaucaccaaccugugccccuucggcgagguguucaacgccacccgguucgccagcgucuacgccuggaaccgcaagcggaucuccaacugcguggcggacuacagcgugcuguacaacuccgccagcuucuccacguucaagugcuacggcgucagccccaccaagcucaacgaccugugcuucaccaacguguacgccgacuccuucgugauccgcggggacgagguccggcagaucgcccccggccagaccgggaagaucgccgacuacaacuacaagcugccggacgacuucacgggcugcgugaucgcguggaacagcaacaaccucgacuccaaggucgggggcaacuacaacuaccuguaccgccuguuccgcaagagcaaccucaagcccuucgagcgggacaucuccaccgagaucuaccaggccggcagcacccccugcaacgggguggagggcuucaacugcuacuucccccugcaguccuacggguuccagccgaccuacggcgugggguaccagcccuaccggguggucgugcugagcuucgagcuccugcacgcccccgccacggugugcggccccaagaaguccaccaaccuggucaagaacaagugcgugaacuucaacuucaacggccucaccgggaccggcgugcugaccgagagcaacaagaaguuccugccguuccagcaguucgggcgcgacaucgccgacacgaccgacgcgguccgcgacccccagacccuggagauccucgacaucacccccugcagcuucggcgggguguccgugaucacgccgggcaccaacaccagcaaccaggucgccgugcuguaccagggcgugaacugcaccgagguccccguggccauccacgccgaccagcugacgcccaccuggcggguguacuccaccgggagcaacgucuuccagacccgcgccggcugccucaucggggcggagcacgugaacaacuccuacgagugcgacauccccaucggcgccggcaucugcgccagcuaccagacgcagaccaacuccccgcggcgcgcccggagcguggcgucccagagcaucaucgccuacaccaugucccugggggccgagaacagcgucgccuacuccaacaacagcaucgccauccccaccaacuucacgaucuccgugaccaccgagauccugcccgugagcaugaccaagacgagcgucgacugcaccauguacaucugcggcgacuccaccgagugcagcaaccuccugcugcaguacggguccuucugcacccagcucaaccgcgcgcugacgggcaucgccguggagcaggacaagaacacccaggagguguucgcccaggucaagcagaucuacaagacgcccccgaucaaggacuucgggggcuucaacuucagccagauccugcccgaccccuccaagcccagcaagcgguccuucaucgaggaccuccuguucaacaaggugacccuggccgacgccggcuucaucaagcaguacggggacugccucggcgacaucgcggcccgcgaccugaucugcgcccagaaguucaacgggcugaccgugcucccgccccugcugaccgacgagaugaucgcccaguacaccagcgcccuccuggcgggcaccaucacguccggguggaccuucggcgccggcgccgcccugcagauccccuucgcgaugcagauggccuaccgguucaacgggaucggcgucacccagaacgugcucuacgagaaccagaagcugaucgccaaccaguucaacagcgccaucgggaagauccaggacucccugagcuccaccgccagcgcgcucggcaagcugcaggacguggucaaccagaacgcccaggcccugaacacgcucgugaagcagcuguccagcaacuucggggccaucuccagcgugcugaacgacauccucucccgccuggacaaggucgaggccgaggugcagaucgaccggcugaucaccggccgccuccagagccugcagaccuacgugacccagcagcugauccgggcggccgagauccgcgccagcgccaaccucgccgcgaccaagauguccgagugcguccugggccagagcaagcggguggacuucugcgggaagggcuaccaccugauguccuucccccagagcgccccgcacgggguggucuuccuccacgugacguacguccccgcccaggagaagaacuucaccaccgcccccgcgaucugccacgacggcaaggcccacuucccccgcgaggggguguucguguccaacggcacccacugguucgucacgcagcggaacuucuacgagccgcagaucaucaccaccgacaacaccuucgugagcggcaacugcgacguggucaucgggaucgugaacaacacgguguacgacccccugcagcccgagcuggacuccuucaaggaggagcucgacaaguacuucaagaaccacaccagccccgacgucgaccugggcgacaucuccgggaucaacgccagcguggugaacauccagaaggagaucgaccgccugaacgaggucgccaagaaccucaacgagucccugaucgaccugcaggagcucggcaaguacgagcaguacaucaaguggccgugguacaucuggcugggcuucaucgccgggcugaucgcgaucgugauggugaccaucaugcucugcugcaugaccagcugcugcuccugccugaagggcugcugcagcugcggguccugcugcaaguucgacgaggacgacagcgagcccguccugaagggcgugaagcuccacuacacgugauaauaggcuggagccucgguggccuagcuucuugccccuugggccuccccccagccccuccuccccuuccugcacccguacccccguggucuuugaauaaagucugagugggcggcaaaaaaaaaaaaaaaaaaaaaaaaaaaaaaaaaaaaaaaaaaaaaaaaaaaaaaaaaaaaaaaaaaaaaaaaaaaaaaaaaaaaaaaaaaaaaaaaaaaaucuag

SEQ ID NO: 26513 - RNA, 4094 nt, Artificial Sequence
  SARS-CoV-2/Wuhan/WIV05/2019__EPI_ISL_402128 spike protein mRNA gc (1-1273)(H69del_V70del_D614G)
gggaaauaagagagaaaagaagaguaagaagaaauauaagaccccggcgccgccaccauguucguguuccugguccuccugccccuggugagcucccagugcgugaaccucaccacccgcacgcagcugccgcccgccuacaccaacagcuucacccggggcgucuacuaccccgacaagguguuccgcuccagcgugcugcacuccacccaggaccucuuccugcccuucuucagcaacgucacgugguuccacgccaucuccgggaccaacggcaccaagcgguucgacaacccggugcugcccuucaacgacgggguguacuucgcgagcaccgagaaguccaacaucauccgcggcuggaucuucgggacgacccucgacagcaagacccagucccugcugaucgucaacaacgccaccaacguggugaucaaggucugcgaguuccaguucugcaacgaccccuuccucggcguguacuaccacaagaacaacaagagcuggauggaguccgaguuccggguguacagcuccgccaacaacugcacguucgaguacgucagccagcccuuccugauggaccuggagggcaagcaggggaacuucaagaaccuccgcgaguucguguucaagaacaucgacggcuacuucaagaucuacuccaagcacaccccgaucaaccuggugcgggaccugccccagggguucagcgcccucgagccccuggucgaccugcccaucggcaucaacaucacccgcuuccagacccuccuggcccugcaccgguccuaccucacgccgggggacagcagcuccggcuggaccgcgggcgccgccgccuacuacgugggguaccugcagccccgcaccuuccugcucaaguacaacgagaacggcaccaucacggacgcgguggacugcgcccuggacccccugagcgagaccaagugcacccucaaguccuucaccgucgagaaggggaucuaccagacgagcaacuuccgggugcagcccaccgaguccaucgugcgcuucccgaacaucaccaaccugugccccuucggcgaggucuucaacgccacccgguucgccagcguguacgccuggaaccgcaagcggaucuccaacugcgucgcggacuacagcgugcuguacaacuccgccagcuucuccacguucaagugcuacggcgugagccccaccaagcucaacgaccugugcuucaccaacgucuacgccgacuccuucgugauccgcggggacgaggugcggcagaucgcccccggccagaccgggaagaucgccgacuacaacuacaagcugccggacgacuucacgggcugcgucaucgcguggaacagcaacaaccucgacuccaaggucgggggcaacuacaacuaccuguaccgccuguuccgcaagagcaaccucaagcccuucgagcgggacaucuccaccgagaucuaccaggccggcagcacccccugcaacgggguggagggcuucaacugcuacuucccccugcaguccuacggguuccagccgaccaacggcgugggguaccagcccuaccggguggugguccugagcuucgagcuccugcacgcccccgccacggugugcggccccaagaaguccaccaaccuggugaagaacaagugcgucaacuucaacuucaacggccucaccgggaccggcgugcugaccgagagcaacaagaaguuccugccguuccagcaguucgggcgcgacaucgccgacacgaccgacgcggugcgcgacccccagacccuggagauccucgacaucacccccugcagcuucggcggggucuccgugaucacgccgggcaccaacaccagcaaccagguggccguccuguaccagggcgugaacugcaccgaggugcccgucgccauccacgccgaccagcugacgcccaccuggcggguguacuccaccgggagcaacguguuccagacccgcgccggcugccucaucggggcggagcacgucaacaacuccuacgagugcgacauccccaucggcgccggcaucugcgccagcuaccagacgcagaccaacuccccgcggcgcgcccggagcguggcgucccagagcaucaucgccuacaccaugucccugggggccgagaacagcguggccuacuccaacaacagcaucgccauccccaccaacuucacgaucuccgucaccaccgagauccugcccgugagcaugaccaagacgagcguggacugcaccauguacaucugcggcgacuccaccgagugcagcaaccuccugcugcaguacggguccuucugcacccagcucaaccgcgcgcugacgggcaucgccgucgagcaggacaagaacacccaggagguguucgcccaggugaagcagaucuacaagacgcccccgaucaaggacuucgggggcuucaacuucagccagauccugcccgaccccuccaagcccagcaagcgguccuucaucgaggaccuccuguucaacaaggucacccuggccgacgccggcuucaucaagcaguacggggacugccucggcgacaucgcggcccgcgaccugaucugcgcccagaaguucaacgggcugaccgugcucccgccccugcugaccgacgagaugaucgcccaguacaccagcgcccuccuggcgggcaccaucacguccggguggaccuucggcgccggcgccgcccugcagauccccuucgcgaugcagauggccuaccgguucaacgggaucggcgugacccagaacguccucuacgagaaccagaagcugaucgccaaccaguucaacagcgccaucgggaagauccaggacucccugagcuccaccgccagcgcgcucggcaagcugcaggacguggugaaccagaacgcccaggcccugaacacgcucgucaagcagcuguccagcaacuucggggccaucuccagcgugcugaacgacauccucucccgccuggacaagguggaggccgagguccagaucgaccggcugaucaccggccgccuccagagccugcagaccuacgugacccagcagcugauccgggcggccgagauccgcgccagcgccaaccucgccgcgaccaagauguccgagugcgugcugggccagagcaagcgggucgacuucugcgggaagggcuaccaccugauguccuucccccagagcgccccgcacggggugguguuccuccacgucacguacgugcccgcccaggagaagaacuucaccaccgcccccgcgaucugccacgacggcaaggcccacuucccccgcgagggggucuucguguccaacggcacccacugguucgugacgcagcggaacuucuacgagccgcagaucaucaccaccgacaacaccuucgucagcggcaacugcgacguggugaucgggaucgucaacaacacgguguacgacccccugcagcccgagcuggacuccuucaaggaggagcucgacaaguacuucaagaaccacaccagccccgacguggaccugggcgacaucuccgggaucaacgccagcgucgugaacauccagaaggagaucgaccgccugaacgagguggccaagaaccucaacgagucccugaucgaccugcaggagcucggcaaguacgagcaguacaucaaguggccgugguacaucuggcugggcuucaucgccgggcugaucgcgaucgucauggugaccaucaugcucugcugcaugaccagcugcugcuccugccugaagggcugcugcagcugcggguccugcugcaaguucgacgaggacgacagcgagcccgugcugaagggcgucaagcuccacuacacgugauaauaggcuggagccucgguggccuagcuucuugccccuugggccuccccccagccccuccuccccuuccugcacccguacccccguggucuuugaauaaagucugagugggcggcaaaaaaaaaaaaaaaaaaaaaaaaaaaaaaaaaaaaaaaaaaaaaaaaaaaaaaaaaaaaaaaaaaaaaaaaaaaaaaaaaaaaaaaaaaaaaaaaaaaaucuag

SEQ ID NO: 26514 - RNA, 4100 nt, Artificial Sequence
  SARS-CoV-2/Wuhan/WIV05/2019__EPI_ISL_402128 spike protein mRNA gc (1-1273)(Y453F_D614G)
gggaaauaagagagaaaagaagaguaagaagaaauauaagaccccggcgccgccaccauguucguguuccugguccuccugccccuggugagcucccagugcgugaaccucaccacccgcacgcagcugccgcccgccuacaccaacagcuucacccggggcgucuacuaccccgacaagguguuccgcuccagcgugcugcacuccacccaggaccucuuccugcccuucuucagcaacgucacgugguuccacgccauccacguguccgggaccaacggcaccaagcgguucgacaacccggugcugcccuucaacgacggggucuacuucgcgagcaccgagaaguccaacaucauccgcggcuggaucuucgggacgacccucgacagcaagacccagucccugcugaucgugaacaacgccaccaacguggucaucaaggugugcgaguuccaguucugcaacgaccccuuccucggcguguacuaccacaagaacaacaagagcuggauggaguccgaguuccgggucuacagcuccgccaacaacugcacguucgaguacgugagccagcccuuccugauggaccuggagggcaagcaggggaacuucaagaaccuccgcgaguucguguucaagaacaucgacggcuacuucaagaucuacuccaagcacaccccgaucaaccugguccgggaccugccccagggguucagcgcccucgagccccugguggaccugcccaucggcaucaacaucacccgcuuccagacccuccuggcccugcaccgguccuaccucacgccgggggacagcagcuccggcuggaccgcgggcgccgccgccuacuacgugggguaccugcagccccgcaccuuccugcucaaguacaacgagaacggcaccaucacggacgcggucgacugcgcccuggacccccugagcgagaccaagugcacccucaaguccuucaccguggagaaggggaucuaccagacgagcaacuuccgggugcagcccaccgaguccaucguccgcuucccgaacaucaccaaccugugccccuucggcgagguguucaacgccacccgguucgccagcgucuacgccuggaaccgcaagcggaucuccaacugcguggcggacuacagcgugcuguacaacuccgccagcuucuccacguucaagugcuacggcgucagccccaccaagcucaacgaccugugcuucaccaacguguacgccgacuccuucgugauccgcggggacgagguccggcagaucgcccccggccagaccgggaagaucgccgacuacaacuacaagcugccggacgacuucacgggcugcgugaucgcguggaacagcaacaaccucgacuccaaggucgggggcaacuacaacuaccuguuccgccuguuccgcaagagcaaccucaagcccuucgagcgggacaucuccaccgagaucuaccaggccggcagcacccccugcaacgggguggagggcuucaacugcuacuucccccugcaguccuacggguuccagccgaccaacggcgugggguaccagcccuaccggguggucgugcugagcuucgagcuccugcacgcccccgccacggugugcggccccaagaaguccaccaaccuggucaagaacaagugcgugaacuucaacuucaacggccucaccgggaccggcgugcugaccgagagcaacaagaaguuccugccguuccagcaguucgggcgcgacaucgccgacacgaccgacgcgguccgcgacccccagacccuggagauccucgacaucacccccugcagcuucggcgggguguccgugaucacgccgggcaccaacaccagcaaccaggucgccgugcuguaccagggcgugaacugcaccgagguccccguggccauccacgccgaccagcugacgcccaccuggcggguguacuccaccgggagcaacgucuuccagacccgcgccggcugccucaucggggcggagcacgugaacaacuccuacgagugcgacauccccaucggcgccggcaucugcgccagcuaccagacgcagaccaacuccccgcggcgcgcccggagcguggcgucccagagcaucaucgccuacaccaugucccugggggccgagaacagcgucgccuacuccaacaacagcaucgccauccccaccaacuucacgaucuccgugaccaccgagauccugcccgugagcaugaccaagacgagcgucgacugcaccauguacaucugcggcgacuccaccgagugcagcaaccuccugcugcaguacggguccuucugcacccagcucaaccgcgcgcugacgggcaucgccguggagcaggacaagaacacccaggagguguucgcccaggucaagcagaucuacaagacgcccccgaucaaggacuucgggggcuucaacuucagccagauccugcccgaccccuccaagcccagcaagcgguccuucaucgaggaccuccuguucaacaaggugacccuggccgacgccggcuucaucaagcaguacggggacugccucggcgacaucgcggcccgcgaccugaucugcgcccagaaguucaacgggcugaccgugcucccgccccugcugaccgacgagaugaucgcccaguacaccagcgcccuccuggcgggcaccaucacguccggguggaccuucggcgccggcgccgcccugcagauccccuucgcgaugcagauggccuaccgguucaacgggaucggcgucacccagaacgugcucuacgagaaccagaagcugaucgccaaccaguucaacagcgccaucgggaagauccaggacucccugagcuccaccgccagcgcgcucggcaagcugcaggacguggucaaccagaacgcccaggcccugaacacgcucgugaagcagcuguccagcaacuucggggccaucuccagcgugcugaacgacauccucucccgccuggacaaggucgaggccgaggugcagaucgaccggcugaucaccggccgccuccagagccugcagaccuacgugacccagcagcugauccgggcggccgagauccgcgccagcgccaaccucgccgcgaccaagauguccgagugcguccugggccagagcaagcggguggacuucugcgggaagggcuaccaccugauguccuucccccagagcgccccgcacgggguggucuuccuccacgugacguacguccccgcccaggagaagaacuucaccaccgcccccgcgaucugccacgacggcaaggcccacuucccccgcgaggggguguucguguccaacggcacccacugguucgucacgcagcggaacuucuacgagccgcagaucaucaccaccgacaacaccuucgugagcggcaacugcgacguggucaucgggaucgugaacaacacgguguacgacccccugcagcccgagcuggacuccuucaaggaggagcucgacaaguacuucaagaaccacaccagccccgacgucgaccugggcgacaucuccgggaucaacgccagcguggugaacauccagaaggagaucgaccgccugaacgaggucgccaagaaccucaacgagucccugaucgaccugcaggagcucggcaaguacgagcaguacaucaaguggccgugguacaucuggcugggcuucaucgccgggcugaucgcgaucgugauggugaccaucaugcucugcugcaugaccagcugcugcuccugccugaagggcugcugcagcugcggguccugcugcaaguucgacgaggacgacagcgagcccguccugaagggcgugaagcuccacuacacgugauaauaggcuggagccucgguggccuagcuucuugccccuugggccuccccccagccccuccuccccuuccugcacccguacccccguggucuuugaauaaagucugagugggcggcaaaaaaaaaaaaaaaaaaaaaaaaaaaaaaaaaaaaaaaaaaaaaaaaaaaaaaaaaaaaaaaaaaaaaaaaaaaaaaaaaaaaaaaaaaaaaaaaaaaaucuag

SEQ ID NO: 26515 - RNA, 4100 nt, Artificial Sequence
  SARS-CoV-2/Wuhan/WIV05/2019__EPI_ISL_402128 spike protein mRNA gc (1-1273)(D614G_I692V)
gggaaauaagagagaaaagaagaguaagaagaaauauaagaccccggcgccgccaccauguucguguuccugguccuccugccccuggugagcucccagugcgugaaccucaccacccgcacgcagcugccgcccgccuacaccaacagcuucacccggggcgucuacuaccccgacaagguguuccgcuccagcgugcugcacuccacccaggaccucuuccugcccuucuucagcaacgucacgugguuccacgccauccacguguccgggaccaacggcaccaagcgguucgacaacccggugcugcccuucaacgacggggucuacuucgcgagcaccgagaaguccaacaucauccgcggcuggaucuucgggacgacccucgacagcaagacccagucccugcugaucgugaacaacgccaccaacguggucaucaaggugugcgaguuccaguucugcaacgaccccuuccucggcguguacuaccacaagaacaacaagagcuggauggaguccgaguuccgggucuacagcuccgccaacaacugcacguucgaguacgugagccagcccuuccugauggaccuggagggcaagcaggggaacuucaagaaccuccgcgaguucguguucaagaacaucgacggcuacuucaagaucuacuccaagcacaccccgaucaaccugguccgggaccugccccagggguucagcgcccucgagccccugguggaccugcccaucggcaucaacaucacccgcuuccagacccuccuggcccugcaccgguccuaccucacgccgggggacagcagcuccggcuggaccgcgggcgccgccgccuacuacgugggguaccugcagccccgcaccuuccugcucaaguacaacgagaacggcaccaucacggacgcggucgacugcgcccuggacccccugagcgagaccaagugcacccucaaguccuucaccguggagaaggggaucuaccagacgagcaacuuccgggugcagcccaccgaguccaucguccgcuucccgaacaucaccaaccugugccccuucggcgagguguucaacgccacccgguucgccagcgucuacgccuggaaccgcaagcggaucuccaacugcguggcggacuacagcgugcuguacaacuccgccagcuucuccacguucaagugcuacggcgucagccccaccaagcucaacgaccugugcuucaccaacguguacgccgacuccuucgugauccgcggggacgagguccggcagaucgcccccggccagaccgggaagaucgccgacuacaacuacaagcugccggacgacuucacgggcugcgugaucgcguggaacagcaacaaccucgacuccaaggucgggggcaacuacaacuaccuguaccgccuguuccgcaagagcaaccucaagcccuucgagcgggacaucuccaccgagaucuaccaggccggcagcacccccugcaacgggguggagggcuucaacugcuacuucccccugcaguccuacggguuccagccgaccaacggcgugggguaccagcccuaccggguggucgugcugagcuucgagcuccugcacgcccccgccacggugugcggccccaagaaguccaccaaccuggucaagaacaagugcgugaacuucaacuucaacggccucaccgggaccggcgugcugaccgagagcaacaagaaguuccugccguuccagcaguucgggcgcgacaucgccgacacgaccgacgcgguccgcgacccccagacccuggagauccucgacaucacccccugcagcuucggcgggguguccgugaucacgccgggcaccaacaccagcaaccaggucgccgugcuguaccagggcgugaacugcaccgagguccccguggccauccacgccgaccagcugacgcccaccuggcggguguacuccaccgggagcaacgucuuccagacccgcgccggcugccucaucggggcggagcacgugaacaacuccuacgagugcgacauccccaucggcgccggcaucugcgccagcuaccagacgcagaccaacuccccgcggcgcgcccggagcguggcgucccagagcgucaucgccuacaccaugucccugggggccgagaacagcguggccuacuccaacaacagcaucgccauccccaccaacuucacgaucuccgugaccaccgagauccugcccgucagcaugaccaagacgagcguggacugcaccauguacaucugcggcgacuccaccgagugcagcaaccuccugcugcaguacggguccuucugcacccagcucaaccgcgcgcugacgggcaucgccguggagcaggacaagaacacccaggaggucuucgcccaggugaagcagaucuacaagacgcccccgaucaaggacuucgggggcuucaacuucagccagauccugcccgaccccuccaagcccagcaagcgguccuucaucgaggaccuccuguucaacaaggugacccuggccgacgccggcuucaucaagcaguacggggacugccucggcgacaucgcggcccgcgaccugaucugcgcccagaaguucaacgggcugaccguccucccgccccugcugaccgacgagaugaucgcccaguacaccagcgcccuccuggcgggcaccaucacguccggguggaccuucggcgccggcgccgcccugcagauccccuucgcgaugcagauggccuaccgguucaacgggaucggcgugacccagaacgugcucuacgagaaccagaagcugaucgccaaccaguucaacagcgccaucgggaagauccaggacucccugagcuccaccgccagcgcgcucggcaagcugcaggacgucgugaaccagaacgcccaggcccugaacacgcucgugaagcagcuguccagcaacuucggggccaucuccagcguccugaacgacauccucucccgccuggacaagguggaggccgaggugcagaucgaccggcugaucaccggccgccuccagagccugcagaccuacgucacccagcagcugauccgggcggccgagauccgcgccagcgccaaccucgccgcgaccaagauguccgagugcgugcugggccagagcaagcggguggacuucugcgggaagggcuaccaccugauguccuucccccagagcgccccgcacggggucguguuccuccacgucacguacgugcccgcccaggagaagaacuucaccaccgcccccgcgaucugccacgacggcaaggcccacuucccccgcgaggggguguucgucuccaacggcacccacugguucgugacgcagcggaacuucuacgagccgcagaucaucaccaccgacaacaccuucgugagcggcaacugcgacgucgugaucgggaucgugaacaacacggucuacgacccccugcagcccgagcuggacuccuucaaggaggagcucgacaaguacuucaagaaccacaccagccccgacguggaccugggcgacaucuccgggaucaacgccagcguggucaacauccagaaggagaucgaccgccugaacgagguggccaagaaccucaacgagucccugaucgaccugcaggagcucggcaaguacgagcaguacaucaaguggccgugguacaucuggcugggcuucaucgccgggcugaucgcgaucgugauggucaccaucaugcucugcugcaugaccagcugcugcuccugccugaagggcugcugcagcugcggguccugcugcaaguucgacgaggacgacagcgagcccgugcugaagggcgugaagcuccacuacacgugauaauaggcuggagccucgguggccuagcuucuugccccuugggccuccccccagccccuccuccccuuccugcacccguacccccguggucuuugaauaaagucugagugggcggcaaaaaaaaaaaaaaaaaaaaaaaaaaaaaaaaaaaaaaaaaaaaaaaaaaaaaaaaaaaaaaaaaaaaaaaaaaaaaaaaaaaaaaaaaaaaaaaaaaaaucuag

SEQ ID NO: 26516 - RNA, 4100 nt, Artificial Sequence
  SARS-CoV-2/Wuhan/WIV05/2019__EPI_ISL_402128 spike protein mRNA gc (1-1273)(D614G_M1229I)
gggaaauaagagagaaaagaagaguaagaagaaauauaagaccccggcgccgccaccauguucguguuccugguccuccugccccuggugagcucccagugcgugaaccucaccacccgcacgcagcugccgcccgccuacaccaacagcuucacccggggcgucuacuaccccgacaagguguuccgcuccagcgugcugcacuccacccaggaccucuuccugcccuucuucagcaacgucacgugguuccacgccauccacguguccgggaccaacggcaccaagcgguucgacaacccggugcugcccuucaacgacggggucuacuucgcgagcaccgagaaguccaacaucauccgcggcuggaucuucgggacgacccucgacagcaagacccagucccugcugaucgugaacaacgccaccaacguggucaucaaggugugcgaguuccaguucugcaacgaccccuuccucggcguguacuaccacaagaacaacaagagcuggauggaguccgaguuccgggucuacagcuccgccaacaacugcacguucgaguacgugagccagcccuuccugauggaccuggagggcaagcaggggaacuucaagaaccuccgcgaguucguguucaagaacaucgacggcuacuucaagaucuacuccaagcacaccccgaucaaccugguccgggaccugccccagggguucagcgcccucgagccccugguggaccugcccaucggcaucaacaucacccgcuuccagacccuccuggcccugcaccgguccuaccucacgccgggggacagcagcuccggcuggaccgcgggcgccgccgccuacuacgugggguaccugcagccccgcaccuuccugcucaaguacaacgagaacggcaccaucacggacgcggucgacugcgcccuggacccccugagcgagaccaagugcacccucaaguccuucaccguggagaaggggaucuaccagacgagcaacuuccgggugcagcccaccgaguccaucguccgcuucccgaacaucaccaaccugugccccuucggcgagguguucaacgccacccgguucgccagcgucuacgccuggaaccgcaagcggaucuccaacugcguggcggacuacagcgugcuguacaacuccgccagcuucuccacguucaagugcuacggcgucagccccaccaagcucaacgaccugugcuucaccaacguguacgccgacuccuucgugauccgcggggacgagguccggcagaucgcccccggccagaccgggaagaucgccgacuacaacuacaagcugccggacgacuucacgggcugcgugaucgcguggaacagcaacaaccucgacuccaaggucgggggcaacuacaacuaccuguaccgccuguuccgcaagagcaaccucaagcccuucgagcgggacaucuccaccgagaucuaccaggccggcagcacccccugcaacgggguggagggcuucaacugcuacuucccccugcaguccuacggguuccagccgaccaacggcgugggguaccagcccuaccggguggucgugcugagcuucgagcuccugcacgcccccgccacggugugcggccccaagaaguccaccaaccuggucaagaacaagugcgugaacuucaacuucaacggccucaccgggaccggcgugcugaccgagagcaacaagaaguuccugccguuccagcaguucgggcgcgacaucgccgacacgaccgacgcgguccgcgacccccagacccuggagauccucgacaucacccccugcagcuucggcgggguguccgugaucacgccgggcaccaacaccagcaaccaggucgccgugcuguaccagggcgugaacugcaccgagguccccguggccauccacgccgaccagcugacgcccaccuggcggguguacuccaccgggagcaacgucuuccagacccgcgccggcugccucaucggggcggagcacgugaacaacuccuacgagugcgacauccccaucggcgccggcaucugcgccagcuaccagacgcagaccaacuccccgcggcgcgcccggagcguggcgucccagagcaucaucgccuacaccaugucccugggggccgagaacagcgucgccuacuccaacaacagcaucgccauccccaccaacuucacgaucuccgugaccaccgagauccugcccgugagcaugaccaagacgagcgucgacugcaccauguacaucugcggcgacuccaccgagugcagcaaccuccugcugcaguacggguccuucugcacccagcucaaccgcgcgcugacgggcaucgccguggagcaggacaagaacacccaggagguguucgcccaggucaagcagaucuacaagacgcccccgaucaaggacuucgggggcuucaacuucagccagauccugcccgaccccuccaagcccagcaagcgguccuucaucgaggaccuccuguucaacaaggugacccuggccgacgccggcuucaucaagcaguacggggacugccucggcgacaucgcggcccgcgaccugaucugcgcccagaaguucaacgggcugaccgugcucccgccccugcugaccgacgagaugaucgcccaguacaccagcgcccuccuggcgggcaccaucacguccggguggaccuucggcgccggcgccgcccugcagauccccuucgcgaugcagauggccuaccgguucaacgggaucggcgucacccagaacgugcucuacgagaaccagaagcugaucgccaaccaguucaacagcgccaucgggaagauccaggacucccugagcuccaccgccagcgcgcucggcaagcugcaggacguggucaaccagaacgcccaggcccugaacacgcucgugaagcagcuguccagcaacuucggggccaucuccagcgugcugaacgacauccucucccgccuggacaaggucgaggccgaggugcagaucgaccggcugaucaccggccgccuccagagccugcagaccuacgugacccagcagcugauccgggcggccgagauccgcgccagcgccaaccucgccgcgaccaagauguccgagugcguccugggccagagcaagcggguggacuucugcgggaagggcuaccaccugauguccuucccccagagcgccccgcacgggguggucuuccuccacgugacguacguccccgcccaggagaagaacuucaccaccgcccccgcgaucugccacgacggcaaggcccacuucccccgcgaggggguguucguguccaacggcacccacugguucgucacgcagcggaacuucuacgagccgcagaucaucaccaccgacaacaccuucgugagcggcaacugcgacguggucaucgggaucgugaacaacacgguguacgacccccugcagcccgagcuggacuccuucaaggaggagcucgacaaguacuucaagaaccacaccagccccgacgucgaccugggcgacaucuccgggaucaacgccagcguggugaacauccagaaggagaucgaccgccugaacgaggucgccaagaaccucaacgagucccugaucgaccugcaggagcucggcaaguacgagcaguacaucaaguggccgugguacaucuggcugggcuucaucgccgggcugaucgcgaucgugaucgugaccaucaugcucugcugcaugaccagcugcugcuccugccugaagggcugcugcagcugcggguccugcugcaaguucgacgaggacgacagcgagcccguccugaagggcgugaagcuccacuacacgugauaauaggcuggagccucgguggccuagcuucuugccccuugggccuccccccagccccuccuccccuuccugcacccguacccccguggucuuugaauaaagucugagugggcggcaaaaaaaaaaaaaaaaaaaaaaaaaaaaaaaaaaaaaaaaaaaaaaaaaaaaaaaaaaaaaaaaaaaaaaaaaaaaaaaaaaaaaaaaaaaaaaaaaaaaucuag

SEQ ID NO: 26517 - RNA, 4094 nt, Artificial Sequence
  SARS-CoV-2/Wuhan/WIV05/2019__EPI_ISL_402128 spike protein mRNA gc (1-1273)(H69del_V70del_A222V_Y453F_S477N_D614G_I692V)
gggaaauaagagagaaaagaagaguaagaagaaauauaagaccccggcgccgccaccauguucguguuccugguccuccugccccuggugagcucccagugcgugaaccucaccacccgcacgcagcugccgcccgccuacaccaacagcuucacccggggcgucuacuaccccgacaagguguuccgcuccagcgugcugcacuccacccaggaccucuuccugcccuucuucagcaacgucacgugguuccacgccaucuccgggaccaacggcaccaagcgguucgacaacccggugcugcccuucaacgacgggguguacuucgcgagcaccgagaaguccaacaucauccgcggcuggaucuucgggacgacccucgacagcaagacccagucccugcugaucgucaacaacgccaccaacguggugaucaaggucugcgaguuccaguucugcaacgaccccuuccucggcguguacuaccacaagaacaacaagagcuggauggaguccgaguuccggguguacagcuccgccaacaacugcacguucgaguacgucagccagcccuuccugauggaccuggagggcaagcaggggaacuucaagaaccuccgcgaguucguguucaagaacaucgacggcuacuucaagaucuacuccaagcacaccccgaucaaccuggugcgggaccugccccagggguucagcguccucgagccccugguggaccugcccaucggcaucaacaucacccgcuuccagacccuccuggcccugcaccgguccuaccucacgccgggggacagcagcuccggcuggaccgccggcgcggccgccuacuacgugggguaccugcagccccgcaccuuccugcucaaguacaacgagaacggcaccaucacggacgccgucgacugcgcgcuggacccccugagcgagaccaagugcacccucaaguccuucaccguggagaaggggaucuaccagacgagcaacuuccgggugcagcccaccgaguccaucguccgcuucccgaacaucaccaaccugugccccuucggcgagguguucaacgccacccgguucgccagcgucuacgccuggaaccgcaagcggaucuccaacugcguggccgacuacagcgugcuguacaacuccgcgagcuucuccacguucaagugcuacggcgucagccccaccaagcucaacgaccugugcuucaccaacguguacgccgacuccuucgugauccgcggggacgagguccggcagaucgcccccggccagaccgggaagaucgccgacuacaacuacaagcugccggacgacuucacgggcugcgugaucgccuggaacagcaacaaccucgacuccaaggucgggggcaacuacaacuaccuguuccgccuguuccgcaagagcaaccucaagcccuucgagcgggacaucuccaccgagaucuaccaggcgggcaacacccccugcaacgggguggagggcuucaacugcuacuucccccugcagagcuacggguuccagccgaccaacggcgugggguaccagcccuaccggguggucgugcuguccuucgagcuccugcacgcccccgccacggugugcggccccaagaaguccaccaaccuggucaagaacaagugcgugaacuucaacuucaacggccucaccgggaccggcgugcugaccgagagcaacaagaaguuccugccguuccagcaguucgggcgcgacaucgccgacacgaccgacgccguccgcgacccccagacccuggagauccucgacaucacccccugcagcuucggcggggugagcgugaucacgccgggcaccaacaccuccaaccaggucgcggugcuguaccagggcgugaacugcaccgagguccccguggccauccacgccgaccagcugacgcccaccuggcggguguacagcaccggguccaacgucuuccagacccgcgccggcugccucaucggggccgagcacgugaacaacagcuacgagugcgacauccccaucggcgcgggcaucugcgccuccuaccagacgcagaccaacagcccgcggcgcgcccgguccguggccagccaguccgucaucgcguacaccaugagccugggggccgagaacuccguggccuacagcaacaacuccaucgccauccccaccaacuucacgaucagcgugaccaccgagauccugcccgucuccaugaccaagacgagcguggacugcaccauguacaucugcggcgacagcaccgagugcuccaaccuccugcugcaguacgggagcuucugcacccagcucaaccgcgcccugacgggcaucgcgguggagcaggacaagaacacccaggaggucuucgcccaggugaagcagaucuacaagacgcccccgaucaaggacuucgggggcuucaacuucucccagauccugcccgaccccagcaagcccuccaagcggagcuucaucgaggaccuccuguucaacaaggugacccuggccgacgccggcuucaucaagcaguacggggacugccucggcgacaucgccgcgcgcgaccugaucugcgcccagaaguucaacgggcugaccguccucccgccccugcugaccgacgagaugaucgcccaguacaccuccgcccuccuggccggcaccaucacgagcggguggaccuucggcgcgggcgccgcccugcagauccccuucgccaugcagauggcguaccgguucaacgggaucggcgugacccagaacgugcucuacgagaaccagaagcugaucgccaaccaguucaacuccgccaucgggaagauccaggacagccuguccagcaccgccuccgcccucggcaagcugcaggacgucgugaaccagaacgcgcaggcccugaacacgcucgugaagcagcugagcuccaacuucggggccaucagcuccguccugaacgacauccucagccgccuggacaagguggaggccgaggugcagaucgaccggcugaucaccggccgccuccagucccugcagaccuacgucacccagcagcugauccgggccgcggagauccgcgccagcgccaaccucgccgccaccaagaugagcgagugcgugcugggccaguccaagcggguggacuucugcgggaagggcuaccaccugaugagcuucccccaguccgcgccgcacggggucguguuccuccacgucacguacgugcccgcccaggagaagaacuucaccaccgcccccgccaucugccacgacggcaaggcgcacuucccccgcgaggggguguucgucagcaacggcacccacugguucgugacgcagcggaacuucuacgagccgcagaucaucaccaccgacaacaccuucguguccggcaacugcgacgucgugaucgggaucgugaacaacacggucuacgacccccugcagcccgagcuggacagcuucaaggaggagcucgacaaguacuucaagaaccacaccucccccgacguggaccugggcgacaucagcgggaucaacgccuccguggucaacauccagaaggagaucgaccgccugaacgagguggccaagaaccucaacgagagccugaucgaccugcaggagcucggcaaguacgagcaguacaucaaguggccgugguacaucuggcugggcuucaucgccgggcugaucgccaucgugauggucaccaucaugcucugcugcaugaccuccugcugcagcugccugaagggcugcugcuccugcgggagcugcugcaaguucgacgaggacgacuccgagcccgugcugaagggcgugaagcuccacuacacgugauaauaggcuggagccucgguggccuagcuucuugccccuugggccuccccccagccccuccuccccuuccugcacccguacccccguggucuuugaauaaagucugagugggcggcaaaaaaaaaaaaaaaaaaaaaaaaaaaaaaaaaaaaaaaaaaaaaaaaaaaaaaaaaaaaaaaaaaaaaaaaaaaaaaaaaaaaaaaaaaaaaaaaaaaaucuag

SEQ ID NO: 26518 - RNA, 4094 nt, Artificial Sequence
  SARS-CoV-2/Wuhan/WIV05/2019__EPI_ISL_402128 spike protein mRNA gc (1-1273)(H69del_V70del_Y453F_D614G_I692V_M1229I)
gggaaauaagagagaaaagaagaguaagaagaaauauaagaccccggcgccgccaccauguucguguuccugguccuccugccccuggugagcucccagugcgugaaccucaccacccgcacgcagcugccgcccgccuacaccaacagcuucacccggggcgucuacuaccccgacaagguguuccgcuccagcgugcugcacuccacccaggaccucuuccugcccuucuucagcaacgucacgugguuccacgccaucuccgggaccaacggcaccaagcgguucgacaacccggugcugcccuucaacgacgggguguacuucgcgagcaccgagaaguccaacaucauccgcggcuggaucuucgggacgacccucgacagcaagacccagucccugcugaucgucaacaacgccaccaacguggugaucaaggucugcgaguuccaguucugcaacgaccccuuccucggcguguacuaccacaagaacaacaagagcuggauggaguccgaguuccggguguacagcuccgccaacaacugcacguucgaguacgucagccagcccuuccugauggaccuggagggcaagcaggggaacuucaagaaccuccgcgaguucguguucaagaacaucgacggcuacuucaagaucuacuccaagcacaccccgaucaaccuggugcgggaccugccccagggguucagcgcccucgagccccuggucgaccugcccaucggcaucaacaucacccgcuuccagacccuccuggcccugcaccgguccuaccucacgccgggggacagcagcuccggcuggaccgcgggcgccgccgccuacuacgugggguaccugcagccccgcaccuuccugcucaaguacaacgagaacggcaccaucacggacgcgguggacugcgcccuggacccccugagcgagaccaagugcacccucaaguccuucaccgucgagaaggggaucuaccagacgagcaacuuccgggugcagcccaccgaguccaucgugcgcuucccgaacaucaccaaccugugccccuucggcgaggucuucaacgccacccgguucgccagcguguacgccuggaaccgcaagcggaucuccaacugcgucgcggacuacagcgugcuguacaacuccgccagcuucuccacguucaagugcuacggcgugagccccaccaagcucaacgaccugugcuucaccaacgucuacgccgacuccuucgugauccgcggggacgaggugcggcagaucgcccccggccagaccgggaagaucgccgacuacaacuacaagcugccggacgacuucacgggcugcgucaucgcguggaacagcaacaaccucgacuccaaggucgggggcaacuacaacuaccuguuccgccuguuccgcaagagcaaccucaagcccuucgagcgggacaucuccaccgagaucuaccaggccggcagcacccccugcaacgggguggagggcuucaacugcuacuucccccugcaguccuacggguuccagccgaccaacggcgugggguaccagcccuaccggguggugguccugagcuucgagcuccugcacgcccccgccacggugugcggccccaagaaguccaccaaccuggugaagaacaagugcgucaacuucaacuucaacggccucaccgggaccggcgugcugaccgagagcaacaagaaguuccugccguuccagcaguucgggcgcgacaucgccgacacgaccgacgcggugcgcgacccccagacccuggagauccucgacaucacccccugcagcuucggcggggucuccgugaucacgccgggcaccaacaccagcaaccagguggccguccuguaccagggcgugaacugcaccgaggugcccgucgccauccacgccgaccagcugacgcccaccuggcggguguacuccaccgggagcaacguguuccagacccgcgccggcugccucaucggggcggagcacgucaacaacuccuacgagugcgacauccccaucggcgccggcaucugcgccagcuaccagacgcagaccaacuccccgcggcgcgcccggagcguggcgucccagagcgugaucgccuacaccaugucccugggggccgagaacagcgucgccuacuccaacaacagcaucgccauccccaccaacuucacgaucuccgugaccaccgagauccugcccgugagcaugaccaagacgagcgucgacugcaccauguacaucugcggcgacuccaccgagugcagcaaccuccugcugcaguacggguccuucugcacccagcucaaccgcgcgcugacgggcaucgccguggagcaggacaagaacacccaggagguguucgcccaggucaagcagaucuacaagacgcccccgaucaaggacuucgggggcuucaacuucagccagauccugcccgaccccuccaagcccagcaagcgguccuucaucgaggaccuccuguucaacaaggugacccuggccgacgccggcuucaucaagcaguacggggacugccucggcgacaucgcggcccgcgaccugaucugcgcccagaaguucaacgggcugaccgugcucccgccccugcugaccgacgagaugaucgcccaguacaccagcgcccuccuggcgggcaccaucacguccggguggaccuucggcgccggcgccgcccugcagauccccuucgcgaugcagauggccuaccgguucaacgggaucggcgucacccagaacgugcucuacgagaaccagaagcugaucgccaaccaguucaacagcgccaucgggaagauccaggacucccugagcuccaccgccagcgcgcucggcaagcugcaggacguggucaaccagaacgcccaggcccugaacacgcucgugaagcagcuguccagcaacuucggggccaucuccagcgugcugaacgacauccucucccgccuggacaaggucgaggccgaggugcagaucgaccggcugaucaccggccgccuccagagccugcagaccuacgugacccagcagcugauccgggcggccgagauccgcgccagcgccaaccucgccgcgaccaagauguccgagugcguccugggccagagcaagcggguggacuucugcgggaagggcuaccaccugauguccuucccccagagcgccccgcacgggguggucuuccuccacgugacguacguccccgcccaggagaagaacuucaccaccgcccccgcgaucugccacgacggcaaggcccacuucccccgcgaggggguguucguguccaacggcacccacugguucgucacgcagcggaacuucuacgagccgcagaucaucaccaccgacaacaccuucgugagcggcaacugcgacguggucaucgggaucgugaacaacacgguguacgacccccugcagcccgagcuggacuccuucaaggaggagcucgacaaguacuucaagaaccacaccagccccgacgucgaccugggcgacaucuccgggaucaacgccagcguggugaacauccagaaggagaucgaccgccugaacgaggucgccaagaaccucaacgagucccugaucgaccugcaggagcucggcaaguacgagcaguacaucaaguggccgugguacaucuggcugggcuucaucgccgggcugaucgcgaucgugaucgugaccaucaugcucugcugcaugaccagcugcugcuccugccugaagggcugcugcagcugcggguccugcugcaaguucgacgaggacgacagcgagcccguccugaagggcgugaagcuccacuacacgugauaauaggcuggagccucgguggccuagcuucuugccccuugggccuccccccagccccuccuccccuuccugcacccguacccccguggucuuugaauaaagucugagugggcggcaaaaaaaaaaaaaaaaaaaaaaaaaaaaaaaaaaaaaaaaaaaaaaaaaaaaaaaaaaaaaaaaaaaaaaaaaaaaaaaaaaaaaaaaaaaaaaaaaaaaucuag

SEQ ID NO: 26519 - RNA, 4091 nt, Artificial Sequence
  SARS-CoV-2/Wuhan/WIV05/2019__EPI_ISL_402128 spike protein mRNA gc (1-1273)(H69del_V70del_Y144del_N501Y_A570D_D614G_P681H_T716I_S982 A_D1118H)
gggaaauaagagagaaaagaagaguaagaagaaauauaagaccccggcgccgccaccauguucguguuccugguccuccugccccuggugagcucccagugcgugaaccucaccacccgcacgcagcugccgcccgccuacaccaacagcuucacccggggcgucuacuaccccgacaagguguuccgcuccagcgugcugcacuccacccaggaccucuuccugcccuucuucagcaacgucacgugguuccacgccaucuccgggaccaacggcaccaagcgguucgacaacccggugcugcccuucaacgacgggguguacuucgcgagcaccgagaaguccaacaucauccgcggcuggaucuucgggacgacccucgacagcaagacccagucccugcugaucgucaacaacgccaccaacguggugaucaaggucugcgaguuccaguucugcaacgaccccuuccucggcguguaccacaagaacaacaagagcuggauggaguccgaguuccggguguacagcuccgccaacaacugcacguucgaguacgucagccagcccuuccugauggaccuggagggcaagcaggggaacuucaagaaccuccgcgaguucguguucaagaacaucgacggcuacuucaagaucuacuccaagcacaccccgaucaaccuggugcgggaccugccccagggguucagcgcccucgagccccuggucgaccugcccaucggcaucaacaucacccgcuuccagacccuccuggcccugcaccgguccuaccucacgccgggggacagcagcuccggcuggaccgcgggcgccgccgccuacuacgugggguaccugcagccccgcaccuuccugcucaaguacaacgagaacggcaccaucacggacgcgguggacugcgcccuggacccccugagcgagaccaagugcacccucaaguccuucaccgucgagaaggggaucuaccagacgagcaacuuccgggugcagcccaccgaguccaucgugcgcuucccgaacaucaccaaccugugccccuucggcgaggucuucaacgccacccgguucgccagcguguacgccuggaaccgcaagcggaucuccaacugcgucgcggacuacagcgugcuguacaacuccgccagcuucuccacguucaagugcuacggcgugagccccaccaagcucaacgaccugugcuucaccaacgucuacgccgacuccuucgugauccgcggggacgaggugcggcagaucgcccccggccagaccgggaagaucgccgacuacaacuacaagcugccggacgacuucacgggcugcgucaucgcguggaacagcaacaaccucgacuccaaggucgggggcaacuacaacuaccuguaccgccuguuccgcaagagcaaccucaagcccuucgagcgggacaucuccaccgagaucuaccaggccggcagcacccccugcaacgggguggagggcuucaacugcuacuucccccugcaguccuacggguuccagccgaccuacggcgugggguaccagcccuaccggguggugguccugagcuucgagcuccugcacgcccccgccacggugugcggccccaagaaguccaccaaccuggugaagaacaagugcgucaacuucaacuucaacggccucaccgggaccggcgugcugaccgagagcaacaagaaguuccugccguuccagcaguucgggcgcgacaucgacgacacgaccgacgccgugcgcgacccccagacccuggagauccucgacaucacccccugcagcuucggcggggucuccgugaucacgccgggcaccaacaccagcaaccagguggcgguccuguaccagggcgugaacugcaccgaggugcccgucgccauccacgccgaccagcugacgcccaccuggcggguguacuccaccgggagcaacguguuccagacccgcgccggcugccucaucggggccgagcacgucaacaacuccuacgagugcgacauccccaucggcgcgggcaucugcgccagcuaccagacgcagaccaacucccaccggcgcgcccggagcguggccucccagagcaucaucgcguacaccaugucccugggggccgagaacagcguggccuacuccaacaacagcaucgccaucccgaucaacuucaccaucuccgucacgaccgagauccugcccgugagcaugaccaagaccagcguggacugcacgauguacaucugcggcgacuccaccgagugcagcaaccuccugcugcaguacggguccuucugcacccagcucaaccgcgcccugaccggcaucgcggucgagcaggacaagaacacgcaggagguguucgcccaggugaagcagaucuacaagaccccgcccaucaaggacuucgggggcuucaacuucagccagauccugcccgaccccuccaagcccagcaagcgguccuucaucgaggaccuccuguucaacaaggucacccuggccgacgccggcuucaucaagcaguacggggacugccucggcgacaucgccgcgcgcgaccugaucugcgcccagaaguucaacgggcugaccgugcugcccccgcuccugacggacgagaugaucgcccaguacaccagcgcccuccuggccggcaccaucaccuccggguggacguucggcgcgggcgccgcccugcagauccccuucgccaugcagauggcguaccgguucaacgggaucggcgugacccagaacguccucuacgagaaccagaagcugaucgccaaccaguucaacagcgccaucgggaagauccaggacucccugagcuccaccgccagcgcccucggcaagcugcaggacguggugaaccagaacgcgcaggcccugaacacccucgucaagcagcuguccagcaacuucggggccaucuccagcgugcugaacgacauccucgcccgccuggacaagguggaggccgagguccagaucgaccggcugaucacgggccgccuccagucccugcagaccuacgugacccagcagcugauccgggcggccgagauccgcgccagcgccaaccucgccgcgaccaagaugagcgagugcgugcugggccaguccaagcgggucgacuucugcgggaagggcuaccaccugaugagcuucccccaguccgcgccccacggggugguguuccuccacgucaccuacgugccggcccaggagaagaacuucacgaccgcccccgccaucugccacgacggcaaggcccacuucccccgcgagggggucuucgugagcaacggcacccacugguucgugacccagcggaacuucuacgagccccagaucaucacgacccacaacaccuucgucuccggcaacugcgacguggugaucgggaucgucaacaacaccguguacgacccgcugcagcccgagcuggacagcuucaaggaggagcucgacaaguacuucaagaaccacacgucccccgacguggaccugggcgacaucagcgggaucaacgccuccgucgugaacauccagaaggagaucgaccgccugaacgagguggccaagaaccucaacgagagccugaucgaccugcaggagcucggcaaguacgagcaguacaucaaguggcccugguacaucuggcugggcuucaucgccgggcugaucgcgaucgucauggugaccaucaugcucugcugcaugaccuccugcugcagcugccugaagggcugcugcuccugcgggagcugcugcaaguucgacgaggacgacuccgagccggugcugaagggcgucaagcuccacuacaccugauaauaggcuggagccucgguggccuagcuucuugccccuugggccuccccccagccccuccuccccuuccugcacccguacccccguggucuuugaauaaagucugagugggcggcaaaaaaaaaaaaaaaaaaaaaaaaaaaaaaaaaaaaaaaaaaaaaaaaaaaaaaaaaaaaaaaaaaaaaaaaaaaaaaaaaaaaaaaaaaaaaaaaaaaaucuag

SEQ ID NO: 26520 - RNA, 4100 nt, Artificial Sequence
  SARS-CoV-2/Wuhan/WIV05/2019__EPI_ISL_402128 spike protein mRNA gc (1-1273)(K417N_E484K_N501Y_D614G)
gggaaauaagagagaaaagaagaguaagaagaaauauaagaccccggcgccgccaccauguucguguuccugguccuccugccccuggugagcucccagugcgugaaccucaccacccgcacgcagcugccgcccgccuacaccaacagcuucacccggggcgucuacuaccccgacaagguguuccgcuccagcgugcugcacuccacccaggaccucuuccugcccuucuucagcaacgucacgugguuccacgccauccacguguccgggaccaacggcaccaagcgguucgacaacccggugcugcccuucaacgacggggucuacuucgcgagcaccgagaaguccaacaucauccgcggcuggaucuucgggacgacccucgacagcaagacccagucccugcugaucgugaacaacgccaccaacguggucaucaaggugugcgaguuccaguucugcaacgaccccuuccucggcguguacuaccacaagaacaacaagagcuggauggaguccgaguuccgggucuacagcuccgccaacaacugcacguucgaguacgugagccagcccuuccugauggaccuggagggcaagcaggggaacuucaagaaccuccgcgaguucguguucaagaacaucgacggcuacuucaagaucuacuccaagcacaccccgaucaaccugguccgggaccugccccagggguucagcgcccucgagccccugguggaccugcccaucggcaucaacaucacccgcuuccagacccuccuggcccugcaccgguccuaccucacgccgggggacagcagcuccggcuggaccgcgggcgccgccgccuacuacgugggguaccugcagccccgcaccuuccugcucaaguacaacgagaacggcaccaucacggacgcggucgacugcgcccuggacccccugagcgagaccaagugcacccucaaguccuucaccguggagaaggggaucuaccagacgagcaacuuccgggugcagcccaccgaguccaucguccgcuucccgaacaucaccaaccugugccccuucggcgagguguucaacgccacccgguucgccagcgucuacgccuggaaccgcaagcggaucuccaacugcguggcggacuacagcgugcuguacaacuccgccagcuucuccacguucaagugcuacggcgucagccccaccaagcucaacgaccugugcuucaccaacguguacgccgacuccuucgugauccgcggggacgagguccggcagaucgcccccggccagaccgggaacaucgccgacuacaacuacaagcugccggacgacuucacgggcugcgugaucgcguggaacagcaacaaccucgacuccaaggucgggggcaacuacaacuaccuguaccgccuguuccgcaagagcaaccucaagcccuucgagcgggacaucuccaccgagaucuaccaggccggcagcacccccugcaacggggugaagggcuucaacugcuacuucccccugcaguccuacggguuccagccgaccuacggcgugggguaccagcccuaccggguggucgugcugagcuucgagcuccugcacgcccccgccacggugugcggccccaagaaguccaccaaccuggucaagaacaagugcgugaacuucaacuucaacggccucaccgggaccggcgugcugaccgagagcaacaagaaguuccugccguuccagcaguucgggcgcgacaucgccgacacgaccgacgcgguccgcgacccccagacccuggagauccucgacaucacccccugcagcuucggcgggguguccgugaucacgccgggcaccaacaccagcaaccaggucgccgugcuguaccagggcgugaacugcaccgagguccccguggccauccacgccgaccagcugacgcccaccuggcggguguacuccaccgggagcaacgucuuccagacccgcgccggcugccucaucggggcggagcacgugaacaacuccuacgagugcgacauccccaucggcgccggcaucugcgccagcuaccagacgcagaccaacuccccgcggcgcgcccggagcguggcgucccagagcaucaucgccuacaccaugucccugggggccgagaacagcgucgccuacuccaacaacagcaucgccauccccaccaacuucacgaucuccgugaccaccgagauccugcccgugagcaugaccaagacgagcgucgacugcaccauguacaucugcggcgacuccaccgagugcagcaaccuccugcugcaguacggguccuucugcacccagcucaaccgcgcgcugacgggcaucgccguggagcaggacaagaacacccaggagguguucgcccaggucaagcagaucuacaagacgcccccgaucaaggacuucgggggcuucaacuucagccagauccugcccgaccccuccaagcccagcaagcgguccuucaucgaggaccuccuguucaacaaggugacccuggccgacgccggcuucaucaagcaguacggggacugccucggcgacaucgcggcccgcgaccugaucugcgcccagaaguucaacgggcugaccgugcucccgccccugcugaccgacgagaugaucgcccaguacaccagcgcccuccuggcgggcaccaucacguccggguggaccuucggcgccggcgccgcccugcagauccccuucgcgaugcagauggccuaccgguucaacgggaucggcgucacccagaacgugcucuacgagaaccagaagcugaucgccaaccaguucaacagcgccaucgggaagauccaggacucccugagcuccaccgccagcgcgcucggcaagcugcaggacguggucaaccagaacgcccaggcccugaacacgcucgugaagcagcuguccagcaacuucggggccaucuccagcgugcugaacgacauccucucccgccuggacaaggucgaggccgaggugcagaucgaccggcugaucaccggccgccuccagagccugcagaccuacgugacccagcagcugauccgggcggccgagauccgcgccagcgccaaccucgccgcgaccaagauguccgagugcguccugggccagagcaagcggguggacuucugcgggaagggcuaccaccugauguccuucccccagagcgccccgcacgggguggucuuccuccacgugacguacguccccgcccaggagaagaacuucaccaccgcccccgcgaucugccacgacggcaaggcccacuucccccgcgaggggguguucguguccaacggcacccacugguucgucacgcagcggaacuucuacgagccgcagaucaucaccaccgacaacaccuucgugagcggcaacugcgacguggucaucgggaucgugaacaacacgguguacgacccccugcagcccgagcuggacuccuucaaggaggagcucgacaaguacuucaagaaccacaccagccccgacgucgaccugggcgacaucuccgggaucaacgccagcguggugaacauccagaaggagaucgaccgccugaacgaggucgccaagaaccucaacgagucccugaucgaccugcaggagcucggcaaguacgagcaguacaucaaguggccgugguacaucuggcugggcuucaucgccgggcugaucgcgaucgugauggugaccaucaugcucugcugcaugaccagcugcugcuccugccugaagggcugcugcagcugcggguccugcugcaaguucgacgaggacgacagcgagcccguccugaagggcgugaagcuccacuacacgugauaauaggcuggagccucgguggccuagcuucuugccccuugggccuccccccagccccuccuccccuuccugcacccguacccccguggucuuugaauaaagucugagugggcggcaaaaaaaaaaaaaaaaaaaaaaaaaaaaaaaaaaaaaaaaaaaaaaaaaaaaaaaaaaaaaaaaaaaaaaaaaaaaaaaaaaaaaaaaaaaaaaaaaaaaucuag

SEQ ID NO: 26521 - RNA, 4091 nt, Artificial Sequence
  SARS-CoV-2/Wuhan/WIV05/2019__EPI_ISL_402128 spike protein mRNA gc (1-1273)(L18F_D80A_D215G_L242del_A243del_L244del_R246I_K417N_E484 K_N501Y_D614G_A701V)
gggaaauaagagagaaaagaagaguaagaagaaauauaagaccccggcgccgccaccauguucguguuccugguccuccugccccuggugagcucccagugcgugaacuucaccacccgcacgcagcucccgcccgccuacaccaacagcuucacccggggcgucuacuaccccgacaagguguuccgcuccagcgugcugcacuccacccaggaccuguuccuccccuucuucagcaacgucacgugguuccacgccauccacguguccgggaccaacggcaccaagcgguucgcgaacccggugcugcccuucaacgacggggucuacuucgccagcaccgagaaguccaacaucauccgcggcuggaucuucgggacgacccuggacagcaagacccagucccuccugaucgugaacaacgccaccaacguggucaucaaggugugcgaguuccaguucugcaacgaccccuuccugggcguguacuaccacaagaacaacaagagcuggauggaguccgaguuccgggucuacagcuccgccaacaacugcacguucgaguacgugagccagcccuuccucauggaccuggagggcaagcaggggaacuucaagaaccugcgcgaguucguguucaagaacaucgacggcuacuucaagaucuacuccaagcacaccccgaucaaccucguccgggggcugccccagggcuucagcgcccuggagccccucguggaccugcccaucgggaucaacaucacccgcuuccagacccugcacaucuccuaccucacgccgggcgacagcagcuccggcuggaccgcgggggccgccgccuacuacgugggcuaccugcagccccggaccuuccugcucaaguacaacgagaacgggaccaucacggacgcggucgacugcgcccuggacccccugagcgagaccaagugcacccucaaguccuucaccguggagaagggcaucuaccagacgagcaacuuccgcgugcagcccaccgaguccaucguccgguucccgaacaucaccaaccugugccccuucggcgagguguucaacgccacccgcuucgccagcgucuacgccuggaaccggaagcgcaucuccaacugcguggcggacuacagcgugcuguacaacuccgccagcuucuccacguucaagugcuacggggucagccccaccaagcucaacgaccugugcuucaccaacguguacgccgacuccuucgugauccggggcgacgagguccgccagaucgcccccgggcagaccggcaacaucgccgacuacaacuacaagcugccggacgacuucacggggugcgugaucgcguggaacagcaacaaccucgacuccaaggugggcggcaacuacaacuaccuguaccggcuguuccgcaagagcaaccucaagcccuucgagcgggacaucuccaccgagaucuaccaggccgggagcacccccugcaacggcgucaagggguucaacugcuacuucccccugcaguccuacggcuuccagccgaccuacggggugggcuaccagcccuaccgcguggucgugcugagcuucgagcuccugcacgcccccgccacggugugcggccccaagaaguccaccaaccuggucaagaacaagugcgugaacuucaacuucaacgggcucaccggcaccggggugcugaccgagagcaacaagaaguuccugccguuccagcaguucggccgggacaucgccgacacgaccgacgcgguccgcgacccccagacccucgagauccuggacaucacccccugcagcuucgggggcguguccgugaucacgccgggcaccaacaccagcaaccaggucgccgugcuguaccagggggugaacugcaccgagguccccguggccauccacgccgaccagcugacgcccaccuggcgcguguacuccaccggcagcaacgucuuccagacccgggccgggugccucaucggcgcggagcacgugaacaacuccuacgagugcgacauccccaucggcgccgggaucugcgccagcuaccagacgcagaccaacuccccgcgccgggcccgcagcguggcgucccagagcaucaucgccuacaccaugucccugggcgucgagaacagcguggccuacuccaacaacagcaucgccauccccaccaacuucacgaucuccgugaccaccgagauccugcccgucagcaugaccaagacgagcguggacugcaccauguacaucugcggggacuccaccgagugcagcaaccuccugcugcaguacggcuccuucugcacccagcucaaccgggcccugacggggaucgcgguggagcaggacaagaacacccaggaggucuucgcccaggugaagcagaucuacaagacgcccccgaucaaggacuucggcggcuucaacuucagccagauccugcccgaccccuccaagcccagcaagcgcuccuucaucgaggaccuccuguucaacaaggugacccuggccgacgccggguucaucaagcaguacggcgacugccucggggacaucgccgcgcgggaccugaucugcgcccagaaguucaacggccugaccguccucccgccccugcugaccgacgagaugaucgcccaguacaccagcgcccuccuggccgggaccaucacguccggcuggaccuucggcgcgggggccgcccugcagauccccuucgccaugcagauggcguaccgcuucaacggcaucggggugacccagaacgugcucuacgagaaccagaagcugaucgccaaccaguucaacagcgccaucggcaagauccaggacucccugagcuccaccgccagcgcccucgggaagcugcaggacgucgugaaccagaacgcgcaggcccugaacacgcucgugaagcagcuguccagcaacuucggcgccaucuccagcguccugaacgacauccucucccggcuggacaagguggaggccgaggugcagaucgaccgccugaucaccggccggcuccagagccugcagaccuacgucacccagcagcugauccgcgccgcggagauccgggccagcgccaaccucgccgccaccaagauguccgagugcgugcuggggcagagcaagcgcguggacuucugcggcaagggguaccaccugauguccuucccccagagcgcgccgcacggcgucguguuccuccacgucacguacgugcccgcccaggagaagaacuucaccaccgcccccgccaucugccacgacgggaaggcgcacuucccccgggagggcguguucgucuccaacggcacccacugguucgugacgcagcgcaacuucuacgagccgcagaucaucaccaccgacaacaccuucgugagcgggaacugcgacgucgugaucggcaucgugaacaacacggucuacgacccccugcagcccgagcuggacuccuucaaggaggagcucgacaaguacuucaagaaccacaccagccccgacguggaccugggggacaucuccggcaucaacgccagcguggucaacauccagaaggagaucgaccggcugaacgagguggccaagaaccucaacgagucccugaucgaccugcaggagcucggcaaguacgagcaguacaucaaguggccgugguacaucuggcugggguucaucgccggccugaucgccaucgugauggucaccaucaugcucugcugcaugaccagcugcugcuccugccugaaggggugcugcagcugcggcuccugcugcaaguucgacgaggacgacagcgagcccgugcugaagggggugaagcuccacuacacgugauaauaggcuggagccucgguggccuagcuucuugccccuugggccuccccccagccccuccuccccuuccugcacccguacccccguggucuuugaauaaagucugagugggcggcaaaaaaaaaaaaaaaaaaaaaaaaaaaaaaaaaaaaaaaaaaaaaaaaaaaaaaaaaaaaaaaaaaaaaaaaaaaaaaaaaaaaaaaaaaaaaaaaaaaaucuag

SEQ ID NO: 26522 - RNA, 4100 nt, Artificial Sequence
  SARS-CoV-2/Wuhan/WIV05/2019__EPI_ISL_402128 spike protein mRNA gc (1-1273)(E484K_D614G)
gggaaauaagagagaaaagaagaguaagaagaaauauaagaccccggcgccgccaccauguucguguuccugguccuccugccccuggugagcucccagugcgugaaccucaccacccgcacgcagcugccgcccgccuacaccaacagcuucacccggggcgucuacuaccccgacaagguguuccgcuccagcgugcugcacuccacccaggaccucuuccugcccuucuucagcaacgucacgugguuccacgccauccacguguccgggaccaacggcaccaagcgguucgacaacccggugcugcccuucaacgacggggucuacuucgcgagcaccgagaaguccaacaucauccgcggcuggaucuucgggacgacccucgacagcaagacccagucccugcugaucgugaacaacgccaccaacguggucaucaaggugugcgaguuccaguucugcaacgaccccuuccucggcguguacuaccacaagaacaacaagagcuggauggaguccgaguuccgggucuacagcuccgccaacaacugcacguucgaguacgugagccagcccuuccugauggaccuggagggcaagcaggggaacuucaagaaccuccgcgaguucguguucaagaacaucgacggcuacuucaagaucuacuccaagcacaccccgaucaaccugguccgggaccugccccagggguucagcgcccucgagccccugguggaccugcccaucggcaucaacaucacccgcuuccagacccuccuggcccugcaccgguccuaccucacgccgggggacagcagcuccggcuggaccgcgggcgccgccgccuacuacgugggguaccugcagccccgcaccuuccugcucaaguacaacgagaacggcaccaucacggacgcggucgacugcgcccuggacccccugagcgagaccaagugcacccucaaguccuucaccguggagaaggggaucuaccagacgagcaacuuccgggugcagcccaccgaguccaucguccgcuucccgaacaucaccaaccugugccccuucggcgagguguucaacgccacccgguucgccagcgucuacgccuggaaccgcaagcggaucuccaacugcguggcggacuacagcgugcuguacaacuccgccagcuucuccacguucaagugcuacggcgucagccccaccaagcucaacgaccugugcuucaccaacguguacgccgacuccuucgugauccgcggggacgagguccggcagaucgcccccggccagaccgggaagaucgccgacuacaacuacaagcugccggacgacuucacgggcugcgugaucgcguggaacagcaacaaccucgacuccaaggucgggggcaacuacaacuaccuguaccgccuguuccgcaagagcaaccucaagcccuucgagcgggacaucuccaccgagaucuaccaggccggcagcacccccugcaacggggugaagggcuucaacugcuacuucccccugcaguccuacggguuccagccgaccaacggcgugggguaccagcccuaccggguggucgugcugagcuucgagcuccugcacgcccccgccacggugugcggccccaagaaguccaccaaccuggucaagaacaagugcgugaacuucaacuucaacggccucaccgggaccggcgugcugaccgagagcaacaagaaguuccugccguuccagcaguucgggcgcgacaucgccgacacgaccgacgcgguccgcgacccccagacccuggagauccucgacaucacccccugcagcuucggcgggguguccgugaucacgccgggcaccaacaccagcaaccaggucgccgugcuguaccagggcgugaacugcaccgagguccccguggccauccacgccgaccagcugacgcccaccuggcggguguacuccaccgggagcaacgucuuccagacccgcgccggcugccucaucggggcggagcacgugaacaacuccuacgagugcgacauccccaucggcgccggcaucugcgccagcuaccagacgcagaccaacuccccgcggcgcgcccggagcguggcgucccagagcaucaucgccuacaccaugucccugggggccgagaacagcgucgccuacuccaacaacagcaucgccauccccaccaacuucacgaucuccgugaccaccgagauccugcccgugagcaugaccaagacgagcgucgacugcaccauguacaucugcggcgacuccaccgagugcagcaaccuccugcugcaguacggguccuucugcacccagcucaaccgcgcgcugacgggcaucgccguggagcaggacaagaacacccaggagguguucgcccaggucaagcagaucuacaagacgcccccgaucaaggacuucgggggcuucaacuucagccagauccugcccgaccccuccaagcccagcaagcgguccuucaucgaggaccuccuguucaacaaggugacccuggccgacgccggcuucaucaagcaguacggggacugccucggcgacaucgcggcccgcgaccugaucugcgcccagaaguucaacgggcugaccgugcucccgccccugcugaccgacgagaugaucgcccaguacaccagcgcccuccuggcgggcaccaucacguccggguggaccuucggcgccggcgccgcccugcagauccccuucgcgaugcagauggccuaccgguucaacgggaucggcgucacccagaacgugcucuacgagaaccagaagcugaucgccaaccaguucaacagcgccaucgggaagauccaggacucccugagcuccaccgccagcgcgcucggcaagcugcaggacguggucaaccagaacgcccaggcccugaacacgcucgugaagcagcuguccagcaacuucggggccaucuccagcgugcugaacgacauccucucccgccuggacaaggucgaggccgaggugcagaucgaccggcugaucaccggccgccuccagagccugcagaccuacgugacccagcagcugauccgggcggccgagauccgcgccagcgccaaccucgccgcgaccaagauguccgagugcguccugggccagagcaagcggguggacuucugcgggaagggcuaccaccugauguccuucccccagagcgccccgcacgggguggucuuccuccacgugacguacguccccgcccaggagaagaacuucaccaccgcccccgcgaucugccacgacggcaaggcccacuucccccgcgaggggguguucguguccaacggcacccacugguucgucacgcagcggaacuucuacgagccgcagaucaucaccaccgacaacaccuucgugagcggcaacugcgacguggucaucgggaucgugaacaacacgguguacgacccccugcagcccgagcuggacuccuucaaggaggagcucgacaaguacuucaagaaccacaccagccccgacgucgaccugggcgacaucuccgggaucaacgccagcguggugaacauccagaaggagaucgaccgccugaacgaggucgccaagaaccucaacgagucccugaucgaccugcaggagcucggcaaguacgagcaguacaucaaguggccgugguacaucuggcugggcuucaucgccgggcugaucgcgaucgugauggugaccaucaugcucugcugcaugaccagcugcugcuccugccugaagggcugcugcagcugcggguccugcugcaaguucgacgaggacgacagcgagcccguccugaagggcgugaagcuccacuacacgugauaauaggcuggagccucgguggccuagcuucuugccccuugggccuccccccagccccuccuccccuuccugcacccguacccccguggucuuugaauaaagucugagugggcggcaaaaaaaaaaaaaaaaaaaaaaaaaaaaaaaaaaaaaaaaaaaaaaaaaaaaaaaaaaaaaaaaaaaaaaaaaaaaaaaaaaaaaaaaaaaaaaaaaaaaucuag

SEQ ID NO: 26523 - RNA, 4100 nt, Artificial Sequence
  SARS-CoV-2/Wuhan/WIV05/2019__EPI_ISL_402128 spike protein mRNA gc (1-1273)(L18F_T20N_P26S_D138Y_R190S_K417T_E484K_N501Y_D614G_H655Y _T1027I)
gggaaauaagagagaaaagaagaguaagaagaaauauaagaccccggcgccgccaccauguucguguuccugguccuccugccccuggugagcucccagugcgugaacuucaccaaccgcacccagcucccgagcgccuacacgaacuccuucacccggggcgucuacuaccccgacaagguguuccgcagcuccgugcugcacagcacccaggaccuguuccuccccuucuucuccaacgucaccugguuccacgccauccacgugagcgggacgaacggcaccaagcgguucgacaaccccgugcugccguucaacgacggggucuacuucgcguccaccgagaaguccaacaucauccgcggcuggaucuucgggaccacgcuggacuccaagacccagagccuccugaucgugaacaacgccaccaacguggucaucaaggugugcgaguuccaguucugcaacuaccccuuccugggcguguacuaccacaagaacaacaaguccuggauggagagcgaguuccgggucuacuccagcgccaacaacugcaccuucgaguacgugucccagcccuuccucauggaccuggagggcaagcaggggaacuucaagaaccugagcgaguucguguucaagaacaucgacggcuacuucaagaucuacuccaagcacacgcccaucaaccucguccgcgaccugccgcagggguucagcgcccuggagccccucguggaccugcccaucggcaucaacaucacccgguuccagacccugcucgcccugcaccgcagcuaccugacccccggggacuccagcuccggcuggacggcgggcgccgccgccuacuacgugggguaccuccagccgcggaccuuccugcugaaguacaacgagaacggcaccaucaccgacgcggucgacugcgcccucgacccccugagcgagacgaagugcacccugaaguccuucaccguggagaaggggaucuaccagaccagcaacuuccgcgugcagcccacggaguccaucguccgguuccccaacaucaccaaccucugcccguucggcgagguguucaacgccacccgcuucgccagcgucuacgccuggaaccggaagcgcaucuccaacugcguggcggacuacagcgugcuguacaacuccgccagcuucuccaccuucaagugcuacggcgucagccccacgaagcugaacgaccucugcuucaccaacguguacgccgacuccuucgugauccgcggggacgagguccggcagaucgcccccggccagaccgggaccaucgccgacuacaacuacaagcugcccgacgacuucacgggcugcgugaucgcguggaacagcaacaaccuggacuccaaggucgggggcaacuacaacuaccucuaccggcuguuccgcaagagcaaccugaagccguucgagcgggacaucuccaccgagaucuaccaggccggcagcacccccugcaacggggugaagggcuucaacugcuacuucccccuccagagcuacggguuccagcccaccuacggcgugggguaccagccguaccgcguggucgugcuguccuucgagcugcuccacgcccccgccacggugugcggccccaagaaguccaccaaccuggucaagaacaagugcgugaacuucaacuucaacggccugaccgggaccggcgugcucaccgagagcaacaagaaguuccugcccuuccagcaguucgggcgggacaucgccgacacgaccgacgcgguccgcgacccgcagacccuggagauccuggacaucacccccugcagcuucggcgggguguccgugaucacgcccggcaccaacaccagcaaccaggucgccgugcucuaccagggcgugaacugcaccgaggucccgguggccauccacgccgaccagcugacgcccaccuggcgcguguacuccaccgggagcaacgucuuccagacccgggccggcugccugaucggggcggaguacgugaacaacuccuacgagugcgacauccccaucggcgccggcaucugcgccagcuaccagacgcagaccaacagcccccgccgggcccgcagcguggcgucccagagcaucaucgccuacaccaugucccucggggccgagaacagcgucgccuacuccaacaacagcaucgccaucccgaccaacuucacgaucagcgugaccaccgagauccugcccguguccaugaccaagacgagcgucgacugcaccauguacaucugcggcgacuccaccgagugcagcaaccugcuccugcaguacggguccuucugcacccagcugaaccgggcgcucacgggcaucgccguggagcaggacaagaacacccaggagguguucgcccaggucaagcagaucuacaagaccccgcccaucaaggacuucgggggcuucaacuucagccagauccugcccgaccccuccaagcccagcaagcgcuccuucaucgaggaccuccuguucaacaaggugacccuggccgacgccggcuucaucaagcaguacggggacugccugggcgacaucgcggcccgggaccucaucugcgcccagaaguucaacgggcugacggugcugcccccgcuccugaccgacgagaugaucgcccaguacaccagcgcccugcucgcgggcaccaucacguccggguggaccuucggcgccggcgccgcccugcagauccccuucgcgaugcagauggccuaccgcuucaacgggaucggcgucacccagaacgugcuguacgagaaccagaagcucaucgccaaccaguucaacagcgccaucgggaagauccaggacucccugagcuccaccgccagcgcgcugggcaagcuccaggacguggucaaccagaacgcccaggcccugaacacgcuggugaagcagcucuccagcaacuucggggccaucuccagcgugcugaacgacauccugagccggcucgacaaggucgaggccgaggugcagaucgaccgccugaucaccggccggcugcagucccuccagaccuacgugacccagcagcugauccgcgcggccgagauccgggccagcgccaaccuggccgcgaucaagauguccgagugcguccucggccagagcaagcgcguggacuucugcgggaagggcuaccaccugauguccuucccccagagcgcgccccacgggguggucuuccugcacgugaccuacgucccggcccaggagaagaacuucacgaccgcccccgccaucugccacgacggcaaggcccacuucccccgggaggggguguucguguccaacggcacccacugguucgucacccagcgcaacuucuacgagccccagaucaucacgaccgacaacaccuucgugagcggcaacugcgacguggucaucgggaucgugaacaacaccguguacgacccgcuccagcccgagcuggacuccuucaaggaggagcuggacaaguacuucaagaaccacacgagccccgacgucgaccucggcgacaucuccgggaucaacgccagcguggugaacauccagaaggagaucgaccggcugaacgaggucgccaagaaccugaacgagucccucaucgaccugcaggagcugggcaaguacgagcaguacaucaaguggcccugguacaucuggcucggcuucaucgccgggcugaucgcgaucgugauggugaccaucaugcugugcugcaugaccagcugcugcuccugccucaagggcugcugcagcugcggguccugcugcaaguucgacgaggacgacagcgagccgguccugaagggcgugaagcugcacuacaccugauaauaggcuggagccucgguggccuagcuucuugccccuugggccuccccccagccccuccuccccuuccugcacccguacccccguggucuuugaauaaagucugagugggcggcaaaaaaaaaaaaaaaaaaaaaaaaaaaaaaaaaaaaaaaaaaaaaaaaaaaaaaaaaaaaaaaaaaaaaaaaaaaaaaaaaaaaaaaaaaaaaaaaaaaaucuag

SEQ ID NO: 26524 - RNA, 4100 nt, Artificial Sequence
  SARS-CoV-2/Wuhan/WIV05/2019__EPI_ISL_402128 spike protein mRNA gc (1-1273)(S13I_W152C_L452R_D614G)
gggaaauaagagagaaaagaagaguaagaagaaauauaagaccccggcgccgccaccauguucguguuccugguccuccugccccuggugagcauccagugcgugaaccucaccacccgcacgcagcugccgcccgccuacaccaacuccuucacccggggcgucuacuaccccgacaagguguuccgcagcuccgugcugcacagcacccaggaccucuuccugcccuucuucuccaacgucacgugguuccacgccauccacgugagcgggaccaacggcaccaagcgguucgacaacccggugcugcccuucaacgacggggucuacuucgcguccaccgagaaguccaacaucauccgcggcuggaucuucgggacgacccucgacagcaagacccagagccugcugaucgugaacaacgccaccaacguggucaucaaggugugcgaguuccaguucugcaacgaccccuuccucggcguguacuaccacaagaacaacaaguccugcauggagagcgaguuccgggucuacuccagcgccaacaacugcacguucgaguacgugucccagcccuuccugauggaccuggagggcaagcaggggaacuucaagaaccuccgcgaguucguguucaagaacaucgacggcuacuucaagaucuacagcaagcacaccccgaucaaccugguccgggaccugccccagggguucuccgcccucgagccccugguggaccugcccaucggcaucaacaucacccgcuuccagacccuccuggcccugcaccggagcuaccucacgccgggggacuccagcagcggcuggaccgcgggcgccgccgccuacuacgugggguaccugcagccccgcaccuuccugcucaaguacaacgagaacggcaccaucacggacgcggucgacugcgcccuggacccccuguccgagaccaagugcacccucaagagcuucaccguggagaaggggaucuaccagacguccaacuuccgggugcagcccaccgagagcaucguccgcuucccgaacaucaccaaccugugccccuucggcgagguguucaacgccacccgguucgccuccgucuacgccuggaaccgcaagcggaucagcaacugcguggcggacuacuccgugcuguacaacagcgccuccuucagcacguucaagugcuacggcgucucccccaccaagcucaacgaccugugcuucaccaacguguacgccgacagcuucgugauccgcggggacgagguccggcagaucgcccccggccagaccgggaagaucgccgacuacaacuacaagcugccggacgacuucacgggcugcgugaucgcguggaacuccaacaaccucgacagcaaggucgggggcaacuacaacuaccgcuaccggcuguuccgcaaguccaaccugaagcccuucgagcgggacaucagcaccgagaucuaccaggccggcuccacccccugcaacgggguggagggcuucaacugcuacuucccccuccagagcuacggguuccagccgaccaacggcgugggguaccagcccuaccgcguggucgugcuguccuucgagcugcuccacgcccccgccacggugugcggccccaagaaguccaccaaccuggucaagaacaagugcgugaacuucaacuucaacggccugaccgggaccggcgugcucaccgagagcaacaagaaguuccugccguuccagcaguucgggcgcgacaucgccgacacgaccgacgcgguccgggacccccagacccuggagauccuggacaucacccccugcagcuucggcggggugagcgugaucacgccgggcaccaacaccuccaaccaggucgccgugcucuaccagggcgugaacugcaccgagguccccguggccauccacgccgaccagcugacgcccaccuggcgcguguacagcaccggguccaacgucuuccagacccgggccggcugccugaucggggcggagcacgugaacaacagcuacgagugcgacauccccaucggcgccggcaucugcgccuccuaccagacgcagaccaacagcccgcgccgggcccgcuccguggcgagccaguccaucaucgccuacaccaugagccucggggccgagaacuccgucgccuacagcaacaacuccaucgccauccccaccaacuucacgaucagcgugaccaccgagauccugcccguguccaugaccaagacgagcgucgacugcaccauguacaucugcggcgacagcaccgagugcuccaaccugcuccugcaguacgggagcuucugcacccagcugaaccgggcgcucacgggcaucgccguggagcaggacaagaacacccaggagguguucgcccaggucaagcagaucuacaagacgcccccgaucaaggacuucgggggcuucaacuucucccagauccugcccgaccccagcaagcccuccaagcgcagcuucaucgaggaccuccuguucaacaaggugacccuggccgacgccggcuucaucaagcaguacggggacugccugggcgacaucgcggcccgggaccucaucugcgcccagaaguucaacgggcugaccgugcugccgccccuccugaccgacgagaugaucgcccaguacaccuccgcccugcucgcgggcaccaucacgagcggguggaccuucggcgccggcgccgcccugcagauccccuucgcgaugcagauggccuaccgcuucaacgggaucggcgucacccagaacgugcuguacgagaaccagaagcucaucgccaaccaguucaacuccgccaucgggaagauccaggacagccuguccagcaccgccuccgcgcugggcaagcuccaggacguggucaaccagaacgcccaggcccugaacacgcuggugaagcagcucagcuccaacuucggggccaucagcuccgugcugaacgacauccugagccggcucgacaaggucgaggccgaggugcagaucgaccgccugaucaccggccggcugcagucccuccagaccuacgugacccagcagcugauccgcgcggccgagauccgggccagcgccaaccuggccgcgaccaagaugagcgagugcguccucggccaguccaagcgcguggacuucugcgggaagggcuaccaccugaugagcuucccccaguccgccccgcacgggguggucuuccugcacgugacguacguccccgcccaggagaagaacuucaccaccgcccccgcgaucugccacgacggcaaggcccacuucccccgggaggggguguucgugagcaacggcacccacugguucgucacgcagcgcaacuucuacgagccgcagaucaucaccaccgacaacaccuucguguccggcaacugcgacguggucaucgggaucgugaacaacacgguguacgacccccuccagcccgagcuggacagcuucaaggaggagcuggacaaguacuucaagaaccacaccucccccgacgucgaccucggcgacaucagcgggaucaacgccuccguggugaacauccagaaggagaucgaccggcugaacgaggucgccaagaaccugaacgagagccucaucgaccugcaggagcugggcaaguacgagcaguacaucaaguggccgugguacaucuggcucggcuucaucgccgggcugaucgcgaucgugauggugaccaucaugcugugcugcaugaccuccugcugcagcugccucaagggcugcugcuccugcgggagcugcugcaaguucgacgaggacgacuccgagcccguccugaagggcgugaagcugcacuacacgugauaauaggcuggagccucgguggccuagcuucuugccccuugggccuccccccagccccuccuccccuuccugcacccguacccccguggucuuugaauaaagucugagugggcggcaaaaaaaaaaaaaaaaaaaaaaaaaaaaaaaaaaaaaaaaaaaaaaaaaaaaaaaaaaaaaaaaaaaaaaaaaaaaaaaaaaaaaaaaaaaaaaaaaaaaucuag

SEQ ID NO: 26525 - RNA, 4100 nt, Artificial Sequence
  SARS-CoV-2/Wuhan/WIV05/2019__EPI_ISL_402128 spike protein mRNA gc (1-1273)
gggaaauaagagagaaaagaagaguaagaagaaauauaagaccccggcgccgccaccauguucguguuccuggugcugcugccccuggugagcagccagugcgugaaccugaccacccggacccagcugccaccagccuacaccaacagcuucacccggggcgucuacuaccccgacaagguguuccggagcagcguccugcacagcacccaggaccuguuccugcccuucuucagcaacgugaccugguuccacgccauccacgugagcggcaccaacggcaccaagcgguucgacaaccccgugcugcccuucaacgacggcguguacuucgccagcaccgagaagagcaacaucauccggggcuggaucuucggcaccacccuggacagcaagacccagagccugcugaucgugaauaacgccaccaacguggugaucaaggugugcgaguuccaguucugcaacgaccccuuccugggcguguacuaccacaagaacaacaagagcuggauggagagcgaguuccggguguacagcagcgccaacaacugcaccuucgaguacgugagccagcccuuccugauggaccuggagggcaagcagggcaacuucaagaaccugcgggaguucguguucaagaacaucgacggcuacuucaagaucuacagcaagcacaccccaaucaaccuggugcgggaucugccccagggcuucucagcccuggagccccugguggaccugcccaucggcaucaacaucacccgguuccagacccugcuggcccugcaccggagcuaccugaccccaggcgacagcagcagcggguggacagcaggcgcggcugcuuacuacgugggcuaccugcagccccggaccuuccugcugaaguacaacgagaacggcaccaucaccgacgccguggacugcgcccuggacccucugagcgagaccaagugcacccugaagagcuucaccguggagaagggcaucuaccagaccagcaacuuccgggugcagcccaccgagagcaucgugcgguuccccaacaucaccaaccugugccccuucggcgagguguucaacgccacccgguucgccagcguguacgccuggaaccggaagcggaucagcaacugcguggccgacuacagcgugcuguacaacagcgccagcuucagcaccuucaagugcuacggcgugagccccaccaagcugaacgaccugugcuucaccaacguguacgccgacagcuucgugauccguggcgacgaggugcggcagaucgcacccggccagacaggcaagaucgccgacuacaacuacaagcugcccgacgacuucaccggcugcgugaucgccuggaacagcaacaaccucgacagcaaggugggcggcaacuacaacuaccuguaccggcuguuccggaagagcaaccugaagcccuucgagcgggacaucagcaccgagaucuaccaagccggcuccaccccuugcaacggcguggagggcuucaacugcuacuucccucugcagagcuacggcuuccagcccaccaacggcgugggcuaccagcccuaccgggugguggugcugagcuucgagcugcugcacgccccagccaccguguguggccccaagaagagcaccaaccuggugaagaacaagugcgugaacuucaacuucaacggccuuaccggcaccggcgugcugaccgagagcaacaagaaauuccugcccuuucagcaguucggccgggacaucgccgacaccaccgacgcugugcgggauccccagacccuggagauccuggacaucaccccuugcagcuucggcggcgugagcgugaucaccccaggcaccaacaccagcaaccagguggccgugcuguaccaggacgugaacugcaccgaggugcccguggccauccacgccgaccagcugacacccaccuggcgggucuacagcaccggcagcaacguguuccagacccgggccgguugccugaucggcgccgagcacgugaacaacagcuacgagugcgacauccccaucggcgccggcaucugugccagcuaccagacccagaccaauucaccccggagggcaaggagcguggccagccagagcaucaucgccuacaccaugagccugggcgccgagaacagcguggccuacagcaacaacagcaucgccauccccaccaacuucaccaucagcgugaccaccgagauucugcccgugagcaugaccaagaccagcguggacugcaccauguacaucugcggcgacagcaccgagugcagcaaccugcugcugcaguacggcagcuucugcacccagcugaaccgggcccugaccggcaucgccguggagcaggacaagaacacccaggagguguucgcccaggugaagcagaucuacaagaccccucccaucaaggacuucggcggcuucaacuucagccagauccugcccgaccccagcaagcccagcaagcggagcuucaucgaggaccugcuguucaacaaggugacccuagccgacgccggcuucaucaagcaguacggcgacugccucggcgacauagccgcccgggaccugaucugcgcccagaaguucaacggccugaccgugcugccuccccugcugaccgacgagaugaucgcccaguacaccagcgcccuguuagccggaaccaucaccagcggcuggacuuucggcgcuggagccgcucugcagauccccuucgccaugcagauggccuaccgguucaacggcaucggcgugacccagaacgugcuguacgagaaccagaagcugaucgccaaccaguucaacagcgccaucggcaagauccaggacagccugagcagcaccgcuagcgcccugggcaagcugcaggacguggugaaccagaacgcccaggcccugaacacccuggugaagcagcugagcagcaacuucggcgccaucagcagcgugcugaacgacauccugagccggcuggacaaggucgaggccgaggugcagaucgaccggcugaucacuggccggcugcagagccugcagaccuacgugacccagcagcugauccgggccgccgagauucgggccagcgccaaccuggccgccaccaagaugagcgagugcgugcugggccagagcaagcggguggacuucugcggcaagggcuaccaccugaugagcuuuccccagagcgcaccccacggagugguguuccugcacgugaccuacgugcccgcccaggagaagaacuucaccaccgccccagccaucugccacgacggcaaggcccacuuuccccgggagggcguguucgugagcaacggcacccacugguucgugacccagcggaacuucuacgagccccagaucaucaccaccgacaacaccuucgugagcggcaacugcgacguggugaucggcaucgugaacaacaccguguacgauccccugcagcccgagcuggacagcuucaaggaggagcuggacaaguacuucaagaaucacaccagccccgacguggaccugggcgacaucagcggcaucaacgccagcguggugaacauccagaaggagaucgaucggcugaacgagguggccaagaaccugaacgagagccugaucgaccugcaggagcugggcaaguacgagcaguacaucaaguggcccugguacaucuggcugggcuucaucgccggccugaucgccaucgugauggugaccaucaugcugugcugcaugaccagcugcugcagcugccugaagggcuguugcagcugcggcagcugcugcaaguucgacgaggacgacagcgagcccgugcugaagggcgugaagcugcacuacaccugauaauaggcuggagccucgguggccuagcuucuugccccuugggccuccccccagccccuccuccccuuccugcacccguacccccguggucuuugaauaaagucugagugggcggcaaaaaaaaaaaaaaaaaaaaaaaaaaaaaaaaaaaaaaaaaaaaaaaaaaaaaaaaaaaaaaaaaaaaaaaaaaaaaaaaaaaaaaaaaaaaaaaaaaaaucuag

SEQ ID NO: 26526 - RNA, 4100 nt, Artificial Sequence
  SARS-CoV-2/Wuhan/WIV05/2019__EPI_ISL_402128 spike protein mRNA gc (1-1273)(D614G)
gggaaauaagagagaaaagaagaguaagaagaaauauaagaccccggcgccgccaccauguucguguuccuggugcugcugccccuggugagcagccagugcgugaaccugaccacccggacccagcugccaccagccuacaccaacagcuucacccggggcgucuacuaccccgacaagguguuccggagcagcguccugcacagcacccaggaccuguuccugcccuucuucagcaacgugaccugguuccacgccauccacgugagcggcaccaacggcaccaagcgguucgacaaccccgugcugcccuucaacgacggcguguacuucgccagcaccgagaagagcaacaucauccggggcuggaucuucggcaccacccuggacagcaagacccagagccugcugaucgugaauaacgccaccaacguggugaucaaggugugcgaguuccaguucugcaacgaccccuuccugggcguguacuaccacaagaacaacaagagcuggauggagagcgaguuccggguguacagcagcgccaacaacugcaccuucgaguacgugagccagcccuuccugauggaccuggagggcaagcagggcaacuucaagaaccugcgggaguucguguucaagaacaucgacggcuacuucaagaucuacagcaagcacaccccaaucaaccuggugcgggaucugccccagggcuucucagcccuggagccccugguggaccugcccaucggcaucaacaucacccgguuccagacccugcuggcccugcaccggagcuaccugaccccaggcgacagcagcagcggguggacagcaggcgcggcugcuuacuacgugggcuaccugcagccccggaccuuccugcugaaguacaacgagaacggcaccaucaccgacgccguggacugcgcccuggacccucugagcgagaccaagugcacccugaagagcuucaccguggagaagggcaucuaccagaccagcaacuuccgggugcagcccaccgagagcaucgugcgguuccccaacaucaccaaccugugccccuucggcgagguguucaacgccacccgguucgccagcguguacgccuggaaccggaagcggaucagcaacugcguggccgacuacagcgugcuguacaacagcgccagcuucagcaccuucaagugcuacggcgugagccccaccaagcugaacgaccugugcuucaccaacguguacgccgacagcuucgugauccguggcgacgaggugcggcagaucgcacccggccagacaggcaagaucgccgacuacaacuacaagcugcccgacgacuucaccggcugcgugaucgccuggaacagcaacaaccucgacagcaaggugggcggcaacuacaacuaccuguaccggcuguuccggaagagcaaccugaagcccuucgagcgggacaucagcaccgagaucuaccaagccggcuccaccccuugcaacggcguggagggcuucaacugcuacuucccucugcagagcuacggcuuccagcccaccaacggcgugggcuaccagcccuaccgggugguggugcugagcuucgagcugcugcacgccccagccaccguguguggccccaagaagagcaccaaccuggugaagaacaagugcgugaacuucaacuucaacggccuuaccggcaccggcgugcugaccgagagcaacaagaaauuccugcccuuucagcaguucggccgggacaucgccgacaccaccgacgcugugcgggauccccagacccuggagauccuggacaucaccccuugcagcuucggcggcgugagcgugaucaccccaggcaccaacaccagcaaccagguggccgugcuguaccagggcgugaacugcaccgaggugcccguggccauccacgccgaccagcugacacccaccuggcgggucuacagcaccggcagcaacguguuccagacccgggccgguugccugaucggcgccgagcacgugaacaacagcuacgagugcgacauccccaucggcgccggcaucugugccagcuaccagacccagaccaauucaccccggagggcaaggagcguggccagccagagcaucaucgccuacaccaugagccugggcgccgagaacagcguggccuacagcaacaacagcaucgccauccccaccaacuucaccaucagcgugaccaccgagauucugcccgugagcaugaccaagaccagcguggacugcaccauguacaucugcggcgacagcaccgagugcagcaaccugcugcugcaguacggcagcuucugcacccagcugaaccgggcccugaccggcaucgccguggagcaggacaagaacacccaggagguguucgcccaggugaagcagaucuacaagaccccucccaucaaggacuucggcggcuucaacuucagccagauccugcccgaccccagcaagcccagcaagcggagcuucaucgaggaccugcuguucaacaaggugacccuagccgacgccggcuucaucaagcaguacggcgacugccucggcgacauagccgcccgggaccugaucugcgcccagaaguucaacggccugaccgugcugccuccccugcugaccgacgagaugaucgcccaguacaccagcgcccuguuagccggaaccaucaccagcggcuggacuuucggcgcuggagccgcucugcagauccccuucgccaugcagauggccuaccgguucaacggcaucggcgugacccagaacgugcuguacgagaaccagaagcugaucgccaaccaguucaacagcgccaucggcaagauccaggacagccugagcagcaccgcuagcgcccugggcaagcugcaggacguggugaaccagaacgcccaggcccugaacacccuggugaagcagcugagcagcaacuucggcgccaucagcagcgugcugaacgacauccugagccggcuggacaaggucgaggccgaggugcagaucgaccggcugaucacuggccggcugcagagccugcagaccuacgugacccagcagcugauccgggccgccgagauucgggccagcgccaaccuggccgccaccaagaugagcgagugcgugcugggccagagcaagcggguggacuucugcggcaagggcuaccaccugaugagcuuuccccagagcgcaccccacggagugguguuccugcacgugaccuacgugcccgcccaggagaagaacuucaccaccgccccagccaucugccacgacggcaaggcccacuuuccccgggagggcguguucgugagcaacggcacccacugguucgugacccagcggaacuucuacgagccccagaucaucaccaccgacaacaccuucgugagcggcaacugcgacguggugaucggcaucgugaacaacaccguguacgauccccugcagcccgagcuggacagcuucaaggaggagcuggacaaguacuucaagaaucacaccagccccgacguggaccugggcgacaucagcggcaucaacgccagcguggugaacauccagaaggagaucgaucggcugaacgagguggccaagaaccugaacgagagccugaucgaccugcaggagcugggcaaguacgagcaguacaucaaguggcccugguacaucuggcugggcuucaucgccggccugaucgccaucgugauggugaccaucaugcugugcugcaugaccagcugcugcagcugccugaagggcuguugcagcugcggcagcugcugcaaguucgacgaggacgacagcgagcccgugcugaagggcgugaagcugcacuacaccugauaauaggcuggagccucgguggccuagcuucuugccccuugggccuccccccagccccuccuccccuuccugcacccguacccccguggucuuugaauaaagucugagugggcggcaaaaaaaaaaaaaaaaaaaaaaaaaaaaaaaaaaaaaaaaaaaaaaaaaaaaaaaaaaaaaaaaaaaaaaaaaaaaaaaaaaaaaaaaaaaaaaaaaaaaucuag

SEQ ID NO: 26527 - RNA, 4100 nt, Artificial Sequence
  SARS-CoV-2/Wuhan/WIV05/2019__EPI_ISL_402128 spike protein mRNA gc (1-1273)(A222V_D614G)
gggaaauaagagagaaaagaagaguaagaagaaauauaagaccccggcgccgccaccauguucguguuccuggugcugcugccccuggugagcagccagugcgugaaccugaccacccggacccagcugccaccagccuacaccaacagcuucacccggggcgucuacuaccccgacaagguguuccggagcagcguccugcacagcacccaggaccuguuccugcccuucuucagcaacgugaccugguuccacgccauccacgugagcggcaccaacggcaccaagcgguucgacaaccccgugcugcccuucaacgacggcguguacuucgccagcaccgagaagagcaacaucauccggggcuggaucuucggcaccacccuggacagcaagacccagagccugcugaucgugaauaacgccaccaacguggugaucaaggugugcgaguuccaguucugcaacgaccccuuccugggcguguacuaccacaagaacaacaagagcuggauggagagcgaguuccggguguacagcagcgccaacaacugcaccuucgaguacgugagccagcccuuccugauggaccuggagggcaagcagggcaacuucaagaaccugcgggaguucguguucaagaacaucgacggcuacuucaagaucuacagcaagcacaccccaaucaaccuggugcgggaucugccccagggcuucucagugcuggagccccugguggaccugcccaucggcaucaacaucacccgguuccagacccugcuggcccugcaccggagcuaccugaccccaggcgacagcagcagcggguggacagcaggcgcggcugcuuacuacgugggcuaccugcagccccggaccuuccugcugaaguacaacgagaacggcaccaucaccgacgccguggacugcgcccuggacccucugagcgagaccaagugcacccugaagagcuucaccguggagaagggcaucuaccagaccagcaacuuccgggugcagcccaccgagagcaucgugcgguuccccaacaucaccaaccugugccccuucggcgagguguucaacgccacccgguucgccagcguguacgccuggaaccggaagcggaucagcaacugcguggccgacuacagcgugcuguacaacagcgccagcuucagcaccuucaagugcuacggcgugagccccaccaagcugaacgaccugugcuucaccaacguguacgccgacagcuucgugauccguggcgacgaggugcggcagaucgcacccggccagacaggcaagaucgccgacuacaacuacaagcugcccgacgacuucaccggcugcgugaucgccuggaacagcaacaaccucgacagcaaggugggcggcaacuacaacuaccuguaccggcuguuccggaagagcaaccugaagcccuucgagcgggacaucagcaccgagaucuaccaagccggcuccaccccuugcaacggcguggagggcuucaacugcuacuucccucugcagagcuacggcuuccagcccaccaacggcgugggcuaccagcccuaccgggugguggugcugagcuucgagcugcugcacgccccagccaccguguguggccccaagaagagcaccaaccuggugaagaacaagugcgugaacuucaacuucaacggccuuaccggcaccggcgugcugaccgagagcaacaagaaauuccugcccuuucagcaguucggccgggacaucgccgacaccaccgacgcugugcgggauccccagacccuggagauccuggacaucaccccuugcagcuucggcggcgugagcgugaucaccccaggcaccaacaccagcaaccagguggccgugcuguaccagggcgugaacugcaccgaggugcccguggccauccacgccgaccagcugacacccaccuggcgggucuacagcaccggcagcaacguguuccagacccgggccgguugccugaucggcgccgagcacgugaacaacagcuacgagugcgacauccccaucggcgccggcaucugugccagcuaccagacccagaccaauucaccccggagggcaaggagcguggccagccagagcaucaucgccuacaccaugagccugggcgccgagaacagcguggccuacagcaacaacagcaucgccauccccaccaacuucaccaucagcgugaccaccgagauucugcccgugagcaugaccaagaccagcguggacugcaccauguacaucugcggcgacagcaccgagugcagcaaccugcugcugcaguacggcagcuucugcacccagcugaaccgggcccugaccggcaucgccguggagcaggacaagaacacccaggagguguucgcccaggugaagcagaucuacaagaccccucccaucaaggacuucggcggcuucaacuucagccagauccugcccgaccccagcaagcccagcaagcggagcuucaucgaggaccugcuguucaacaaggugacccuagccgacgccggcuucaucaagcaguacggcgacugccucggcgacauagccgcccgggaccugaucugcgcccagaaguucaacggccugaccgugcugccuccccugcugaccgacgagaugaucgcccaguacaccagcgcccuguuagccggaaccaucaccagcggcuggacuuucggcgcuggagccgcucugcagauccccuucgccaugcagauggccuaccgguucaacggcaucggcgugacccagaacgugcuguacgagaaccagaagcugaucgccaaccaguucaacagcgccaucggcaagauccaggacagccugagcagcaccgcuagcgcccugggcaagcugcaggacguggugaaccagaacgcccaggcccugaacacccuggugaagcagcugagcagcaacuucggcgccaucagcagcgugcugaacgacauccugagccggcuggacaaggucgaggccgaggugcagaucgaccggcugaucacuggccggcugcagagccugcagaccuacgugacccagcagcugauccgggccgccgagauucgggccagcgccaaccuggccgccaccaagaugagcgagugcgugcugggccagagcaagcggguggacuucugcggcaagggcuaccaccugaugagcuuuccccagagcgcaccccacggagugguguuccugcacgugaccuacgugcccgcccaggagaagaacuucaccaccgccccagccaucugccacgacggcaaggcccacuuuccccgggagggcguguucgugagcaacggcacccacugguucgugacccagcggaacuucuacgagccccagaucaucaccaccgacaacaccuucgugagcggcaacugcgacguggugaucggcaucgugaacaacaccguguacgauccccugcagcccgagcuggacagcuucaaggaggagcuggacaaguacuucaagaaucacaccagccccgacguggaccugggcgacaucagcggcaucaacgccagcguggugaacauccagaaggagaucgaucggcugaacgagguggccaagaaccugaacgagagccugaucgaccugcaggagcugggcaaguacgagcaguacaucaaguggcccugguacaucuggcugggcuucaucgccggccugaucgccaucgugauggugaccaucaugcugugcugcaugaccagcugcugcagcugccugaagggcuguugcagcugcggcagcugcugcaaguucgacgaggacgacagcgagcccgugcugaagggcgugaagcugcacuacaccugauaauaggcuggagccucgguggccuagcuucuugccccuugggccuccccccagccccuccuccccuuccugcacccguacccccguggucuuugaauaaagucugagugggcggcaaaaaaaaaaaaaaaaaaaaaaaaaaaaaaaaaaaaaaaaaaaaaaaaaaaaaaaaaaaaaaaaaaaaaaaaaaaaaaaaaaaaaaaaaaaaaaaaaaaaucuag

SEQ ID NO: 26528 - RNA, 4100 nt, Artificial Sequence
  SARS-CoV-2/Wuhan/WIV05/2019__EPI_ISL_402128 spike protein mRNA gc (1-1273)(N439K_D614G)
gggaaauaagagagaaaagaagaguaagaagaaauauaagaccccggcgccgccaccauguucguguuccuggugcugcugccccuggugagcagccagugcgugaaccugaccacccggacccagcugccaccagccuacaccaacagcuucacccggggcgucuacuaccccgacaagguguuccggagcagcguccugcacagcacccaggaccuguuccugcccuucuucagcaacgugaccugguuccacgccauccacgugagcggcaccaacggcaccaagcgguucgacaaccccgugcugcccuucaacgacggcguguacuucgccagcaccgagaagagcaacaucauccggggcuggaucuucggcaccacccuggacagcaagacccagagccugcugaucgugaauaacgccaccaacguggugaucaaggugugcgaguuccaguucugcaacgaccccuuccugggcguguacuaccacaagaacaacaagagcuggauggagagcgaguuccggguguacagcagcgccaacaacugcaccuucgaguacgugagccagcccuuccugauggaccuggagggcaagcagggcaacuucaagaaccugcgggaguucguguucaagaacaucgacggcuacuucaagaucuacagcaagcacaccccaaucaaccuggugcgggaucugccccagggcuucucagcccuggagccccugguggaccugcccaucggcaucaacaucacccgguuccagacccugcuggcccugcaccggagcuaccugaccccaggcgacagcagcagcggguggacagcaggcgcggcugcuuacuacgugggcuaccugcagccccggaccuuccugcugaaguacaacgagaacggcaccaucaccgacgccguggacugcgcccuggacccucugagcgagaccaagugcacccugaagagcuucaccguggagaagggcaucuaccagaccagcaacuuccgggugcagcccaccgagagcaucgugcgguuccccaacaucaccaaccugugccccuucggcgagguguucaacgccacccgguucgccagcguguacgccuggaaccggaagcggaucagcaacugcguggccgacuacagcgugcuguacaacagcgccagcuucagcaccuucaagugcuacggcgugagccccaccaagcugaacgaccugugcuucaccaacguguacgccgacagcuucgugauccguggcgacgaggugcggcagaucgcacccggccagacaggcaagaucgccgacuacaacuacaagcugcccgacgacuucaccggcugcgugaucgccuggaacagcaagaaccucgacagcaaggugggcggcaacuacaacuaccuguaccggcuguuccggaagagcaaccugaagcccuucgagcgggacaucagcaccgagaucuaccaagccggcuccaccccuugcaacggcguggagggcuucaacugcuacuucccucugcagagcuacggcuuccagcccaccaacggcgugggcuaccagcccuaccgggugguggugcugagcuucgagcugcugcacgccccagccaccguguguggccccaagaagagcaccaaccuggugaagaacaagugcgugaacuucaacuucaacggccuuaccggcaccggcgugcugaccgagagcaacaagaaauuccugcccuuucagcaguucggccgggacaucgccgacaccaccgacgcugugcgggauccccagacccuggagauccuggacaucaccccuugcagcuucggcggcgugagcgugaucaccccaggcaccaacaccagcaaccagguggccgugcuguaccagggcgugaacugcaccgaggugcccguggccauccacgccgaccagcugacacccaccuggcgggucuacagcaccggcagcaacguguuccagacccgggccgguugccugaucggcgccgagcacgugaacaacagcuacgagugcgacauccccaucggcgccggcaucugugccagcuaccagacccagaccaauucaccccggagggcaaggagcguggccagccagagcaucaucgccuacaccaugagccugggcgccgagaacagcguggccuacagcaacaacagcaucgccauccccaccaacuucaccaucagcgugaccaccgagauucugcccgugagcaugaccaagaccagcguggacugcaccauguacaucugcggcgacagcaccgagugcagcaaccugcugcugcaguacggcagcuucugcacccagcugaaccgggcccugaccggcaucgccguggagcaggacaagaacacccaggagguguucgcccaggugaagcagaucuacaagaccccucccaucaaggacuucggcggcuucaacuucagccagauccugcccgaccccagcaagcccagcaagcggagcuucaucgaggaccugcuguucaacaaggugacccuagccgacgccggcuucaucaagcaguacggcgacugccucggcgacauagccgcccgggaccugaucugcgcccagaaguucaacggccugaccgugcugccuccccugcugaccgacgagaugaucgcccaguacaccagcgcccuguuagccggaaccaucaccagcggcuggacuuucggcgcuggagccgcucugcagauccccuucgccaugcagauggccuaccgguucaacggcaucggcgugacccagaacgugcuguacgagaaccagaagcugaucgccaaccaguucaacagcgccaucggcaagauccaggacagccugagcagcaccgcuagcgcccugggcaagcugcaggacguggugaaccagaacgcccaggcccugaacacccuggugaagcagcugagcagcaacuucggcgccaucagcagcgugcugaacgacauccugagccggcuggacaaggucgaggccgaggugcagaucgaccggcugaucacuggccggcugcagagccugcagaccuacgugacccagcagcugauccgggccgccgagauucgggccagcgccaaccuggccgccaccaagaugagcgagugcgugcugggccagagcaagcggguggacuucugcggcaagggcuaccaccugaugagcuuuccccagagcgcaccccacggagugguguuccugcacgugaccuacgugcccgcccaggagaagaacuucaccaccgccccagccaucugccacgacggcaaggcccacuuuccccgggagggcguguucgugagcaacggcacccacugguucgugacccagcggaacuucuacgagccccagaucaucaccaccgacaacaccuucgugagcggcaacugcgacguggugaucggcaucgugaacaacaccguguacgauccccugcagcccgagcuggacagcuucaaggaggagcuggacaaguacuucaagaaucacaccagccccgacguggaccugggcgacaucagcggcaucaacgccagcguggugaacauccagaaggagaucgaucggcugaacgagguggccaagaaccugaacgagagccugaucgaccugcaggagcugggcaaguacgagcaguacaucaaguggcccugguacaucuggcugggcuucaucgccggccugaucgccaucgugauggugaccaucaugcugugcugcaugaccagcugcugcagcugccugaagggcuguugcagcugcggcagcugcugcaaguucgacgaggacgacagcgagcccgugcugaagggcgugaagcugcacuacaccugauaauaggcuggagccucgguggccuagcuucuugccccuugggccuccccccagccccuccuccccuuccugcacccguacccccguggucuuugaauaaagucugagugggcggcaaaaaaaaaaaaaaaaaaaaaaaaaaaaaaaaaaaaaaaaaaaaaaaaaaaaaaaaaaaaaaaaaaaaaaaaaaaaaaaaaaaaaaaaaaaaaaaaaaaaucuag

SEQ ID NO: 26529 - RNA, 4100 nt, Artificial Sequence
  SARS-CoV-2/Wuhan/WIV05/2019__EPI_ISL_402128 spike protein mRNA gc (1-1273)(S477N_D614G)
gggaaauaagagagaaaagaagaguaagaagaaauauaagaccccggcgccgccaccauguucguguuccuggugcugcugccccuggugagcagccagugcgugaaccugaccacccggacccagcugccaccagccuacaccaacagcuucacccggggcgucuacuaccccgacaagguguuccggagcagcguccugcacagcacccaggaccuguuccugcccuucuucagcaacgugaccugguuccacgccauccacgugagcggcaccaacggcaccaagcgguucgacaaccccgugcugcccuucaacgacggcguguacuucgccagcaccgagaagagcaacaucauccggggcuggaucuucggcaccacccuggacagcaagacccagagccugcugaucgugaauaacgccaccaacguggugaucaaggugugcgaguuccaguucugcaacgaccccuuccugggcguguacuaccacaagaacaacaagagcuggauggagagcgaguuccggguguacagcagcgccaacaacugcaccuucgaguacgugagccagcccuuccugauggaccuggagggcaagcagggcaacuucaagaaccugcgggaguucguguucaagaacaucgacggcuacuucaagaucuacagcaagcacaccccaaucaaccuggugcgggaucugccccagggcuucucagcccuggagccccugguggaccugcccaucggcaucaacaucacccgguuccagacccugcuggcccugcaccggagcuaccugaccccaggcgacagcagcagcggguggacagcaggcgcggcugcuuacuacgugggcuaccugcagccccggaccuuccugcugaaguacaacgagaacggcaccaucaccgacgccguggacugcgcccuggacccucugagcgagaccaagugcacccugaagagcuucaccguggagaagggcaucuaccagaccagcaacuuccgggugcagcccaccgagagcaucgugcgguuccccaacaucaccaaccugugccccuucggcgagguguucaacgccacccgguucgccagcguguacgccuggaaccggaagcggaucagcaacugcguggccgacuacagcgugcuguacaacagcgccagcuucagcaccuucaagugcuacggcgugagccccaccaagcugaacgaccugugcuucaccaacguguacgccgacagcuucgugauccguggcgacgaggugcggcagaucgcacccggccagacaggcaagaucgccgacuacaacuacaagcugcccgacgacuucaccggcugcgugaucgccuggaacagcaacaaccucgacagcaaggugggcggcaacuacaacuaccuguaccggcuguuccggaagagcaaccugaagcccuucgagcgggacaucagcaccgagaucuaccaagccggcaacaccccuugcaacggcguggagggcuucaacugcuacuucccucugcagagcuacggcuuccagcccaccaacggcgugggcuaccagcccuaccgggugguggugcugagcuucgagcugcugcacgccccagccaccguguguggccccaagaagagcaccaaccuggugaagaacaagugcgugaacuucaacuucaacggccuuaccggcaccggcgugcugaccgagagcaacaagaaauuccugcccuuucagcaguucggccgggacaucgccgacaccaccgacgcugugcgggauccccagacccuggagauccuggacaucaccccuugcagcuucggcggcgugagcgugaucaccccaggcaccaacaccagcaaccagguggccgugcuguaccagggcgugaacugcaccgaggugcccguggccauccacgccgaccagcugacacccaccuggcgggucuacagcaccggcagcaacguguuccagacccgggccgguugccugaucggcgccgagcacgugaacaacagcuacgagugcgacauccccaucggcgccggcaucugugccagcuaccagacccagaccaauucaccccggagggcaaggagcguggccagccagagcaucaucgccuacaccaugagccugggcgccgagaacagcguggccuacagcaacaacagcaucgccauccccaccaacuucaccaucagcgugaccaccgagauucugcccgugagcaugaccaagaccagcguggacugcaccauguacaucugcggcgacagcaccgagugcagcaaccugcugcugcaguacggcagcuucugcacccagcugaaccgggcccugaccggcaucgccguggagcaggacaagaacacccaggagguguucgcccaggugaagcagaucuacaagaccccucccaucaaggacuucggcggcuucaacuucagccagauccugcccgaccccagcaagcccagcaagcggagcuucaucgaggaccugcuguucaacaaggugacccuagccgacgccggcuucaucaagcaguacggcgacugccucggcgacauagccgcccgggaccugaucugcgcccagaaguucaacggccugaccgugcugccuccccugcugaccgacgagaugaucgcccaguacaccagcgcccuguuagccggaaccaucaccagcggcuggacuuucggcgcuggagccgcucugcagauccccuucgccaugcagauggccuaccgguucaacggcaucggcgugacccagaacgugcuguacgagaaccagaagcugaucgccaaccaguucaacagcgccaucggcaagauccaggacagccugagcagcaccgcuagcgcccugggcaagcugcaggacguggugaaccagaacgcccaggcccugaacacccuggugaagcagcugagcagcaacuucggcgccaucagcagcgugcugaacgacauccugagccggcuggacaaggucgaggccgaggugcagaucgaccggcugaucacuggccggcugcagagccugcagaccuacgugacccagcagcugauccgggccgccgagauucgggccagcgccaaccuggccgccaccaagaugagcgagugcgugcugggccagagcaagcggguggacuucugcggcaagggcuaccaccugaugagcuuuccccagagcgcaccccacggagugguguuccugcacgugaccuacgugcccgcccaggagaagaacuucaccaccgccccagccaucugccacgacggcaaggcccacuuuccccgggagggcguguucgugagcaacggcacccacugguucgugacccagcggaacuucuacgagccccagaucaucaccaccgacaacaccuucgugagcggcaacugcgacguggugaucggcaucgugaacaacaccguguacgauccccugcagcccgagcuggacagcuucaaggaggagcuggacaaguacuucaagaaucacaccagccccgacguggaccugggcgacaucagcggcaucaacgccagcguggugaacauccagaaggagaucgaucggcugaacgagguggccaagaaccugaacgagagccugaucgaccugcaggagcugggcaaguacgagcaguacaucaaguggcccugguacaucuggcugggcuucaucgccggccugaucgccaucgugauggugaccaucaugcugugcugcaugaccagcugcugcagcugccugaagggcuguugcagcugcggcagcugcugcaaguucgacgaggacgacagcgagcccgugcugaagggcgugaagcugcacuacaccugauaauaggcuggagccucgguggccuagcuucuugccccuugggccuccccccagccccuccuccccuuccugcacccguacccccguggucuuugaauaaagucugagugggcggcaaaaaaaaaaaaaaaaaaaaaaaaaaaaaaaaaaaaaaaaaaaaaaaaaaaaaaaaaaaaaaaaaaaaaaaaaaaaaaaaaaaaaaaaaaaaaaaaaaaaucuag

SEQ ID NO: 26530 - RNA, 4100 nt, Artificial Sequence
  SARS-CoV-2/Wuhan/WIV05/2019__EPI_ISL_402128 spike protein mRNA gc (1-1273)(N501Y_D614G)
gggaaauaagagagaaaagaagaguaagaagaaauauaagaccccggcgccgccaccauguucguguuccuggugcugcugccccuggugagcagccagugcgugaaccugaccacccggacccagcugccaccagccuacaccaacagcuucacccggggcgucuacuaccccgacaagguguuccggagcagcguccugcacagcacccaggaccuguuccugcccuucuucagcaacgugaccugguuccacgccauccacgugagcggcaccaacggcaccaagcgguucgacaaccccgugcugcccuucaacgacggcguguacuucgccagcaccgagaagagcaacaucauccggggcuggaucuucggcaccacccuggacagcaagacccagagccugcugaucgugaauaacgccaccaacguggugaucaaggugugcgaguuccaguucugcaacgaccccuuccugggcguguacuaccacaagaacaacaagagcuggauggagagcgaguuccggguguacagcagcgccaacaacugcaccuucgaguacgugagccagcccuuccugauggaccuggagggcaagcagggcaacuucaagaaccugcgggaguucguguucaagaacaucgacggcuacuucaagaucuacagcaagcacaccccaaucaaccuggugcgggaucugccccagggcuucucagcccuggagccccugguggaccugcccaucggcaucaacaucacccgguuccagacccugcuggcccugcaccggagcuaccugaccccaggcgacagcagcagcggguggacagcaggcgcggcugcuuacuacgugggcuaccugcagccccggaccuuccugcugaaguacaacgagaacggcaccaucaccgacgccguggacugcgcccuggacccucugagcgagaccaagugcacccugaagagcuucaccguggagaagggcaucuaccagaccagcaacuuccgggugcagcccaccgagagcaucgugcgguuccccaacaucaccaaccugugccccuucggcgagguguucaacgccacccgguucgccagcguguacgccuggaaccggaagcggaucagcaacugcguggccgacuacagcgugcuguacaacagcgccagcuucagcaccuucaagugcuacggcgugagccccaccaagcugaacgaccugugcuucaccaacguguacgccgacagcuucgugauccguggcgacgaggugcggcagaucgcacccggccagacaggcaagaucgccgacuacaacuacaagcugcccgacgacuucaccggcugcgugaucgccuggaacagcaacaaccucgacagcaaggugggcggcaacuacaacuaccuguaccggcuguuccggaagagcaaccugaagcccuucgagcgggacaucagcaccgagaucuaccaagccggcuccaccccuugcaacggcguggagggcuucaacugcuacuucccucugcagagcuacggcuuccagcccaccuacggcgugggcuaccagcccuaccgggugguggugcugagcuucgagcugcugcacgccccagccaccguguguggccccaagaagagcaccaaccuggugaagaacaagugcgugaacuucaacuucaacggccuuaccggcaccggcgugcugaccgagagcaacaagaaauuccugcccuuucagcaguucggccgggacaucgccgacaccaccgacgcugugcgggauccccagacccuggagauccuggacaucaccccuugcagcuucggcggcgugagcgugaucaccccaggcaccaacaccagcaaccagguggccgugcuguaccagggcgugaacugcaccgaggugcccguggccauccacgccgaccagcugacacccaccuggcgggucuacagcaccggcagcaacguguuccagacccgggccgguugccugaucggcgccgagcacgugaacaacagcuacgagugcgacauccccaucggcgccggcaucugugccagcuaccagacccagaccaauucaccccggagggcaaggagcguggccagccagagcaucaucgccuacaccaugagccugggcgccgagaacagcguggccuacagcaacaacagcaucgccauccccaccaacuucaccaucagcgugaccaccgagauucugcccgugagcaugaccaagaccagcguggacugcaccauguacaucugcggcgacagcaccgagugcagcaaccugcugcugcaguacggcagcuucugcacccagcugaaccgggcccugaccggcaucgccguggagcaggacaagaacacccaggagguguucgcccaggugaagcagaucuacaagaccccucccaucaaggacuucggcggcuucaacuucagccagauccugcccgaccccagcaagcccagcaagcggagcuucaucgaggaccugcuguucaacaaggugacccuagccgacgccggcuucaucaagcaguacggcgacugccucggcgacauagccgcccgggaccugaucugcgcccagaaguucaacggccugaccgugcugccuccccugcugaccgacgagaugaucgcccaguacaccagcgcccuguuagccggaaccaucaccagcggcuggacuuucggcgcuggagccgcucugcagauccccuucgccaugcagauggccuaccgguucaacggcaucggcgugacccagaacgugcuguacgagaaccagaagcugaucgccaaccaguucaacagcgccaucggcaagauccaggacagccugagcagcaccgcuagcgcccugggcaagcugcaggacguggugaaccagaacgcccaggcccugaacacccuggugaagcagcugagcagcaacuucggcgccaucagcagcgugcugaacgacauccugagccggcuggacaaggucgaggccgaggugcagaucgaccggcugaucacuggccggcugcagagccugcagaccuacgugacccagcagcugauccgggccgccgagauucgggccagcgccaaccuggccgccaccaagaugagcgagugcgugcugggccagagcaagcggguggacuucugcggcaagggcuaccaccugaugagcuuuccccagagcgcaccccacggagugguguuccugcacgugaccuacgugcccgcccaggagaagaacuucaccaccgccccagccaucugccacgacggcaaggcccacuuuccccgggagggcguguucgugagcaacggcacccacugguucgugacccagcggaacuucuacgagccccagaucaucaccaccgacaacaccuucgugagcggcaacugcgacguggugaucggcaucgugaacaacaccguguacgauccccugcagcccgagcuggacagcuucaaggaggagcuggacaaguacuucaagaaucacaccagccccgacguggaccugggcgacaucagcggcaucaacgccagcguggugaacauccagaaggagaucgaucggcugaacgagguggccaagaaccugaacgagagccugaucgaccugcaggagcugggcaaguacgagcaguacaucaaguggcccugguacaucuggcugggcuucaucgccggccugaucgccaucgugauggugaccaucaugcugugcugcaugaccagcugcugcagcugccugaagggcuguugcagcugcggcagcugcugcaaguucgacgaggacgacagcgagcccgugcugaagggcgugaagcugcacuacaccugauaauaggcuggagccucgguggccuagcuucuugccccuugggccuccccccagccccuccuccccuuccugcacccguacccccguggucuuugaauaaagucugagugggcggcaaaaaaaaaaaaaaaaaaaaaaaaaaaaaaaaaaaaaaaaaaaaaaaaaaaaaaaaaaaaaaaaaaaaaaaaaaaaaaaaaaaaaaaaaaaaaaaaaaaaucuag

SEQ ID NO: 26531 - RNA, 4094 nt, Artificial Sequence
  SARS-CoV-2/Wuhan/WIV05/2019__EPI_ISL_402128 spike protein mRNA gc (1-1273)(H69del_V70del_D614G)
gggaaauaagagagaaaagaagaguaagaagaaauauaagaccccggcgccgccaccauguucguguuccuggugcugcugccccuggugagcagccagugcgugaaccugaccacccggacccagcugccaccagccuacaccaacagcuucacccggggcgucuacuaccccgacaagguguuccggagcagcguccugcacagcacccaggaccuguuccugcccuucuucagcaacgugaccugguuccacgccaucagcggcaccaacggcaccaagcgguucgacaaccccgugcugcccuucaacgacggcguguacuucgccagcaccgagaagagcaacaucauccggggcuggaucuucggcaccacccuggacagcaagacccagagccugcugaucgugaauaacgccaccaacguggugaucaaggugugcgaguuccaguucugcaacgaccccuuccugggcguguacuaccacaagaacaacaagagcuggauggagagcgaguuccggguguacagcagcgccaacaacugcaccuucgaguacgugagccagcccuuccugauggaccuggagggcaagcagggcaacuucaagaaccugcgggaguucguguucaagaacaucgacggcuacuucaagaucuacagcaagcacaccccaaucaaccuggugcgggaucugccccagggcuucucagcccuggagccccugguggaccugcccaucggcaucaacaucacccgguuccagacccugcuggcccugcaccggagcuaccugaccccaggcgacagcagcagcggguggacagcaggcgcggcugcuuacuacgugggcuaccugcagccccggaccuuccugcugaaguacaacgagaacggcaccaucaccgacgccguggacugcgcccuggacccucugagcgagaccaagugcacccugaagagcuucaccguggagaagggcaucuaccagaccagcaacuuccgggugcagcccaccgagagcaucgugcgguuccccaacaucaccaaccugugccccuucggcgagguguucaacgccacccgguucgccagcguguacgccuggaaccggaagcggaucagcaacugcguggccgacuacagcgugcuguacaacagcgccagcuucagcaccuucaagugcuacggcgugagccccaccaagcugaacgaccugugcuucaccaacguguacgccgacagcuucgugauccguggcgacgaggugcggcagaucgcacccggccagacaggcaagaucgccgacuacaacuacaagcugcccgacgacuucaccggcugcgugaucgccuggaacagcaacaaccucgacagcaaggugggcggcaacuacaacuaccuguaccggcuguuccggaagagcaaccugaagcccuucgagcgggacaucagcaccgagaucuaccaagccggcuccaccccuugcaacggcguggagggcuucaacugcuacuucccucugcagagcuacggcuuccagcccaccaacggcgugggcuaccagcccuaccgggugguggugcugagcuucgagcugcugcacgccccagccaccguguguggccccaagaagagcaccaaccuggugaagaacaagugcgugaacuucaacuucaacggccuuaccggcaccggcgugcugaccgagagcaacaagaaauuccugcccuuucagcaguucggccgggacaucgccgacaccaccgacgcugugcgggauccccagacccuggagauccuggacaucaccccuugcagcuucggcggcgugagcgugaucaccccaggcaccaacaccagcaaccagguggccgugcuguaccagggcgugaacugcaccgaggugcccguggccauccacgccgaccagcugacacccaccuggcgggucuacagcaccggcagcaacguguuccagacccgggccgguugccugaucggcgccgagcacgugaacaacagcuacgagugcgacauccccaucggcgccggcaucugugccagcuaccagacccagaccaauucaccccggagggcaaggagcguggccagccagagcaucaucgccuacaccaugagccugggcgccgagaacagcguggccuacagcaacaacagcaucgccauccccaccaacuucaccaucagcgugaccaccgagauucugcccgugagcaugaccaagaccagcguggacugcaccauguacaucugcggcgacagcaccgagugcagcaaccugcugcugcaguacggcagcuucugcacccagcugaaccgggcccugaccggcaucgccguggagcaggacaagaacacccaggagguguucgcccaggugaagcagaucuacaagaccccucccaucaaggacuucggcggcuucaacuucagccagauccugcccgaccccagcaagcccagcaagcggagcuucaucgaggaccugcuguucaacaaggugacccuagccgacgccggcuucaucaagcaguacggcgacugccucggcgacauagccgcccgggaccugaucugcgcccagaaguucaacggccugaccgugcugccuccccugcugaccgacgagaugaucgcccaguacaccagcgcccuguuagccggaaccaucaccagcggcuggacuuucggcgcuggagccgcucugcagauccccuucgccaugcagauggccuaccgguucaacggcaucggcgugacccagaacgugcuguacgagaaccagaagcugaucgccaaccaguucaacagcgccaucggcaagauccaggacagccugagcagcaccgcuagcgcccugggcaagcugcaggacguggugaaccagaacgcccaggcccugaacacccuggugaagcagcugagcagcaacuucggcgccaucagcagcgugcugaacgacauccugagccggcuggacaaggucgaggccgaggugcagaucgaccggcugaucacuggccggcugcagagccugcagaccuacgugacccagcagcugauccgggccgccgagauucgggccagcgccaaccuggccgccaccaagaugagcgagugcgugcugggccagagcaagcggguggacuucugcggcaagggcuaccaccugaugagcuuuccccagagcgcaccccacggagugguguuccugcacgugaccuacgugcccgcccaggagaagaacuucaccaccgccccagccaucugccacgacggcaaggcccacuuuccccgggagggcguguucgugagcaacggcacccacugguucgugacccagcggaacuucuacgagccccagaucaucaccaccgacaacaccuucgugagcggcaacugcgacguggugaucggcaucgugaacaacaccguguacgauccccugcagcccgagcuggacagcuucaaggaggagcuggacaaguacuucaagaaucacaccagccccgacguggaccugggcgacaucagcggcaucaacgccagcguggugaacauccagaaggagaucgaucggcugaacgagguggccaagaaccugaacgagagccugaucgaccugcaggagcugggcaaguacgagcaguacaucaaguggcccugguacaucuggcugggcuucaucgccggccugaucgccaucgugauggugaccaucaugcugugcugcaugaccagcugcugcagcugccugaagggcuguugcagcugcggcagcugcugcaaguucgacgaggacgacagcgagcccgugcugaagggcgugaagcugcacuacaccugauaauaggcuggagccucgguggccuagcuucuugccccuugggccuccccccagccccuccuccccuuccugcacccguacccccguggucuuugaauaaagucugagugggcggcaaaaaaaaaaaaaaaaaaaaaaaaaaaaaaaaaaaaaaaaaaaaaaaaaaaaaaaaaaaaaaaaaaaaaaaaaaaaaaaaaaaaaaaaaaaaaaaaaaaaucuag

SEQ ID NO: 26532 - RNA, 4100 nt, Artificial Sequence
  SARS-CoV-2/Wuhan/WIV05/2019__EPI_ISL_402128 spike protein mRNA gc (1-1273)(Y453F_D614G)
gggaaauaagagagaaaagaagaguaagaagaaauauaagaccccggcgccgccaccauguucguguuccuggugcugcugccccuggugagcagccagugcgugaaccugaccacccggacccagcugccaccagccuacaccaacagcuucacccggggcgucuacuaccccgacaagguguuccggagcagcguccugcacagcacccaggaccuguuccugcccuucuucagcaacgugaccugguuccacgccauccacgugagcggcaccaacggcaccaagcgguucgacaaccccgugcugcccuucaacgacggcguguacuucgccagcaccgagaagagcaacaucauccggggcuggaucuucggcaccacccuggacagcaagacccagagccugcugaucgugaauaacgccaccaacguggugaucaaggugugcgaguuccaguucugcaacgaccccuuccugggcguguacuaccacaagaacaacaagagcuggauggagagcgaguuccggguguacagcagcgccaacaacugcaccuucgaguacgugagccagcccuuccugauggaccuggagggcaagcagggcaacuucaagaaccugcgggaguucguguucaagaacaucgacggcuacuucaagaucuacagcaagcacaccccaaucaaccuggugcgggaucugccccagggcuucucagcccuggagccccugguggaccugcccaucggcaucaacaucacccgguuccagacccugcuggcccugcaccggagcuaccugaccccaggcgacagcagcagcggguggacagcaggcgcggcugcuuacuacgugggcuaccugcagccccggaccuuccugcugaaguacaacgagaacggcaccaucaccgacgccguggacugcgcccuggacccucugagcgagaccaagugcacccugaagagcuucaccguggagaagggcaucuaccagaccagcaacuuccgggugcagcccaccgagagcaucgugcgguuccccaacaucaccaaccugugccccuucggcgagguguucaacgccacccgguucgccagcguguacgccuggaaccggaagcggaucagcaacugcguggccgacuacagcgugcuguacaacagcgccagcuucagcaccuucaagugcuacggcgugagccccaccaagcugaacgaccugugcuucaccaacguguacgccgacagcuucgugauccguggcgacgaggugcggcagaucgcacccggccagacaggcaagaucgccgacuacaacuacaagcugcccgacgacuucaccggcugcgugaucgccuggaacagcaacaaccucgacagcaaggugggcggcaacuacaacuaccuguuccggcuguuccggaagagcaaccugaagcccuucgagcgggacaucagcaccgagaucuaccaagccggcuccaccccuugcaacggcguggagggcuucaacugcuacuucccucugcagagcuacggcuuccagcccaccaacggcgugggcuaccagcccuaccgggugguggugcugagcuucgagcugcugcacgccccagccaccguguguggccccaagaagagcaccaaccuggugaagaacaagugcgugaacuucaacuucaacggccuuaccggcaccggcgugcugaccgagagcaacaagaaauuccugcccuuucagcaguucggccgggacaucgccgacaccaccgacgcugugcgggauccccagacccuggagauccuggacaucaccccuugcagcuucggcggcgugagcgugaucaccccaggcaccaacaccagcaaccagguggccgugcuguaccagggcgugaacugcaccgaggugcccguggccauccacgccgaccagcugacacccaccuggcgggucuacagcaccggcagcaacguguuccagacccgggccgguugccugaucggcgccgagcacgugaacaacagcuacgagugcgacauccccaucggcgccggcaucugugccagcuaccagacccagaccaauucaccccggagggcaaggagcguggccagccagagcaucaucgccuacaccaugagccugggcgccgagaacagcguggccuacagcaacaacagcaucgccauccccaccaacuucaccaucagcgugaccaccgagauucugcccgugagcaugaccaagaccagcguggacugcaccauguacaucugcggcgacagcaccgagugcagcaaccugcugcugcaguacggcagcuucugcacccagcugaaccgggcccugaccggcaucgccguggagcaggacaagaacacccaggagguguucgcccaggugaagcagaucuacaagaccccucccaucaaggacuucggcggcuucaacuucagccagauccugcccgaccccagcaagcccagcaagcggagcuucaucgaggaccugcuguucaacaaggugacccuagccgacgccggcuucaucaagcaguacggcgacugccucggcgacauagccgcccgggaccugaucugcgcccagaaguucaacggccugaccgugcugccuccccugcugaccgacgagaugaucgcccaguacaccagcgcccuguuagccggaaccaucaccagcggcuggacuuucggcgcuggagccgcucugcagauccccuucgccaugcagauggccuaccgguucaacggcaucggcgugacccagaacgugcuguacgagaaccagaagcugaucgccaaccaguucaacagcgccaucggcaagauccaggacagccugagcagcaccgcuagcgcccugggcaagcugcaggacguggugaaccagaacgcccaggcccugaacacccuggugaagcagcugagcagcaacuucggcgccaucagcagcgugcugaacgacauccugagccggcuggacaaggucgaggccgaggugcagaucgaccggcugaucacuggccggcugcagagccugcagaccuacgugacccagcagcugauccgggccgccgagauucgggccagcgccaaccuggccgccaccaagaugagcgagugcgugcugggccagagcaagcggguggacuucugcggcaagggcuaccaccugaugagcuuuccccagagcgcaccccacggagugguguuccugcacgugaccuacgugcccgcccaggagaagaacuucaccaccgccccagccaucugccacgacggcaaggcccacuuuccccgggagggcguguucgugagcaacggcacccacugguucgugacccagcggaacuucuacgagccccagaucaucaccaccgacaacaccuucgugagcggcaacugcgacguggugaucggcaucgugaacaacaccguguacgauccccugcagcccgagcuggacagcuucaaggaggagcuggacaaguacuucaagaaucacaccagccccgacguggaccugggcgacaucagcggcaucaacgccagcguggugaacauccagaaggagaucgaucggcugaacgagguggccaagaaccugaacgagagccugaucgaccugcaggagcugggcaaguacgagcaguacaucaaguggcccugguacaucuggcugggcuucaucgccggccugaucgccaucgugauggugaccaucaugcugugcugcaugaccagcugcugcagcugccugaagggcuguugcagcugcggcagcugcugcaaguucgacgaggacgacagcgagcccgugcugaagggcgugaagcugcacuacaccugauaauaggcuggagccucgguggccuagcuucuugccccuugggccuccccccagccccuccuccccuuccugcacccguacccccguggucuuugaauaaagucugagugggcggcaaaaaaaaaaaaaaaaaaaaaaaaaaaaaaaaaaaaaaaaaaaaaaaaaaaaaaaaaaaaaaaaaaaaaaaaaaaaaaaaaaaaaaaaaaaaaaaaaaaaucuag

SEQ ID NO: 26533 - RNA, 4100 nt, Artificial Sequence
  SARS-CoV-2/Wuhan/WIV05/2019__EPI_ISL_402128 spike protein mRNA gc (1-1273)(D614G_I692V)
gggaaauaagagagaaaagaagaguaagaagaaauauaagaccccggcgccgccaccauguucguguuccuggugcugcugccccuggugagcagccagugcgugaaccugaccacccggacccagcugccaccagccuacaccaacagcuucacccggggcgucuacuaccccgacaagguguuccggagcagcguccugcacagcacccaggaccuguuccugcccuucuucagcaacgugaccugguuccacgccauccacgugagcggcaccaacggcaccaagcgguucgacaaccccgugcugcccuucaacgacggcguguacuucgccagcaccgagaagagcaacaucauccggggcuggaucuucggcaccacccuggacagcaagacccagagccugcugaucgugaauaacgccaccaacguggugaucaaggugugcgaguuccaguucugcaacgaccccuuccugggcguguacuaccacaagaacaacaagagcuggauggagagcgaguuccggguguacagcagcgccaacaacugcaccuucgaguacgugagccagcccuuccugauggaccuggagggcaagcagggcaacuucaagaaccugcgggaguucguguucaagaacaucgacggcuacuucaagaucuacagcaagcacaccccaaucaaccuggugcgggaucugccccagggcuucucagcccuggagccccugguggaccugcccaucggcaucaacaucacccgguuccagacccugcuggcccugcaccggagcuaccugaccccaggcgacagcagcagcggguggacagcaggcgcggcugcuuacuacgugggcuaccugcagccccggaccuuccugcugaaguacaacgagaacggcaccaucaccgacgccguggacugcgcccuggacccucugagcgagaccaagugcacccugaagagcuucaccguggagaagggcaucuaccagaccagcaacuuccgggugcagcccaccgagagcaucgugcgguuccccaacaucaccaaccugugccccuucggcgagguguucaacgccacccgguucgccagcguguacgccuggaaccggaagcggaucagcaacugcguggccgacuacagcgugcuguacaacagcgccagcuucagcaccuucaagugcuacggcgugagccccaccaagcugaacgaccugugcuucaccaacguguacgccgacagcuucgugauccguggcgacgaggugcggcagaucgcacccggccagacaggcaagaucgccgacuacaacuacaagcugcccgacgacuucaccggcugcgugaucgccuggaacagcaacaaccucgacagcaaggugggcggcaacuacaacuaccuguaccggcuguuccggaagagcaaccugaagcccuucgagcgggacaucagcaccgagaucuaccaagccggcuccaccccuugcaacggcguggagggcuucaacugcuacuucccucugcagagcuacggcuuccagcccaccaacggcgugggcuaccagcccuaccgggugguggugcugagcuucgagcugcugcacgccccagccaccguguguggccccaagaagagcaccaaccuggugaagaacaagugcgugaacuucaacuucaacggccuuaccggcaccggcgugcugaccgagagcaacaagaaauuccugcccuuucagcaguucggccgggacaucgccgacaccaccgacgcugugcgggauccccagacccuggagauccuggacaucaccccuugcagcuucggcggcgugagcgugaucaccccaggcaccaacaccagcaaccagguggccgugcuguaccagggcgugaacugcaccgaggugcccguggccauccacgccgaccagcugacacccaccuggcgggucuacagcaccggcagcaacguguuccagacccgggccgguugccugaucggcgccgagcacgugaacaacagcuacgagugcgacauccccaucggcgccggcaucugugccagcuaccagacccagaccaauucaccccggagggcaaggagcguggccagccagagcgugaucgccuacaccaugagccugggcgccgagaacagcguggccuacagcaacaacagcaucgccauccccaccaacuucaccaucagcgugaccaccgagauucugcccgugagcaugaccaagaccagcguggacugcaccauguacaucugcggcgacagcaccgagugcagcaaccugcugcugcaguacggcagcuucugcacccagcugaaccgggcccugaccggcaucgccguggagcaggacaagaacacccaggagguguucgcccaggugaagcagaucuacaagaccccucccaucaaggacuucggcggcuucaacuucagccagauccugcccgaccccagcaagcccagcaagcggagcuucaucgaggaccugcuguucaacaaggugacccuagccgacgccggcuucaucaagcaguacggcgacugccucggcgacauagccgcccgggaccugaucugcgcccagaaguucaacggccugaccgugcugccuccccugcugaccgacgagaugaucgcccaguacaccagcgcccuguuagccggaaccaucaccagcggcuggacuuucggcgcuggagccgcucugcagauccccuucgccaugcagauggccuaccgguucaacggcaucggcgugacccagaacgugcuguacgagaaccagaagcugaucgccaaccaguucaacagcgccaucggcaagauccaggacagccugagcagcaccgcuagcgcccugggcaagcugcaggacguggugaaccagaacgcccaggcccugaacacccuggugaagcagcugagcagcaacuucggcgccaucagcagcgugcugaacgacauccugagccggcuggacaaggucgaggccgaggugcagaucgaccggcugaucacuggccggcugcagagccugcagaccuacgugacccagcagcugauccgggccgccgagauucgggccagcgccaaccuggccgccaccaagaugagcgagugcgugcugggccagagcaagcggguggacuucugcggcaagggcuaccaccugaugagcuuuccccagagcgcaccccacggagugguguuccugcacgugaccuacgugcccgcccaggagaagaacuucaccaccgccccagccaucugccacgacggcaaggcccacuuuccccgggagggcguguucgugagcaacggcacccacugguucgugacccagcggaacuucuacgagccccagaucaucaccaccgacaacaccuucgugagcggcaacugcgacguggugaucggcaucgugaacaacaccguguacgauccccugcagcccgagcuggacagcuucaaggaggagcuggacaaguacuucaagaaucacaccagccccgacguggaccugggcgacaucagcggcaucaacgccagcguggugaacauccagaaggagaucgaucggcugaacgagguggccaagaaccugaacgagagccugaucgaccugcaggagcugggcaaguacgagcaguacaucaaguggcccugguacaucuggcugggcuucaucgccggccugaucgccaucgugauggugaccaucaugcugugcugcaugaccagcugcugcagcugccugaagggcuguugcagcugcggcagcugcugcaaguucgacgaggacgacagcgagcccgugcugaagggcgugaagcugcacuacaccugauaauaggcuggagccucgguggccuagcuucuugccccuugggccuccccccagccccuccuccccuuccugcacccguacccccguggucuuugaauaaagucugagugggcggcaaaaaaaaaaaaaaaaaaaaaaaaaaaaaaaaaaaaaaaaaaaaaaaaaaaaaaaaaaaaaaaaaaaaaaaaaaaaaaaaaaaaaaaaaaaaaaaaaaaaucuag

SEQ ID NO: 26534 - RNA, 4100 nt, Artificial Sequence
  SARS-CoV-2/Wuhan/WIV05/2019__EPI_ISL_402128 spike protein mRNA gc (1-1273)(D614G_M1229I)
gggaaauaagagagaaaagaagaguaagaagaaauauaagaccccggcgccgccaccauguucguguuccuggugcugcugccccuggugagcagccagugcgugaaccugaccacccggacccagcugccaccagccuacaccaacagcuucacccggggcgucuacuaccccgacaagguguuccggagcagcguccugcacagcacccaggaccuguuccugcccuucuucagcaacgugaccugguuccacgccauccacgugagcggcaccaacggcaccaagcgguucgacaaccccgugcugcccuucaacgacggcguguacuucgccagcaccgagaagagcaacaucauccggggcuggaucuucggcaccacccuggacagcaagacccagagccugcugaucgugaauaacgccaccaacguggugaucaaggugugcgaguuccaguucugcaacgaccccuuccugggcguguacuaccacaagaacaacaagagcuggauggagagcgaguuccggguguacagcagcgccaacaacugcaccuucgaguacgugagccagcccuuccugauggaccuggagggcaagcagggcaacuucaagaaccugcgggaguucguguucaagaacaucgacggcuacuucaagaucuacagcaagcacaccccaaucaaccuggugcgggaucugccccagggcuucucagcccuggagccccugguggaccugcccaucggcaucaacaucacccgguuccagacccugcuggcccugcaccggagcuaccugaccccaggcgacagcagcagcggguggacagcaggcgcggcugcuuacuacgugggcuaccugcagccccggaccuuccugcugaaguacaacgagaacggcaccaucaccgacgccguggacugcgcccuggacccucugagcgagaccaagugcacccugaagagcuucaccguggagaagggcaucuaccagaccagcaacuuccgggugcagcccaccgagagcaucgugcgguuccccaacaucaccaaccugugccccuucggcgagguguucaacgccacccgguucgccagcguguacgccuggaaccggaagcggaucagcaacugcguggccgacuacagcgugcuguacaacagcgccagcuucagcaccuucaagugcuacggcgugagccccaccaagcugaacgaccugugcuucaccaacguguacgccgacagcuucgugauccguggcgacgaggugcggcagaucgcacccggccagacaggcaagaucgccgacuacaacuacaagcugcccgacgacuucaccggcugcgugaucgccuggaacagcaacaaccucgacagcaaggugggcggcaacuacaacuaccuguaccggcuguuccggaagagcaaccugaagcccuucgagcgggacaucagcaccgagaucuaccaagccggcuccaccccuugcaacggcguggagggcuucaacugcuacuucccucugcagagcuacggcuuccagcccaccaacggcgugggcuaccagcccuaccgggugguggugcugagcuucgagcugcugcacgccccagccaccguguguggccccaagaagagcaccaaccuggugaagaacaagugcgugaacuucaacuucaacggccuuaccggcaccggcgugcugaccgagagcaacaagaaauuccugcccuuucagcaguucggccgggacaucgccgacaccaccgacgcugugcgggauccccagacccuggagauccuggacaucaccccuugcagcuucggcggcgugagcgugaucaccccaggcaccaacaccagcaaccagguggccgugcuguaccagggcgugaacugcaccgaggugcccguggccauccacgccgaccagcugacacccaccuggcgggucuacagcaccggcagcaacguguuccagacccgggccgguugccugaucggcgccgagcacgugaacaacagcuacgagugcgacauccccaucggcgccggcaucugugccagcuaccagacccagaccaauucaccccggagggcaaggagcguggccagccagagcaucaucgccuacaccaugagccugggcgccgagaacagcguggccuacagcaacaacagcaucgccauccccaccaacuucaccaucagcgugaccaccgagauucugcccgugagcaugaccaagaccagcguggacugcaccauguacaucugcggcgacagcaccgagugcagcaaccugcugcugcaguacggcagcuucugcacccagcugaaccgggcccugaccggcaucgccguggagcaggacaagaacacccaggagguguucgcccaggugaagcagaucuacaagaccccucccaucaaggacuucggcggcuucaacuucagccagauccugcccgaccccagcaagcccagcaagcggagcuucaucgaggaccugcuguucaacaaggugacccuagccgacgccggcuucaucaagcaguacggcgacugccucggcgacauagccgcccgggaccugaucugcgcccagaaguucaacggccugaccgugcugccuccccugcugaccgacgagaugaucgcccaguacaccagcgcccuguuagccggaaccaucaccagcggcuggacuuucggcgcuggagccgcucugcagauccccuucgccaugcagauggccuaccgguucaacggcaucggcgugacccagaacgugcuguacgagaaccagaagcugaucgccaaccaguucaacagcgccaucggcaagauccaggacagccugagcagcaccgcuagcgcccugggcaagcugcaggacguggugaaccagaacgcccaggcccugaacacccuggugaagcagcugagcagcaacuucggcgccaucagcagcgugcugaacgacauccugagccggcuggacaaggucgaggccgaggugcagaucgaccggcugaucacuggccggcugcagagccugcagaccuacgugacccagcagcugauccgggccgccgagauucgggccagcgccaaccuggccgccaccaagaugagcgagugcgugcugggccagagcaagcggguggacuucugcggcaagggcuaccaccugaugagcuuuccccagagcgcaccccacggagugguguuccugcacgugaccuacgugcccgcccaggagaagaacuucaccaccgccccagccaucugccacgacggcaaggcccacuuuccccgggagggcguguucgugagcaacggcacccacugguucgugacccagcggaacuucuacgagccccagaucaucaccaccgacaacaccuucgugagcggcaacugcgacguggugaucggcaucgugaacaacaccguguacgauccccugcagcccgagcuggacagcuucaaggaggagcuggacaaguacuucaagaaucacaccagccccgacguggaccugggcgacaucagcggcaucaacgccagcguggugaacauccagaaggagaucgaucggcugaacgagguggccaagaaccugaacgagagccugaucgaccugcaggagcugggcaaguacgagcaguacaucaaguggcccugguacaucuggcugggcuucaucgccggccugaucgccaucgugaucgugaccaucaugcugugcugcaugaccagcugcugcagcugccugaagggcuguugcagcugcggcagcugcugcaaguucgacgaggacgacagcgagcccgugcugaagggcgugaagcugcacuacaccugauaauaggcuggagccucgguggccuagcuucuugccccuugggccuccccccagccccuccuccccuuccugcacccguacccccguggucuuugaauaaagucugagugggcggcaaaaaaaaaaaaaaaaaaaaaaaaaaaaaaaaaaaaaaaaaaaaaaaaaaaaaaaaaaaaaaaaaaaaaaaaaaaaaaaaaaaaaaaaaaaaaaaaaaaaucuag

SEQ ID NO: 26535 - RNA, 4094 nt, Artificial Sequence
  SARS-CoV-2/Wuhan/WIV05/2019__EPI_ISL_402128 spike protein mRNA gc (1-1273)(H69del_V70del_A222V_Y453F_S477N_D614G_I692V)
gggaaauaagagagaaaagaagaguaagaagaaauauaagaccccggcgccgccaccauguucguguuccuggugcugcugccccuggugagcagccagugcgugaaccugaccacccggacccagcugccaccagccuacaccaacagcuucacccggggcgucuacuaccccgacaagguguuccggagcagcguccugcacagcacccaggaccuguuccugcccuucuucagcaacgugaccugguuccacgccaucagcggcaccaacggcaccaagcgguucgacaaccccgugcugcccuucaacgacggcguguacuucgccagcaccgagaagagcaacaucauccggggcuggaucuucggcaccacccuggacagcaagacccagagccugcugaucgugaauaacgccaccaacguggugaucaaggugugcgaguuccaguucugcaacgaccccuuccugggcguguacuaccacaagaacaacaagagcuggauggagagcgaguuccggguguacagcagcgccaacaacugcaccuucgaguacgugagccagcccuuccugauggaccuggagggcaagcagggcaacuucaagaaccugcgggaguucguguucaagaacaucgacggcuacuucaagaucuacagcaagcacaccccaaucaaccuggugcgggaucugccccagggcuucucagugcuggagccccugguggaccugcccaucggcaucaacaucacccgguuccagacccugcuggcccugcaccggagcuaccugaccccaggcgacagcagcagcggguggacagcaggcgcggcugcuuacuacgugggcuaccugcagccccggaccuuccugcugaaguacaacgagaacggcaccaucaccgacgccguggacugcgcccuggacccucugagcgagaccaagugcacccugaagagcuucaccguggagaagggcaucuaccagaccagcaacuuccgggugcagcccaccgagagcaucgugcgguuccccaacaucaccaaccugugccccuucggcgagguguucaacgccacccgguucgccagcguguacgccuggaaccggaagcggaucagcaacugcguggccgacuacagcgugcuguacaacagcgccagcuucagcaccuucaagugcuacggcgugagccccaccaagcugaacgaccugugcuucaccaacguguacgccgacagcuucgugauccguggcgacgaggugcggcagaucgcacccggccagacaggcaagaucgccgacuacaacuacaagcugcccgacgacuucaccggcugcgugaucgccuggaacagcaacaaccucgacagcaaggugggcggcaacuacaacuaccuguuccggcuguuccggaagagcaaccugaagcccuucgagcgggacaucagcaccgagaucuaccaagccggcaacaccccuugcaacggcguggagggcuucaacugcuacuucccucugcagagcuacggcuuccagcccaccaacggcgugggcuaccagcccuaccgggugguggugcugagcuucgagcugcugcacgccccagccaccguguguggccccaagaagagcaccaaccuggugaagaacaagugcgugaacuucaacuucaacggccuuaccggcaccggcgugcugaccgagagcaacaagaaauuccugcccuuucagcaguucggccgggacaucgccgacaccaccgacgcugugcgggauccccagacccuggagauccuggacaucaccccuugcagcuucggcggcgugagcgugaucaccccaggcaccaacaccagcaaccagguggccgugcuguaccagggcgugaacugcaccgaggugcccguggccauccacgccgaccagcugacacccaccuggcgggucuacagcaccggcagcaacguguuccagacccgggccgguugccugaucggcgccgagcacgugaacaacagcuacgagugcgacauccccaucggcgccggcaucugugccagcuaccagacccagaccaauucaccccggagggcaaggagcguggccagccagagcgugaucgccuacaccaugagccugggcgccgagaacagcguggccuacagcaacaacagcaucgccauccccaccaacuucaccaucagcgugaccaccgagauucugcccgugagcaugaccaagaccagcguggacugcaccauguacaucugcggcgacagcaccgagugcagcaaccugcugcugcaguacggcagcuucugcacccagcugaaccgggcccugaccggcaucgccguggagcaggacaagaacacccaggagguguucgcccaggugaagcagaucuacaagaccccucccaucaaggacuucggcggcuucaacuucagccagauccugcccgaccccagcaagcccagcaagcggagcuucaucgaggaccugcuguucaacaaggugacccuagccgacgccggcuucaucaagcaguacggcgacugccucggcgacauagccgcccgggaccugaucugcgcccagaaguucaacggccugaccgugcugccuccccugcugaccgacgagaugaucgcccaguacaccagcgcccuguuagccggaaccaucaccagcggcuggacuuucggcgcuggagccgcucugcagauccccuucgccaugcagauggccuaccgguucaacggcaucggcgugacccagaacgugcuguacgagaaccagaagcugaucgccaaccaguucaacagcgccaucggcaagauccaggacagccugagcagcaccgcuagcgcccugggcaagcugcaggacguggugaaccagaacgcccaggcccugaacacccuggugaagcagcugagcagcaacuucggcgccaucagcagcgugcugaacgacauccugagccggcuggacaaggucgaggccgaggugcagaucgaccggcugaucacuggccggcugcagagccugcagaccuacgugacccagcagcugauccgggccgccgagauucgggccagcgccaaccuggccgccaccaagaugagcgagugcgugcugggccagagcaagcggguggacuucugcggcaagggcuaccaccugaugagcuuuccccagagcgcaccccacggagugguguuccugcacgugaccuacgugcccgcccaggagaagaacuucaccaccgccccagccaucugccacgacggcaaggcccacuuuccccgggagggcguguucgugagcaacggcacccacugguucgugacccagcggaacuucuacgagccccagaucaucaccaccgacaacaccuucgugagcggcaacugcgacguggugaucggcaucgugaacaacaccguguacgauccccugcagcccgagcuggacagcuucaaggaggagcuggacaaguacuucaagaaucacaccagccccgacguggaccugggcgacaucagcggcaucaacgccagcguggugaacauccagaaggagaucgaucggcugaacgagguggccaagaaccugaacgagagccugaucgaccugcaggagcugggcaaguacgagcaguacaucaaguggcccugguacaucuggcugggcuucaucgccggccugaucgccaucgugauggugaccaucaugcugugcugcaugaccagcugcugcagcugccugaagggcuguugcagcugcggcagcugcugcaaguucgacgaggacgacagcgagcccgugcugaagggcgugaagcugcacuacaccugauaauaggcuggagccucgguggccuagcuucuugccccuugggccuccccccagccccuccuccccuuccugcacccguacccccguggucuuugaauaaagucugagugggcggcaaaaaaaaaaaaaaaaaaaaaaaaaaaaaaaaaaaaaaaaaaaaaaaaaaaaaaaaaaaaaaaaaaaaaaaaaaaaaaaaaaaaaaaaaaaaaaaaaaaaucuag

SEQ ID NO: 26536 - RNA, 4094 nt, Artificial Sequence
  SARS-CoV-2/Wuhan/WIV05/2019__EPI_ISL_402128 spike protein mRNA gc (1-1273)(H69del_V70del_Y453F_D614G_I692V_M1229I)
gggaaauaagagagaaaagaagaguaagaagaaauauaagaccccggcgccgccaccauguucguguuccuggugcugcugccccuggugagcagccagugcgugaaccugaccacccggacccagcugccaccagccuacaccaacagcuucacccggggcgucuacuaccccgacaagguguuccggagcagcguccugcacagcacccaggaccuguuccugcccuucuucagcaacgugaccugguuccacgccaucagcggcaccaacggcaccaagcgguucgacaaccccgugcugcccuucaacgacggcguguacuucgccagcaccgagaagagcaacaucauccggggcuggaucuucggcaccacccuggacagcaagacccagagccugcugaucgugaauaacgccaccaacguggugaucaaggugugcgaguuccaguucugcaacgaccccuuccugggcguguacuaccacaagaacaacaagagcuggauggagagcgaguuccggguguacagcagcgccaacaacugcaccuucgaguacgugagccagcccuuccugauggaccuggagggcaagcagggcaacuucaagaaccugcgggaguucguguucaagaacaucgacggcuacuucaagaucuacagcaagcacaccccaaucaaccuggugcgggaucugccccagggcuucucagcccuggagccccugguggaccugcccaucggcaucaacaucacccgguuccagacccugcuggcccugcaccggagcuaccugaccccaggcgacagcagcagcggguggacagcaggcgcggcugcuuacuacgugggcuaccugcagccccggaccuuccugcugaaguacaacgagaacggcaccaucaccgacgccguggacugcgcccuggacccucugagcgagaccaagugcacccugaagagcuucaccguggagaagggcaucuaccagaccagcaacuuccgggugcagcccaccgagagcaucgugcgguuccccaacaucaccaaccugugccccuucggcgagguguucaacgccacccgguucgccagcguguacgccuggaaccggaagcggaucagcaacugcguggccgacuacagcgugcuguacaacagcgccagcuucagcaccuucaagugcuacggcgugagccccaccaagcugaacgaccugugcuucaccaacguguacgccgacagcuucgugauccguggcgacgaggugcggcagaucgcacccggccagacaggcaagaucgccgacuacaacuacaagcugcccgacgacuucaccggcugcgugaucgccuggaacagcaacaaccucgacagcaaggugggcggcaacuacaacuaccuguuccggcuguuccggaagagcaaccugaagcccuucgagcgggacaucagcaccgagaucuaccaagccggcuccaccccuugcaacggcguggagggcuucaacugcuacuucccucugcagagcuacggcuuccagcccaccaacggcgugggcuaccagcccuaccgggugguggugcugagcuucgagcugcugcacgccccagccaccguguguggccccaagaagagcaccaaccuggugaagaacaagugcgugaacuucaacuucaacggccuuaccggcaccggcgugcugaccgagagcaacaagaaauuccugcccuuucagcaguucggccgggacaucgccgacaccaccgacgcugugcgggauccccagacccuggagauccuggacaucaccccuugcagcuucggcggcgugagcgugaucaccccaggcaccaacaccagcaaccagguggccgugcuguaccagggcgugaacugcaccgaggugcccguggccauccacgccgaccagcugacacccaccuggcgggucuacagcaccggcagcaacguguuccagacccgggccgguugccugaucggcgccgagcacgugaacaacagcuacgagugcgacauccccaucggcgccggcaucugugccagcuaccagacccagaccaauucaccccggagggcaaggagcguggccagccagagcgugaucgccuacaccaugagccugggcgccgagaacagcguggccuacagcaacaacagcaucgccauccccaccaacuucaccaucagcgugaccaccgagauucugcccgugagcaugaccaagaccagcguggacugcaccauguacaucugcggcgacagcaccgagugcagcaaccugcugcugcaguacggcagcuucugcacccagcugaaccgggcccugaccggcaucgccguggagcaggacaagaacacccaggagguguucgcccaggugaagcagaucuacaagaccccucccaucaaggacuucggcggcuucaacuucagccagauccugcccgaccccagcaagcccagcaagcggagcuucaucgaggaccugcuguucaacaaggugacccuagccgacgccggcuucaucaagcaguacggcgacugccucggcgacauagccgcccgggaccugaucugcgcccagaaguucaacggccugaccgugcugccuccccugcugaccgacgagaugaucgcccaguacaccagcgcccuguuagccggaaccaucaccagcggcuggacuuucggcgcuggagccgcucugcagauccccuucgccaugcagauggccuaccgguucaacggcaucggcgugacccagaacgugcuguacgagaaccagaagcugaucgccaaccaguucaacagcgccaucggcaagauccaggacagccugagcagcaccgcuagcgcccugggcaagcugcaggacguggugaaccagaacgcccaggcccugaacacccuggugaagcagcugagcagcaacuucggcgccaucagcagcgugcugaacgacauccugagccggcuggacaaggucgaggccgaggugcagaucgaccggcugaucacuggccggcugcagagccugcagaccuacgugacccagcagcugauccgggccgccgagauucgggccagcgccaaccuggccgccaccaagaugagcgagugcgugcugggccagagcaagcggguggacuucugcggcaagggcuaccaccugaugagcuuuccccagagcgcaccccacggagugguguuccugcacgugaccuacgugcccgcccaggagaagaacuucaccaccgccccagccaucugccacgacggcaaggcccacuuuccccgggagggcguguucgugagcaacggcacccacugguucgugacccagcggaacuucuacgagccccagaucaucaccaccgacaacaccuucgugagcggcaacugcgacguggugaucggcaucgugaacaacaccguguacgauccccugcagcccgagcuggacagcuucaaggaggagcuggacaaguacuucaagaaucacaccagccccgacguggaccugggcgacaucagcggcaucaacgccagcguggugaacauccagaaggagaucgaucggcugaacgagguggccaagaaccugaacgagagccugaucgaccugcaggagcugggcaaguacgagcaguacaucaaguggcccugguacaucuggcugggcuucaucgccggccugaucgccaucgugaucgugaccaucaugcugugcugcaugaccagcugcugcagcugccugaagggcuguugcagcugcggcagcugcugcaaguucgacgaggacgacagcgagcccgugcugaagggcgugaagcugcacuacaccugauaauaggcuggagccucgguggccuagcuucuugccccuugggccuccccccagccccuccuccccuuccugcacccguacccccguggucuuugaauaaagucugagugggcggcaaaaaaaaaaaaaaaaaaaaaaaaaaaaaaaaaaaaaaaaaaaaaaaaaaaaaaaaaaaaaaaaaaaaaaaaaaaaaaaaaaaaaaaaaaaaaaaaaaaaucuag

SEQ ID NO: 26537 - RNA, 4091 nt, Artificial Sequence
  SARS-CoV-2/Wuhan/WIV05/2019__EPI_ISL_402128 spike protein mRNA gc (1-1273)(H69del_V70del_Y144del_N501Y_A570D_D614G_P681H_T716I_S982 A_D1118H)
gggaaauaagagagaaaagaagaguaagaagaaauauaagaccccggcgccgccaccauguucguguuccuggugcugcugccccuggugagcagccagugcgugaaccugaccacccggacccagcugccaccagccuacaccaacagcuucacccggggcgucuacuaccccgacaagguguuccggagcagcguccugcacagcacccaggaccuguuccugcccuucuucagcaacgugaccugguuccacgccaucagcggcaccaacggcaccaagcgguucgacaaccccgugcugcccuucaacgacggcguguacuucgccagcaccgagaagagcaacaucauccggggcuggaucuucggcaccacccuggacagcaagacccagagccugcugaucgugaauaacgccaccaacguggugaucaaggugugcgaguuccaguucugcaacgaccccuuccugggcguguaccacaagaacaacaagagcuggauggagagcgaguuccggguguacagcagcgccaacaacugcaccuucgaguacgugagccagcccuuccugauggaccuggagggcaagcagggcaacuucaagaaccugcgggaguucguguucaagaacaucgacggcuacuucaagaucuacagcaagcacaccccaaucaaccuggugcgggaucugccccagggcuucucagcccuggagccccugguggaccugcccaucggcaucaacaucacccgguuccagacccugcuggcccugcaccggagcuaccugaccccaggcgacagcagcagcggguggacagcaggcgcggcugcuuacuacgugggcuaccugcagccccggaccuuccugcugaaguacaacgagaacggcaccaucaccgacgccguggacugcgcccuggacccucugagcgagaccaagugcacccugaagagcuucaccguggagaagggcaucuaccagaccagcaacuuccgggugcagcccaccgagagcaucgugcgguuccccaacaucaccaaccugugccccuucggcgagguguucaacgccacccgguucgccagcguguacgccuggaaccggaagcggaucagcaacugcguggccgacuacagcgugcuguacaacagcgccagcuucagcaccuucaagugcuacggcgugagccccaccaagcugaacgaccugugcuucaccaacguguacgccgacagcuucgugauccguggcgacgaggugcggcagaucgcacccggccagacaggcaagaucgccgacuacaacuacaagcugcccgacgacuucaccggcugcgugaucgccuggaacagcaacaaccucgacagcaaggugggcggcaacuacaacuaccuguaccggcuguuccggaagagcaaccugaagcccuucgagcgggacaucagcaccgagaucuaccaagccggcuccaccccuugcaacggcguggagggcuucaacugcuacuucccucugcagagcuacggcuuccagcccaccuacggcgugggcuaccagcccuaccgggugguggugcugagcuucgagcugcugcacgccccagccaccguguguggccccaagaagagcaccaaccuggugaagaacaagugcgugaacuucaacuucaacggccuuaccggcaccggcgugcugaccgagagcaacaagaaauuccugcccuuucagcaguucggccgggacaucgacgacaccaccgacgcugugcgggauccccagacccuggagauccuggacaucaccccuugcagcuucggcggcgugagcgugaucaccccaggcaccaacaccagcaaccagguggccgugcuguaccagggcgugaacugcaccgaggugcccguggccauccacgccgaccagcugacacccaccuggcgggucuacagcaccggcagcaacguguuccagacccgggccgguugccugaucggcgccgagcacgugaacaacagcuacgagugcgacauccccaucggcgccggcaucugugccagcuaccagacccagaccaauucacaccggagggcaaggagcguggccagccagagcaucaucgccuacaccaugagccugggcgccgagaacagcguggccuacagcaacaacagcaucgccauccccaucaacuucaccaucagcgugaccaccgagauucugcccgugagcaugaccaagaccagcguggacugcaccauguacaucugcggcgacagcaccgagugcagcaaccugcugcugcaguacggcagcuucugcacccagcugaaccgggcccugaccggcaucgccguggagcaggacaagaacacccaggagguguucgcccaggugaagcagaucuacaagaccccucccaucaaggacuucggcggcuucaacuucagccagauccugcccgaccccagcaagcccagcaagcggagcuucaucgaggaccugcuguucaacaaggugacccuagccgacgccggcuucaucaagcaguacggcgacugccucggcgacauagccgcccgggaccugaucugcgcccagaaguucaacggccugaccgugcugccuccccugcugaccgacgagaugaucgcccaguacaccagcgcccuguuagccggaaccaucaccagcggcuggacuuucggcgcuggagccgcucugcagauccccuucgccaugcagauggccuaccgguucaacggcaucggcgugacccagaacgugcuguacgagaaccagaagcugaucgccaaccaguucaacagcgccaucggcaagauccaggacagccugagcagcaccgcuagcgcccugggcaagcugcaggacguggugaaccagaacgcccaggcccugaacacccuggugaagcagcugagcagcaacuucggcgccaucagcagcgugcugaacgacauccuggcccggcuggacaaggucgaggccgaggugcagaucgaccggcugaucacuggccggcugcagagccugcagaccuacgugacccagcagcugauccgggccgccgagauucgggccagcgccaaccuggccgccaccaagaugagcgagugcgugcugggccagagcaagcggguggacuucugcggcaagggcuaccaccugaugagcuuuccccagagcgcaccccacggagugguguuccugcacgugaccuacgugcccgcccaggagaagaacuucaccaccgccccagccaucugccacgacggcaaggcccacuuuccccgggagggcguguucgugagcaacggcacccacugguucgugacccagcggaacuucuacgagccccagaucaucaccacccacaacaccuucgugagcggcaacugcgacguggugaucggcaucgugaacaacaccguguacgauccccugcagcccgagcuggacagcuucaaggaggagcuggacaaguacuucaagaaucacaccagccccgacguggaccugggcgacaucagcggcaucaacgccagcguggugaacauccagaaggagaucgaucggcugaacgagguggccaagaaccugaacgagagccugaucgaccugcaggagcugggcaaguacgagcaguacaucaaguggcccugguacaucuggcugggcuucaucgccggccugaucgccaucgugauggugaccaucaugcugugcugcaugaccagcugcugcagcugccugaagggcuguugcagcugcggcagcugcugcaaguucgacgaggacgacagcgagcccgugcugaagggcgugaagcugcacuacaccugauaauaggcuggagccucgguggccuagcuucuugccccuugggccuccccccagccccuccuccccuuccugcacccguacccccguggucuuugaauaaagucugagugggcggcaaaaaaaaaaaaaaaaaaaaaaaaaaaaaaaaaaaaaaaaaaaaaaaaaaaaaaaaaaaaaaaaaaaaaaaaaaaaaaaaaaaaaaaaaaaaaaaaaaaaucuag

SEQ ID NO: 26538 - RNA, 4100 nt, Artificial Sequence
  SARS-CoV-2/Wuhan/WIV05/2019__EPI_ISL_402128 spike protein mRNA gc (1-1273)(K417N_E484K_N501Y_D614G)
gggaaauaagagagaaaagaagaguaagaagaaauauaagaccccggcgccgccaccauguucguguuccuggugcugcugccccuggugagcagccagugcgugaaccugaccacccggacccagcugccaccagccuacaccaacagcuucacccggggcgucuacuaccccgacaagguguuccggagcagcguccugcacagcacccaggaccuguuccugcccuucuucagcaacgugaccugguuccacgccauccacgugagcggcaccaacggcaccaagcgguucgacaaccccgugcugcccuucaacgacggcguguacuucgccagcaccgagaagagcaacaucauccggggcuggaucuucggcaccacccuggacagcaagacccagagccugcugaucgugaauaacgccaccaacguggugaucaaggugugcgaguuccaguucugcaacgaccccuuccugggcguguacuaccacaagaacaacaagagcuggauggagagcgaguuccggguguacagcagcgccaacaacugcaccuucgaguacgugagccagcccuuccugauggaccuggagggcaagcagggcaacuucaagaaccugcgggaguucguguucaagaacaucgacggcuacuucaagaucuacagcaagcacaccccaaucaaccuggugcgggaucugccccagggcuucucagcccuggagccccugguggaccugcccaucggcaucaacaucacccgguuccagacccugcuggcccugcaccggagcuaccugaccccaggcgacagcagcagcggguggacagcaggcgcggcugcuuacuacgugggcuaccugcagccccggaccuuccugcugaaguacaacgagaacggcaccaucaccgacgccguggacugcgcccuggacccucugagcgagaccaagugcacccugaagagcuucaccguggagaagggcaucuaccagaccagcaacuuccgggugcagcccaccgagagcaucgugcgguuccccaacaucaccaaccugugccccuucggcgagguguucaacgccacccgguucgccagcguguacgccuggaaccggaagcggaucagcaacugcguggccgacuacagcgugcuguacaacagcgccagcuucagcaccuucaagugcuacggcgugagccccaccaagcugaacgaccugugcuucaccaacguguacgccgacagcuucgugauccguggcgacgaggugcggcagaucgcacccggccagacaggcaacaucgccgacuacaacuacaagcugcccgacgacuucaccggcugcgugaucgccuggaacagcaacaaccucgacagcaaggugggcggcaacuacaacuaccuguaccggcuguuccggaagagcaaccugaagcccuucgagcgggacaucagcaccgagaucuaccaagccggcuccaccccuugcaacggcgugaagggcuucaacugcuacuucccucugcagagcuacggcuuccagcccaccuacggcgugggcuaccagcccuaccgggugguggugcugagcuucgagcugcugcacgccccagccaccguguguggccccaagaagagcaccaaccuggugaagaacaagugcgugaacuucaacuucaacggccuuaccggcaccggcgugcugaccgagagcaacaagaaauuccugcccuuucagcaguucggccgggacaucgccgacaccaccgacgcugugcgggauccccagacccuggagauccuggacaucaccccuugcagcuucggcggcgugagcgugaucaccccaggcaccaacaccagcaaccagguggccgugcuguaccagggcgugaacugcaccgaggugcccguggccauccacgccgaccagcugacacccaccuggcgggucuacagcaccggcagcaacguguuccagacccgggccgguugccugaucggcgccgagcacgugaacaacagcuacgagugcgacauccccaucggcgccggcaucugugccagcuaccagacccagaccaauucaccccggagggcaaggagcguggccagccagagcaucaucgccuacaccaugagccugggcgccgagaacagcguggccuacagcaacaacagcaucgccauccccaccaacuucaccaucagcgugaccaccgagauucugcccgugagcaugaccaagaccagcguggacugcaccauguacaucugcggcgacagcaccgagugcagcaaccugcugcugcaguacggcagcuucugcacccagcugaaccgggcccugaccggcaucgccguggagcaggacaagaacacccaggagguguucgcccaggugaagcagaucuacaagaccccucccaucaaggacuucggcggcuucaacuucagccagauccugcccgaccccagcaagcccagcaagcggagcuucaucgaggaccugcuguucaacaaggugacccuagccgacgccggcuucaucaagcaguacggcgacugccucggcgacauagccgcccgggaccugaucugcgcccagaaguucaacggccugaccgugcugccuccccugcugaccgacgagaugaucgcccaguacaccagcgcccuguuagccggaaccaucaccagcggcuggacuuucggcgcuggagccgcucugcagauccccuucgccaugcagauggccuaccgguucaacggcaucggcgugacccagaacgugcuguacgagaaccagaagcugaucgccaaccaguucaacagcgccaucggcaagauccaggacagccugagcagcaccgcuagcgcccugggcaagcugcaggacguggugaaccagaacgcccaggcccugaacacccuggugaagcagcugagcagcaacuucggcgccaucagcagcgugcugaacgacauccugagccggcuggacaaggucgaggccgaggugcagaucgaccggcugaucacuggccggcugcagagccugcagaccuacgugacccagcagcugauccgggccgccgagauucgggccagcgccaaccuggccgccaccaagaugagcgagugcgugcugggccagagcaagcggguggacuucugcggcaagggcuaccaccugaugagcuuuccccagagcgcaccccacggagugguguuccugcacgugaccuacgugcccgcccaggagaagaacuucaccaccgccccagccaucugccacgacggcaaggcccacuuuccccgggagggcguguucgugagcaacggcacccacugguucgugacccagcggaacuucuacgagccccagaucaucaccaccgacaacaccuucgugagcggcaacugcgacguggugaucggcaucgugaacaacaccguguacgauccccugcagcccgagcuggacagcuucaaggaggagcuggacaaguacuucaagaaucacaccagccccgacguggaccugggcgacaucagcggcaucaacgccagcguggugaacauccagaaggagaucgaucggcugaacgagguggccaagaaccugaacgagagccugaucgaccugcaggagcugggcaaguacgagcaguacaucaaguggcccugguacaucuggcugggcuucaucgccggccugaucgccaucgugauggugaccaucaugcugugcugcaugaccagcugcugcagcugccugaagggcuguugcagcugcggcagcugcugcaaguucgacgaggacgacagcgagcccgugcugaagggcgugaagcugcacuacaccugauaauaggcuggagccucgguggccuagcuucuugccccuugggccuccccccagccccuccuccccuuccugcacccguacccccguggucuuugaauaaagucugagugggcggcaaaaaaaaaaaaaaaaaaaaaaaaaaaaaaaaaaaaaaaaaaaaaaaaaaaaaaaaaaaaaaaaaaaaaaaaaaaaaaaaaaaaaaaaaaaaaaaaaaaaucuag

SEQ ID NO: 26539 - RNA, 4091 nt, Artificial Sequence
  SARS-CoV-2/Wuhan/WIV05/2019__EPI_ISL_402128 spike protein mRNA gc (1-1273)(L18F_D80A_D215G_L242del_A243del_L244del_R246I_K417N_E484 K_N501Y_D614G_A701V)
gggaaauaagagagaaaagaagaguaagaagaaauauaagaccccggcgccgccaccauguucguguuccuggugcugcugccccuggugagcagccagugcgugaacuucaccacccggacccagcugccaccagccuacaccaacagcuucacccggggcgucuacuaccccgacaagguguuccggagcagcguccugcacagcacccaggaccuguuccugcccuucuucagcaacgugaccugguuccacgccauccacgugagcggcaccaacggcaccaagcgguucgccaaccccgugcugcccuucaacgacggcguguacuucgccagcaccgagaagagcaacaucauccggggcuggaucuucggcaccacccuggacagcaagacccagagccugcugaucgugaauaacgccaccaacguggugaucaaggugugcgaguuccaguucugcaacgaccccuuccugggcguguacuaccacaagaacaacaagagcuggauggagagcgaguuccggguguacagcagcgccaacaacugcaccuucgaguacgugagccagcccuuccugauggaccuggagggcaagcagggcaacuucaagaaccugcgggaguucguguucaagaacaucgacggcuacuucaagaucuacagcaagcacaccccaaucaaccuggugcggggccugccccagggcuucucagcccuggagccccugguggaccugcccaucggcaucaacaucacccgguuccagacccugcacaucagcuaccugaccccaggcgacagcagcagcggguggacagcaggcgcggcugcuuacuacgugggcuaccugcagccccggaccuuccugcugaaguacaacgagaacggcaccaucaccgacgccguggacugcgcccuggacccucugagcgagaccaagugcacccugaagagcuucaccguggagaagggcaucuaccagaccagcaacuuccgggugcagcccaccgagagcaucgugcgguuccccaacaucaccaaccugugccccuucggcgagguguucaacgccacccgguucgccagcguguacgccuggaaccggaagcggaucagcaacugcguggccgacuacagcgugcuguacaacagcgccagcuucagcaccuucaagugcuacggcgugagccccaccaagcugaacgaccugugcuucaccaacguguacgccgacagcuucgugauccguggcgacgaggugcggcagaucgcacccggccagacaggcaacaucgccgacuacaacuacaagcugcccgacgacuucaccggcugcgugaucgccuggaacagcaacaaccucgacagcaaggugggcggcaacuacaacuaccuguaccggcuguuccggaagagcaaccugaagcccuucgagcgggacaucagcaccgagaucuaccaagccggcuccaccccuugcaacggcgugaagggcuucaacugcuacuucccucugcagagcuacggcuuccagcccaccuacggcgugggcuaccagcccuaccgggugguggugcugagcuucgagcugcugcacgccccagccaccguguguggccccaagaagagcaccaaccuggugaagaacaagugcgugaacuucaacuucaacggccuuaccggcaccggcgugcugaccgagagcaacaagaaauuccugcccuuucagcaguucggccgggacaucgccgacaccaccgacgcugugcgggauccccagacccuggagauccuggacaucaccccuugcagcuucggcggcgugagcgugaucaccccaggcaccaacaccagcaaccagguggccgugcuguaccagggcgugaacugcaccgaggugcccguggccauccacgccgaccagcugacacccaccuggcgggucuacagcaccggcagcaacguguuccagacccgggccgguugccugaucggcgccgagcacgugaacaacagcuacgagugcgacauccccaucggcgccggcaucugugccagcuaccagacccagaccaauucaccccggagggcaaggagcguggccagccagagcaucaucgccuacaccaugagccugggcguggagaacagcguggccuacagcaacaacagcaucgccauccccaccaacuucaccaucagcgugaccaccgagauucugcccgugagcaugaccaagaccagcguggacugcaccauguacaucugcggcgacagcaccgagugcagcaaccugcugcugcaguacggcagcuucugcacccagcugaaccgggcccugaccggcaucgccguggagcaggacaagaacacccaggagguguucgcccaggugaagcagaucuacaagaccccucccaucaaggacuucggcggcuucaacuucagccagauccugcccgaccccagcaagcccagcaagcggagcuucaucgaggaccugcuguucaacaaggugacccuagccgacgccggcuucaucaagcaguacggcgacugccucggcgacauagccgcccgggaccugaucugcgcccagaaguucaacggccugaccgugcugccuccccugcugaccgacgagaugaucgcccaguacaccagcgcccuguuagccggaaccaucaccagcggcuggacuuucggcgcuggagccgcucugcagauccccuucgccaugcagauggccuaccgguucaacggcaucggcgugacccagaacgugcuguacgagaaccagaagcugaucgccaaccaguucaacagcgccaucggcaagauccaggacagccugagcagcaccgcuagcgcccugggcaagcugcaggacguggugaaccagaacgcccaggcccugaacacccuggugaagcagcugagcagcaacuucggcgccaucagcagcgugcugaacgacauccugagccggcuggacaaggucgaggccgaggugcagaucgaccggcugaucacuggccggcugcagagccugcagaccuacgugacccagcagcugauccgggccgccgagauucgggccagcgccaaccuggccgccaccaagaugagcgagugcgugcugggccagagcaagcggguggacuucugcggcaagggcuaccaccugaugagcuuuccccagagcgcaccccacggagugguguuccugcacgugaccuacgugcccgcccaggagaagaacuucaccaccgccccagccaucugccacgacggcaaggcccacuuuccccgggagggcguguucgugagcaacggcacccacugguucgugacccagcggaacuucuacgagccccagaucaucaccaccgacaacaccuucgugagcggcaacugcgacguggugaucggcaucgugaacaacaccguguacgauccccugcagcccgagcuggacagcuucaaggaggagcuggacaaguacuucaagaaucacaccagccccgacguggaccugggcgacaucagcggcaucaacgccagcguggugaacauccagaaggagaucgaucggcugaacgagguggccaagaaccugaacgagagccugaucgaccugcaggagcugggcaaguacgagcaguacaucaaguggcccugguacaucuggcugggcuucaucgccggccugaucgccaucgugauggugaccaucaugcugugcugcaugaccagcugcugcagcugccugaagggcuguugcagcugcggcagcugcugcaaguucgacgaggacgacagcgagcccgugcugaagggcgugaagcugcacuacaccugauaauaggcuggagccucgguggccuagcuucuugccccuugggccuccccccagccccuccuccccuuccugcacccguacccccguggucuuugaauaaagucugagugggcggcaaaaaaaaaaaaaaaaaaaaaaaaaaaaaaaaaaaaaaaaaaaaaaaaaaaaaaaaaaaaaaaaaaaaaaaaaaaaaaaaaaaaaaaaaaaaaaaaaaaaucuag

SEQ ID NO: 26540 - RNA, 4100 nt, Artificial Sequence
  SARS-CoV-2/Wuhan/WIV05/2019__EPI_ISL_402128 spike protein mRNA gc (1-1273)(E484K_D614G)
gggaaauaagagagaaaagaagaguaagaagaaauauaagaccccggcgccgccaccauguucguguuccuggugcugcugccccuggugagcagccagugcgugaaccugaccacccggacccagcugccaccagccuacaccaacagcuucacccggggcgucuacuaccccgacaagguguuccggagcagcguccugcacagcacccaggaccuguuccugcccuucuucagcaacgugaccugguuccacgccauccacgugagcggcaccaacggcaccaagcgguucgacaaccccgugcugcccuucaacgacggcguguacuucgccagcaccgagaagagcaacaucauccggggcuggaucuucggcaccacccuggacagcaagacccagagccugcugaucgugaauaacgccaccaacguggugaucaaggugugcgaguuccaguucugcaacgaccccuuccugggcguguacuaccacaagaacaacaagagcuggauggagagcgaguuccggguguacagcagcgccaacaacugcaccuucgaguacgugagccagcccuuccugauggaccuggagggcaagcagggcaacuucaagaaccugcgggaguucguguucaagaacaucgacggcuacuucaagaucuacagcaagcacaccccaaucaaccuggugcgggaucugccccagggcuucucagcccuggagccccugguggaccugcccaucggcaucaacaucacccgguuccagacccugcuggcccugcaccggagcuaccugaccccaggcgacagcagcagcggguggacagcaggcgcggcugcuuacuacgugggcuaccugcagccccggaccuuccugcugaaguacaacgagaacggcaccaucaccgacgccguggacugcgcccuggacccucugagcgagaccaagugcacccugaagagcuucaccguggagaagggcaucuaccagaccagcaacuuccgggugcagcccaccgagagcaucgugcgguuccccaacaucaccaaccugugccccuucggcgagguguucaacgccacccgguucgccagcguguacgccuggaaccggaagcggaucagcaacugcguggccgacuacagcgugcuguacaacagcgccagcuucagcaccuucaagugcuacggcgugagccccaccaagcugaacgaccugugcuucaccaacguguacgccgacagcuucgugauccguggcgacgaggugcggcagaucgcacccggccagacaggcaagaucgccgacuacaacuacaagcugcccgacgacuucaccggcugcgugaucgccuggaacagcaacaaccucgacagcaaggugggcggcaacuacaacuaccuguaccggcuguuccggaagagcaaccugaagcccuucgagcgggacaucagcaccgagaucuaccaagccggcuccaccccuugcaacggcgugaagggcuucaacugcuacuucccucugcagagcuacggcuuccagcccaccaacggcgugggcuaccagcccuaccgggugguggugcugagcuucgagcugcugcacgccccagccaccguguguggccccaagaagagcaccaaccuggugaagaacaagugcgugaacuucaacuucaacggccuuaccggcaccggcgugcugaccgagagcaacaagaaauuccugcccuuucagcaguucggccgggacaucgccgacaccaccgacgcugugcgggauccccagacccuggagauccuggacaucaccccuugcagcuucggcggcgugagcgugaucaccccaggcaccaacaccagcaaccagguggccgugcuguaccagggcgugaacugcaccgaggugcccguggccauccacgccgaccagcugacacccaccuggcgggucuacagcaccggcagcaacguguuccagacccgggccgguugccugaucggcgccgagcacgugaacaacagcuacgagugcgacauccccaucggcgccggcaucugugccagcuaccagacccagaccaauucaccccggagggcaaggagcguggccagccagagcaucaucgccuacaccaugagccugggcgccgagaacagcguggccuacagcaacaacagcaucgccauccccaccaacuucaccaucagcgugaccaccgagauucugcccgugagcaugaccaagaccagcguggacugcaccauguacaucugcggcgacagcaccgagugcagcaaccugcugcugcaguacggcagcuucugcacccagcugaaccgggcccugaccggcaucgccguggagcaggacaagaacacccaggagguguucgcccaggugaagcagaucuacaagaccccucccaucaaggacuucggcggcuucaacuucagccagauccugcccgaccccagcaagcccagcaagcggagcuucaucgaggaccugcuguucaacaaggugacccuagccgacgccggcuucaucaagcaguacggcgacugccucggcgacauagccgcccgggaccugaucugcgcccagaaguucaacggccugaccgugcugccuccccugcugaccgacgagaugaucgcccaguacaccagcgcccuguuagccggaaccaucaccagcggcuggacuuucggcgcuggagccgcucugcagauccccuucgccaugcagauggccuaccgguucaacggcaucggcgugacccagaacgugcuguacgagaaccagaagcugaucgccaaccaguucaacagcgccaucggcaagauccaggacagccugagcagcaccgcuagcgcccugggcaagcugcaggacguggugaaccagaacgcccaggcccugaacacccuggugaagcagcugagcagcaacuucggcgccaucagcagcgugcugaacgacauccugagccggcuggacaaggucgaggccgaggugcagaucgaccggcugaucacuggccggcugcagagccugcagaccuacgugacccagcagcugauccgggccgccgagauucgggccagcgccaaccuggccgccaccaagaugagcgagugcgugcugggccagagcaagcggguggacuucugcggcaagggcuaccaccugaugagcuuuccccagagcgcaccccacggagugguguuccugcacgugaccuacgugcccgcccaggagaagaacuucaccaccgccccagccaucugccacgacggcaaggcccacuuuccccgggagggcguguucgugagcaacggcacccacugguucgugacccagcggaacuucuacgagccccagaucaucaccaccgacaacaccuucgugagcggcaacugcgacguggugaucggcaucgugaacaacaccguguacgauccccugcagcccgagcuggacagcuucaaggaggagcuggacaaguacuucaagaaucacaccagccccgacguggaccugggcgacaucagcggcaucaacgccagcguggugaacauccagaaggagaucgaucggcugaacgagguggccaagaaccugaacgagagccugaucgaccugcaggagcugggcaaguacgagcaguacaucaaguggcccugguacaucuggcugggcuucaucgccggccugaucgccaucgugauggugaccaucaugcugugcugcaugaccagcugcugcagcugccugaagggcuguugcagcugcggcagcugcugcaaguucgacgaggacgacagcgagcccgugcugaagggcgugaagcugcacuacaccugauaauaggcuggagccucgguggccuagcuucuugccccuugggccuccccccagccccuccuccccuuccugcacccguacccccguggucuuugaauaaagucugagugggcggcaaaaaaaaaaaaaaaaaaaaaaaaaaaaaaaaaaaaaaaaaaaaaaaaaaaaaaaaaaaaaaaaaaaaaaaaaaaaaaaaaaaaaaaaaaaaaaaaaaaaucuag

SEQ ID NO: 26541 - RNA, 4100 nt, Artificial Sequence
  SARS-CoV-2/Wuhan/WIV05/2019__EPI_ISL_402128 spike protein mRNA gc (1-1273)(L18F_T20N_P26S_D138Y_R190S_K417T_E484K_N501Y_D614G_H655Y _T1027I)
gggaaauaagagagaaaagaagaguaagaagaaauauaagaccccggcgccgccaccauguucguguuccuggugcugcugccccuggugagcagccagugcgugaacuucaccaaccggacccagcugccaagcgccuacaccaacagcuucacccggggcgucuacuaccccgacaagguguuccggagcagcguccugcacagcacccaggaccuguuccugcccuucuucagcaacgugaccugguuccacgccauccacgugagcggcaccaacggcaccaagcgguucgacaaccccgugcugcccuucaacgacggcguguacuucgccagcaccgagaagagcaacaucauccggggcuggaucuucggcaccacccuggacagcaagacccagagccugcugaucgugaauaacgccaccaacguggugaucaaggugugcgaguuccaguucugcaacuaccccuuccugggcguguacuaccacaagaacaacaagagcuggauggagagcgaguuccggguguacagcagcgccaacaacugcaccuucgaguacgugagccagcccuuccugauggaccuggagggcaagcagggcaacuucaagaaccugagcgaguucguguucaagaacaucgacggcuacuucaagaucuacagcaagcacaccccaaucaaccuggugcgggaucugccccagggcuucucagcccuggagccccugguggaccugcccaucggcaucaacaucacccgguuccagacccugcuggcccugcaccggagcuaccugaccccaggcgacagcagcagcggguggacagcaggcgcggcugcuuacuacgugggcuaccugcagccccggaccuuccugcugaaguacaacgagaacggcaccaucaccgacgccguggacugcgcccuggacccucugagcgagaccaagugcacccugaagagcuucaccguggagaagggcaucuaccagaccagcaacuuccgggugcagcccaccgagagcaucgugcgguuccccaacaucaccaaccugugccccuucggcgagguguucaacgccacccgguucgccagcguguacgccuggaaccggaagcggaucagcaacugcguggccgacuacagcgugcuguacaacagcgccagcuucagcaccuucaagugcuacggcgugagccccaccaagcugaacgaccugugcuucaccaacguguacgccgacagcuucgugauccguggcgacgaggugcggcagaucgcacccggccagacaggcaccaucgccgacuacaacuacaagcugcccgacgacuucaccggcugcgugaucgccuggaacagcaacaaccucgacagcaaggugggcggcaacuacaacuaccuguaccggcuguuccggaagagcaaccugaagcccuucgagcgggacaucagcaccgagaucuaccaagccggcuccaccccuugcaacggcgugaagggcuucaacugcuacuucccucugcagagcuacggcuuccagcccaccuacggcgugggcuaccagcccuaccgggugguggugcugagcuucgagcugcugcacgccccagccaccguguguggccccaagaagagcaccaaccuggugaagaacaagugcgugaacuucaacuucaacggccuuaccggcaccggcgugcugaccgagagcaacaagaaauuccugcccuuucagcaguucggccgggacaucgccgacaccaccgacgcugugcgggauccccagacccuggagauccuggacaucaccccuugcagcuucggcggcgugagcgugaucaccccaggcaccaacaccagcaaccagguggccgugcuguaccagggcgugaacugcaccgaggugcccguggccauccacgccgaccagcugacacccaccuggcgggucuacagcaccggcagcaacguguuccagacccgggccgguugccugaucggcgccgaguacgugaacaacagcuacgagugcgacauccccaucggcgccggcaucugugccagcuaccagacccagaccaauucaccccggagggcaaggagcguggccagccagagcaucaucgccuacaccaugagccugggcgccgagaacagcguggccuacagcaacaacagcaucgccauccccaccaacuucaccaucagcgugaccaccgagauucugcccgugagcaugaccaagaccagcguggacugcaccauguacaucugcggcgacagcaccgagugcagcaaccugcugcugcaguacggcagcuucugcacccagcugaaccgggcccugaccggcaucgccguggagcaggacaagaacacccaggagguguucgcccaggugaagcagaucuacaagaccccucccaucaaggacuucggcggcuucaacuucagccagauccugcccgaccccagcaagcccagcaagcggagcuucaucgaggaccugcuguucaacaaggugacccuagccgacgccggcuucaucaagcaguacggcgacugccucggcgacauagccgcccgggaccugaucugcgcccagaaguucaacggccugaccgugcugccuccccugcugaccgacgagaugaucgcccaguacaccagcgcccuguuagccggaaccaucaccagcggcuggacuuucggcgcuggagccgcucugcagauccccuucgccaugcagauggccuaccgguucaacggcaucggcgugacccagaacgugcuguacgagaaccagaagcugaucgccaaccaguucaacagcgccaucggcaagauccaggacagccugagcagcaccgcuagcgcccugggcaagcugcaggacguggugaaccagaacgcccaggcccugaacacccuggugaagcagcugagcagcaacuucggcgccaucagcagcgugcugaacgacauccugagccggcuggacaaggucgaggccgaggugcagaucgaccggcugaucacuggccggcugcagagccugcagaccuacgugacccagcagcugauccgggccgccgagauucgggccagcgccaaccuggccgccaucaagaugagcgagugcgugcugggccagagcaagcggguggacuucugcggcaagggcuaccaccugaugagcuuuccccagagcgcaccccacggagugguguuccugcacgugaccuacgugcccgcccaggagaagaacuucaccaccgccccagccaucugccacgacggcaaggcccacuuuccccgggagggcguguucgugagcaacggcacccacugguucgugacccagcggaacuucuacgagccccagaucaucaccaccgacaacaccuucgugagcggcaacugcgacguggugaucggcaucgugaacaacaccguguacgauccccugcagcccgagcuggacagcuucaaggaggagcuggacaaguacuucaagaaucacaccagccccgacguggaccugggcgacaucagcggcaucaacgccagcguggugaacauccagaaggagaucgaucggcugaacgagguggccaagaaccugaacgagagccugaucgaccugcaggagcugggcaaguacgagcaguacaucaaguggcccugguacaucuggcugggcuucaucgccggccugaucgccaucgugauggugaccaucaugcugugcugcaugaccagcugcugcagcugccugaagggcuguugcagcugcggcagcugcugcaaguucgacgaggacgacagcgagcccgugcugaagggcgugaagcugcacuacaccugauaauaggcuggagccucgguggccuagcuucuugccccuugggccuccccccagccccuccuccccuuccugcacccguacccccguggucuuugaauaaagucugagugggcggcaaaaaaaaaaaaaaaaaaaaaaaaaaaaaaaaaaaaaaaaaaaaaaaaaaaaaaaaaaaaaaaaaaaaaaaaaaaaaaaaaaaaaaaaaaaaaaaaaaaaucuag

SEQ ID NO: 26542 - RNA, 4100 nt, Artificial Sequence
  SARS-CoV-2/Wuhan/WIV05/2019__EPI_ISL_402128 spike protein mRNA gc (1-1273)(S13I_W152C_L452R_D614G)
gggaaauaagagagaaaagaagaguaagaagaaauauaagaccccggcgccgccaccauguucguguuccuggugcugcugccccuggugagcauccagugcgugaaccugaccacccggacccagcugccaccagccuacaccaacagcuucacccggggcgucuacuaccccgacaagguguuccggagcagcguccugcacagcacccaggaccuguuccugcccuucuucagcaacgugaccugguuccacgccauccacgugagcggcaccaacggcaccaagcgguucgacaaccccgugcugcccuucaacgacggcguguacuucgccagcaccgagaagagcaacaucauccggggcuggaucuucggcaccacccuggacagcaagacccagagccugcugaucgugaauaacgccaccaacguggugaucaaggugugcgaguuccaguucugcaacgaccccuuccugggcguguacuaccacaagaacaacaagagcugcauggagagcgaguuccggguguacagcagcgccaacaacugcaccuucgaguacgugagccagcccuuccugauggaccuggagggcaagcagggcaacuucaagaaccugcgggaguucguguucaagaacaucgacggcuacuucaagaucuacagcaagcacaccccaaucaaccuggugcgggaucugccccagggcuucucagcccuggagccccugguggaccugcccaucggcaucaacaucacccgguuccagacccugcuggcccugcaccggagcuaccugaccccaggcgacagcagcagcggguggacagcaggcgcggcugcuuacuacgugggcuaccugcagccccggaccuuccugcugaaguacaacgagaacggcaccaucaccgacgccguggacugcgcccuggacccucugagcgagaccaagugcacccugaagagcuucaccguggagaagggcaucuaccagaccagcaacuuccgggugcagcccaccgagagcaucgugcgguuccccaacaucaccaaccugugccccuucggcgagguguucaacgccacccgguucgccagcguguacgccuggaaccggaagcggaucagcaacugcguggccgacuacagcgugcuguacaacagcgccagcuucagcaccuucaagugcuacggcgugagccccaccaagcugaacgaccugugcuucaccaacguguacgccgacagcuucgugauccguggcgacgaggugcggcagaucgcacccggccagacaggcaagaucgccgacuacaacuacaagcugcccgacgacuucaccggcugcgugaucgccuggaacagcaacaaccucgacagcaaggugggcggcaacuacaacuaccgcuaccggcuguuccggaagagcaaccugaagcccuucgagcgggacaucagcaccgagaucuaccaagccggcuccaccccuugcaacggcguggagggcuucaacugcuacuucccucugcagagcuacggcuuccagcccaccaacggcgugggcuaccagcccuaccgggugguggugcugagcuucgagcugcugcacgccccagccaccguguguggccccaagaagagcaccaaccuggugaagaacaagugcgugaacuucaacuucaacggccuuaccggcaccggcgugcugaccgagagcaacaagaaauuccugcccuuucagcaguucggccgggacaucgccgacaccaccgacgcugugcgggauccccagacccuggagauccuggacaucaccccuugcagcuucggcggcgugagcgugaucaccccaggcaccaacaccagcaaccagguggccgugcuguaccagggcgugaacugcaccgaggugcccguggccauccacgccgaccagcugacacccaccuggcgggucuacagcaccggcagcaacguguuccagacccgggccgguugccugaucggcgccgagcacgugaacaacagcuacgagugcgacauccccaucggcgccggcaucugugccagcuaccagacccagaccaauucaccccggagggcaaggagcguggccagccagagcaucaucgccuacaccaugagccugggcgccgagaacagcguggccuacagcaacaacagcaucgccauccccaccaacuucaccaucagcgugaccaccgagauucugcccgugagcaugaccaagaccagcguggacugcaccauguacaucugcggcgacagcaccgagugcagcaaccugcugcugcaguacggcagcuucugcacccagcugaaccgggcccugaccggcaucgccguggagcaggacaagaacacccaggagguguucgcccaggugaagcagaucuacaagaccccucccaucaaggacuucggcggcuucaacuucagccagauccugcccgaccccagcaagcccagcaagcggagcuucaucgaggaccugcuguucaacaaggugacccuagccgacgccggcuucaucaagcaguacggcgacugccucggcgacauagccgcccgggaccugaucugcgcccagaaguucaacggccugaccgugcugccuccccugcugaccgacgagaugaucgcccaguacaccagcgcccuguuagccggaaccaucaccagcggcuggacuuucggcgcuggagccgcucugcagauccccuucgccaugcagauggccuaccgguucaacggcaucggcgugacccagaacgugcuguacgagaaccagaagcugaucgccaaccaguucaacagcgccaucggcaagauccaggacagccugagcagcaccgcuagcgcccugggcaagcugcaggacguggugaaccagaacgcccaggcccugaacacccuggugaagcagcugagcagcaacuucggcgccaucagcagcgugcugaacgacauccugagccggcuggacaaggucgaggccgaggugcagaucgaccggcugaucacuggccggcugcagagccugcagaccuacgugacccagcagcugauccgggccgccgagauucgggccagcgccaaccuggccgccaccaagaugagcgagugcgugcugggccagagcaagcggguggacuucugcggcaagggcuaccaccugaugagcuuuccccagagcgcaccccacggagugguguuccugcacgugaccuacgugcccgcccaggagaagaacuucaccaccgccccagccaucugccacgacggcaaggcccacuuuccccgggagggcguguucgugagcaacggcacccacugguucgugacccagcggaacuucuacgagccccagaucaucaccaccgacaacaccuucgugagcggcaacugcgacguggugaucggcaucgugaacaacaccguguacgauccccugcagcccgagcuggacagcuucaaggaggagcuggacaaguacuucaagaaucacaccagccccgacguggaccugggcgacaucagcggcaucaacgccagcguggugaacauccagaaggagaucgaucggcugaacgagguggccaagaaccugaacgagagccugaucgaccugcaggagcugggcaaguacgagcaguacaucaaguggcccugguacaucuggcugggcuucaucgccggccugaucgccaucgugauggugaccaucaugcugugcugcaugaccagcugcugcagcugccugaagggcuguugcagcugcggcagcugcugcaaguucgacgaggacgacagcgagcccgugcugaagggcgugaagcugcacuacaccugauaauaggcuggagccucgguggccuagcuucuugccccuugggccuccccccagccccuccuccccuuccugcacccguacccccguggucuuugaauaaagucugagugggcggcaaaaaaaaaaaaaaaaaaaaaaaaaaaaaaaaaaaaaaaaaaaaaaaaaaaaaaaaaaaaaaaaaaaaaaaaaaaaaaaaaaaaaaaaaaaaaaaaaaaaucuag

SEQ ID NO: 26543 - RNA, 4100 nt, Artificial Sequence
  SARS-CoV-2/Wuhan/WIV05/2019__EPI_ISL_402128 spike protein mRNA gc (1-1273)
gggaaauaagagagaaaagaagaguaagaagaaauauaagaccccggcgccgccaccauguucguguuccuggugcugcugccccuggugagcagccagugcgugaaccugaccacccggacccagcugcccccugccuacaccaacagcuucacccggggcguguacuaccccgacaagguguuccggagcagcgugcugcacagcacccaggaccuguuccugcccuucuucagcaacgugaccugguuccacgccauccacgugagcggcaccaacggcaccaagcgguucgacaacccagugcugcccuucaacgacggcguguacuucgccagcaccgagaagucaaacaucauccggggcuggaucuucggcaccacccuggacagcaagacacagagccugcugaucgugaacaacgccaccaacguggugaucaaggugugcgaguuucaguucugcaacgaccccuuccugggcguguacuaccacaagaacaacaagagcuggauggagagcgaguuccgggucuacagcagcgcuaacaauugcaccuucgaguacgugagccagcccuuccugauggaccucgagggcaagcagggcaacuucaagaaccugcgggaguucguguucaagaacaucgauggcuacuucaagaucuacagcaagcacacccccaucaaccuggugcgggaccugccccagggauucagcgcccuggagccucugguggaccugcccaucggcaucaacaucaccagguuccagacccugcuggcccugcaccggagcuaccugacccccggcgacagcagcagcggcuggaccgccggcgccgccgcauacuacgugggcuaccugcagccacggaccuuccugcugaaguacaacgagaacggcaccaucaccgacgccguggacugcgcccuggacccccugagcgagaccaagugcacccuaaagagcuucaccguggagaagggcaucuaccagaccagcaacuuccgggugcagcccacugagagcaucgugcgguuccccaacauuaccaaccugugucccuucggcgagguguucaacgccacccgguucgccagcguguacgccuggaaccggaagcggaucagcaacugcguggccgacuacagcgugcuguacaacagcgccagcuucagcaccuucaagugcuacggcgugagcccuaccaagcugaacgaccugugcuucaccaacguguacgcugacagcuucgugauccggggcgacgaggugcggcagaucgcccccggccagaccggcaagaucgccgacuacaacuacaagcugcccgacgacuucaccggcugcgugaucgccuggaacagcaacaaccuggacagcaaggugggcggcaacuacaacuaccuguaccggcuguuccguaagagcaaccugaagccauucgagcgggacaucagcaccgagaucuaccaggccggcagcacccccugcaacgguguggagggcuuuaacugcuacuucccccugcagagcuacggcuuccagcccaccaacggcgugggcuaccagcccuaccgggugguggugcugagcuucgagcugcugcacgcccccgccaccgugugcggcccuaaaaagagcaccaaccuggugaagaacaagugcgugaacuucaauuucaacggccugaccggcaccggcgugcugaccgagagcaacaagaaguuccugcccuuccagcaguucggccgggauaucgccgacaccaccgacgcagugcgggacccccagacccuggagauccuggacaucaccccaugcagcuucggcggcgugagcgucaucacccccggcacaaacaccagcaaccagguggccgugcuguaccaggacgugaacugcaccgaggugcccguggccauccacgccgaccagcugacccccaccuggcggguguacagcaccggaagcaacguguuccagacccgggccggcugccugaucggcgccgagcacgugaacaacuccuacgagugcgacauccccaucggcgcuggcaucugcgccagcuaccagacccagaccaacagcccccggcgggcccggagcguggccagccagagcaucaucgccuacaccaugagcuuaggcgccgagaacagcguggccuacagcaacaacagcaucgcgaucccuaccaacuucaccaucagcgugaccaccgagauacugcccgugagcaugaccaagaccagcguggacuguaccauguacaucugcggcgacagcaccgagugcagcaaccugcugcugcaguacggcagcuucugcacccagcugaaccgggcccugaccggcaucgccguggagcaggacaagaacacccaagagguguucgcccaggugaagcagaucuacaagacucccccaaucaaggacuucggcggcuucaacuucagccagauccugcccgaccccagcaagcccagcaagcggagcuucaucgaggaccugcuguucaacaaggugacccuggccgacgccggcuucaucaagcaguacggcgauugccugggcgacaucgccgcucgggaccugaucugcgcccagaaguucaacgggcugaccgugcugcccccucugcugaccgacgagaugaucgcccaguacaccagcgcccugcuugccggcaccaucaccagcggcuggaccuucggcgccggcgcagcccugcagauccccuucgccaugcagauggccuaccgguucaacggcaucggcgugacccagaacgugcuguacgagaaccagaagcugaucgccaaccaguucaacagcgccaucggcaagauccaggacagccugagcagcaccgccagcgcccugggcaagcugcaggacguggugaaccagaacgcucaggcccugaacacccuggugaagcagcugagcagcaacuucggcgccaucagcucagugcugaaugacauccugagcaggcuggacaagguggaggccgaggugcagaucgaccggcugaucaccggccggcugcagagccugcagaccuacgugacccagcagcugauccgggccgccgagauccgggccagcgccaaccuggcagccaccaagaugagcgagugcgugcugggccagagcaagcggguggacuuuugcggcaagggcuaccaccugaugagcuucccccagagcgccccacacggcgugguguuccuccacgucacauacgugcccgcccaggagaagaacuucaccaccgcccccgccauuugccacgacggcaaggcucacuucccccgggagggcguguucgugagcaacggaacccacugguucgugacccagcggaacuucuacgagccccagaucaucaccaccgacaacaccuucgugagcggcaacugcgacguggugaucggcaucgugaacaacaccguguacgacccccugcagccugagcuggacagcuucaaggaggagcuggacaaguacuucaagaaccacaccagccccgauguggaccugggcgacaucagcggcaucaacgccagcguggugaacauccagaaggagaucgaccggcugaacgagguggccaagaaccugaacgagagccugaucgaccugcaggagcugggcaaguacgagcaguacaucaaguggcccugguacaucuggcugggcuucaucgccggccugaucgccaucgugauggugaccaucaugcugugcugcaugaccagcugcuguagcugccugaagggcugcugcagcugcggcagcugcugcaaguucgacgaggacgacagcgagccagugcugaagggcgugaagcugcacuacaccugauaauaggcuggagccucgguggccuagcuucuugccccuugggccuccccccagccccuccuccccuuccugcacccguacccccguggucuuugaauaaagucugagugggcggcaaaaaaaaaaaaaaaaaaaaaaaaaaaaaaaaaaaaaaaaaaaaaaaaaaaaaaaaaaaaaaaaaaaaaaaaaaaaaaaaaaaaaaaaaaaaaaaaaaaaucuag

SEQ ID NO: 26544 - RNA, 4100 nt, Artificial Sequence
  SARS-CoV-2/Wuhan/WIV05/2019__EPI_ISL_402128 spike protein mRNA gc (1-1273)(D614G)
gggaaauaagagagaaaagaagaguaagaagaaauauaagaccccggcgccgccaccauguucguguuccuggugcugcugccccuggugagcagccagugcgugaaccugaccacccggacccagcugcccccugccuacaccaacagcuucacccggggcguguacuaccccgacaagguguuccggagcagcgugcugcacagcacccaggaccuguuccugcccuucuucagcaacgugaccugguuccacgccauccacgugagcggcaccaacggcaccaagcgguucgacaacccagugcugcccuucaacgacggcguguacuucgccagcaccgagaagucaaacaucauccggggcuggaucuucggcaccacccuggacagcaagacacagagccugcugaucgugaacaacgccaccaacguggugaucaaggugugcgaguuucaguucugcaacgaccccuuccugggcguguacuaccacaagaacaacaagagcuggauggagagcgaguuccgggucuacagcagcgcuaacaauugcaccuucgaguacgugagccagcccuuccugauggaccucgagggcaagcagggcaacuucaagaaccugcgggaguucguguucaagaacaucgauggcuacuucaagaucuacagcaagcacacccccaucaaccuggugcgggaccugccccagggauucagcgcccuggagccucugguggaccugcccaucggcaucaacaucaccagguuccagacccugcuggcccugcaccggagcuaccugacccccggcgacagcagcagcggcuggaccgccggcgccgccgcauacuacgugggcuaccugcagccacggaccuuccugcugaaguacaacgagaacggcaccaucaccgacgccguggacugcgcccuggacccccugagcgagaccaagugcacccuaaagagcuucaccguggagaagggcaucuaccagaccagcaacuuccgggugcagcccacugagagcaucgugcgguuccccaacauuaccaaccugugucccuucggcgagguguucaacgccacccgguucgccagcguguacgccuggaaccggaagcggaucagcaacugcguggccgacuacagcgugcuguacaacagcgccagcuucagcaccuucaagugcuacggcgugagcccuaccaagcugaacgaccugugcuucaccaacguguacgcugacagcuucgugauccggggcgacgaggugcggcagaucgcccccggccagaccggcaagaucgccgacuacaacuacaagcugcccgacgacuucaccggcugcgugaucgccuggaacagcaacaaccuggacagcaaggugggcggcaacuacaacuaccuguaccggcuguuccguaagagcaaccugaagccauucgagcgggacaucagcaccgagaucuaccaggccggcagcacccccugcaacgguguggagggcuuuaacugcuacuucccccugcagagcuacggcuuccagcccaccaacggcgugggcuaccagcccuaccgggugguggugcugagcuucgagcugcugcacgcccccgccaccgugugcggcccuaaaaagagcaccaaccuggugaagaacaagugcgugaacuucaauuucaacggccugaccggcaccggcgugcugaccgagagcaacaagaaguuccugcccuuccagcaguucggccgggauaucgccgacaccaccgacgcagugcgggacccccagacccuggagauccuggacaucaccccaugcagcuucggcggcgugagcgucaucacccccggcacaaacaccagcaaccagguggccgugcuguaccagggagugaacugcaccgaggugcccguggccauccacgccgaccagcugacccccaccuggcggguguacagcaccggcagcaacguguuccagacccgggccggcugccugaucggcgccgagcacgugaacaacuccuacgagugcgacauccccaucggcgcuggcaucugcgccagcuaccagacccagaccaacagcccccggcgggcccggagcguggccagccagagcaucaucgccuacaccaugagcuuaggcgccgagaacagcguggccuacagcaacaacagcaucgcgaucccuaccaacuucaccaucagcgugaccaccgagauacugcccgugagcaugaccaagaccagcguggacuguaccauguacaucugcggcgacagcaccgagugcagcaaccugcugcugcaguacggcagcuucugcacccagcugaaccgggcccugaccggcaucgccguggagcaggacaagaacacccaagagguguucgcccaggugaagcagaucuacaagacucccccaaucaaggacuucggcggcuucaacuucagccagauccugcccgaccccagcaagcccagcaagcggagcuucaucgaggaccugcuguucaacaaggugacccuggccgacgccggcuucaucaagcaguacggcgacugccugggggauaucgccgcucgggaccugaucugcgcccagaaguucaacggccugaccgugcugcccccucugcugaccgacgagaugaucgcccaguacaccagcgcccugcuugccggcaccaucaccagcggcuggaccuucggcgccggcgcagcccugcagauccccuucgccaugcagauggccuaccgguucaacggcaucggcgugacccagaacgugcuguacgagaaccagaagcugaucgccaaccaguucaacagcgccaucggcaagauccaggacagccugagcagcaccgccagcgcccugggcaagcugcaggacguggugaaccagaacgcucaggcccugaacacccuggugaagcagcugagcagcaacuucggcgccaucagcucagugcugaaugacauccugagcaggcuggacaagguggaggccgaggugcagaucgaccggcugaucaccggccggcugcagagccugcagaccuacgugacccagcagcugauccgggccgccgagauccgggccagcgccaaccuggcagccaccaagaugagcgagugcgugcugggccagagcaagcggguggacuuuugcggcaagggcuaccaccugaugagcuucccccagagcgccccacacggcgugguguuccuccacgucacauacgugcccgcccaggagaagaacuucaccaccgcccccgccauuugccacgacggcaaggcucacuucccccgggagggaguguucgugagcaacggcacccacugguucgugacccagcggaacuucuacgagccccagaucaucaccaccgacaacaccuucgugagcggcaacugcgacguggugaucggcaucgugaacaacaccguguacgacccccugcagccugagcuggacagcuucaaggaggagcuggacaaguacuucaagaaccacaccagccccgacguggaucugggcgacaucagcggcaucaacgccagcguggugaacauccagaaggagaucgaccggcugaacgagguggccaagaaccugaacgagagccugaucgaccugcaggagcugggcaaguacgagcaguacaucaaguggcccugguacaucuggcugggcuucaucgccggccugaucgccaucgugauggugaccaucaugcugugcugcaugaccagcugcuguagcugccugaagggcugcugcagcugcggcagcugcugcaaguucgacgaggacgacagcgagccagugcugaagggcgugaagcugcacuacaccugauaauaggcuggagccucgguggccuagcuucuugccccuugggccuccccccagccccuccuccccuuccugcacccguacccccguggucuuugaauaaagucugagugggcggcaaaaaaaaaaaaaaaaaaaaaaaaaaaaaaaaaaaaaaaaaaaaaaaaaaaaaaaaaaaaaaaaaaaaaaaaaaaaaaaaaaaaaaaaaaaaaaaaaaaaucuag

SEQ ID NO: 26545 - RNA, 4100 nt, Artificial Sequence
  SARS-CoV-2/Wuhan/WIV05/2019__EPI_ISL_402128 spike protein mRNA gc (1-1273)(A222V_D614G)
gggaaauaagagagaaaagaagaguaagaagaaauauaagaccccggcgccgccaccauguucguguuccuggugcugcugccccuggugagcagccagugcgugaaccugaccacccggacccagcugcccccugccuacaccaacagcuucacccggggcguguacuaccccgacaagguguuccggagcagcgugcugcacagcacccaggaccuguuccugcccuucuucagcaacgugaccugguuccacgccauccacgugagcggcaccaacggcaccaagcgguucgacaacccagugcugcccuucaacgacggcguguacuucgccagcaccgagaagucaaacaucauccggggcuggaucuucggcaccacccuggacagcaagacacagagccugcugaucgugaacaacgccaccaacguggugaucaaggugugcgaguuucaguucugcaacgaccccuuccugggcguguacuaccacaagaacaacaagagcuggauggagagcgaguuccgggucuacagcagcgcuaacaauugcaccuucgaguacgugagccagcccuuccugauggaccucgagggcaagcagggcaacuucaagaaccugcgggaguucguguucaagaacaucgauggcuacuucaagaucuacagcaagcacacccccaucaaccuggugcgggaccugccccagggauucagcgugcuggagccucugguggaccugcccaucggcaucaacaucaccagguuccagacccugcuggcccugcaccggagcuaccugacccccggcgacagcagcagcggcuggaccgccggcgccgccgccuacuacgugggcuaccugcagccacggaccuuccugcugaaguacaacgagaacggcaccaucaccgacgcaguggacugcgcccuggacccccugagcgagaccaagugcacccuaaagagcuucaccguggagaagggcaucuaccagaccagcaacuuccgggugcagcccacugagagcaucgugcgguuccccaacauuaccaaccugugucccuucggcgagguguucaacgccacccgguucgccagcguguacgccuggaaccggaagcggaucagcaacugcguggccgacuacagcgugcuguacaacagcgccagcuucagcaccuucaagugcuacggcgugagcccuaccaagcugaacgaccugugcuucaccaacguguacgccgacagcuucgugauccggggcgacgaggugcggcagaucgcucccggccagaccggcaagaucgccgacuacaacuacaagcugcccgacgacuucaccggcugcgugaucgccuggaacagcaacaaccuggacagcaaggugggcggcaacuacaacuaccuguaccggcuguuccguaagagcaaccugaagccauucgagcgggacaucagcaccgagaucuaccaggccggcagcacccccugcaacgguguggagggcuuuaacugcuacuucccccugcagagcuacggcuuccagcccaccaacggcgugggcuaccagcccuaccgggugguggugcugagcuucgagcugcugcacgcccccgccaccgugugcggcccuaaaaagagcaccaaccuggugaagaacaagugcgugaacuucaauuucaacggccugaccggcaccggcgugcugaccgagagcaacaagaaguuccugcccuuccagcaguucggccgggauaucgccgacaccaccgacgccgugcgggacccccagacccuggagauccuggacaucaccccaugcagcuucggcggcgucagcgugaucacccccggcacaaacaccagcaaccagguggcagugcuguaccagggagugaacugcaccgaggugcccguggccauccacgccgaccagcugacccccaccuggcggguguacagcaccggcagcaacguguuccagacccgggccggcugccugaucggcgccgagcacgugaacaacuccuacgagugcgacauccccaucggcgccggcaucugcgcuagcuaccagacccagaccaacagcccccggcgggcccggagcguggccagccagagcaucaucgccuacaccaugagcuuaggcgccgagaacagcguggccuacagcaacaacagcaucgccaucccuaccaacuucaccaucagcgugaccaccgagauacugcccgugagcaugaccaagaccagcguggacuguaccauguacaucugcggcgacagcaccgagugcagcaaccugcugcugcaguacggcagcuucugcacccagcugaaccgggcgcugaccggcaucgccguggagcaggacaagaacacccaagagguguucgcccaggugaagcagaucuacaagacucccccaaucaaggacuucggcggcuucaacuucagccagauccugcccgaccccagcaagcccagcaagcggagcuucaucgaggaccugcuguucaacaaggugacccuggccgacgccggcuucaucaagcaguacggcgacugccugggggauaucgccgcccgggaccugaucugcgcucagaaguucaacggccugaccgugcugcccccucugcugaccgacgagaugaucgcccaguacaccagcgcccugcuugccggcaccaucaccagcggcuggaccuucggcgccggcgccgcacugcagauccccuucgccaugcagauggccuaccgguucaacggcaucggcgugacccagaacgugcuguacgagaaccagaagcugaucgccaaccaguucaacagcgccaucggcaagauccaggacagccugagcagcaccgccagcgcccugggcaagcugcaggacguggugaaccagaacgcccaggcucugaacacccuggugaagcagcugagcagcaacuucggcgccaucagcucagugcugaaugacauccugagcaggcuggacaagguggaggccgaggugcagaucgaccggcugaucaccggccggcugcagagccugcagaccuacgugacccagcagcugauccgggccgccgagauccgggccagcgccaaccuggccgcaaccaagaugagcgagugcgugcugggccagagcaagcggguggacuuuugcggcaagggcuaccaccugaugagcuucccccagagcgccccacacggcguggucuuccuccacgugacauacgugcccgcccaggagaagaacuucaccaccgcccccgccauuugccacgacggcaaggcccacuucccccgggagggaguguucgugagcaacggcacccacugguucgugacccagcggaacuucuacgagccccagaucaucaccaccgacaacaccuucgugagcggcaacugcgacguggugaucggcaucgugaacaacaccguguacgacccccugcagccugagcuggacagcuucaaggaggagcuggacaaguacuucaagaaccacaccagccccgacguggaucugggcgacaucagcggcaucaacgcuagcguggugaacauccagaaggagaucgaccggcugaacgagguggccaagaaccugaacgagagccugaucgaccugcaggagcugggcaaguacgagcaguacaucaaguggcccugguacaucuggcugggcuucaucgccggccugaucgccaucgugauggugaccaucaugcugugcugcaugaccagcugcuguagcugccugaagggcugcugcagcugcggcagcugcugcaaguucgacgaggacgacagcgagccagugcugaagggcgugaagcugcacuacaccugauaauaggcuggagccucgguggccuagcuucuugccccuugggccuccccccagccccuccuccccuuccugcacccguacccccguggucuuugaauaaagucugagugggcggcaaaaaaaaaaaaaaaaaaaaaaaaaaaaaaaaaaaaaaaaaaaaaaaaaaaaaaaaaaaaaaaaaaaaaaaaaaaaaaaaaaaaaaaaaaaaaaaaaaaaucuag

SEQ ID NO: 26546 - RNA, 4100 nt, Artificial Sequence
  SARS-CoV-2/Wuhan/WIV05/2019__EPI_ISL_402128 spike protein mRNA gc (1-1273)(N439K_D614G)
gggaaauaagagagaaaagaagaguaagaagaaauauaagaccccggcgccgccaccauguucguguuccuggugcugcugccccuggugagcagccagugcgugaaccugaccacccggacccagcugcccccugccuacaccaacagcuucacccggggcguguacuaccccgacaagguguuccggagcagcgugcugcacagcacccaggaccuguuccugcccuucuucagcaacgugaccugguuccacgccauccacgugagcggcaccaacggcaccaagcgguucgacaacccagugcugcccuucaacgacggcguguacuucgccagcaccgagaagucaaacaucauccggggcuggaucuucggcaccacccuggacagcaagacacagagccugcugaucgugaacaacgccaccaacguggugaucaaggugugcgaguuucaguucugcaacgaccccuuccugggcguguacuaccacaagaacaacaagagcuggauggagagcgaguuccgggucuacagcagcgcuaacaauugcaccuucgaguacgugagccagcccuuccugauggaccucgagggcaagcagggcaacuucaagaaccugcgggaguucguguucaagaacaucgauggcuacuucaagaucuacagcaagcacacccccaucaaccuggugcgggaccugccccagggauucagcgcccuggagccucugguggaccugcccaucggcaucaacaucaccagguuccagacccugcuggcccugcaccggagcuaccugacccccggcgacagcagcagcggcuggaccgccggcgccgccgcauacuacgugggcuaccugcagccacggaccuuccugcugaaguacaacgagaacggcaccaucaccgacgccguggacugcgcccuggacccccugagcgagaccaagugcacccuaaagagcuucaccguggagaagggcaucuaccagaccagcaacuuccgggugcagcccacugagagcaucgugcgguuccccaacauuaccaaccugugucccuucggcgagguguucaacgccacccgguucgccagcguguacgccuggaaccggaagcggaucagcaacugcguggccgacuacagcgugcuguacaacagcgccagcuucagcaccuucaagugcuacggcgugagcccuaccaagcugaacgaccugugcuucaccaacguguacgcugacagcuucgugauccggggcgacgaggugcggcagaucgcccccggccagaccggcaagaucgccgacuacaacuacaagcugcccgacgacuucaccggcugcgugaucgccuggaacagcaagaaccuggacagcaaggugggcggcaacuacaacuaccuguaccggcuguuccguaagagcaaccugaagccauucgagcgggacaucagcaccgagaucuaccaggccggcagcacccccugcaacgguguggagggcuuuaacugcuacuucccccugcagagcuacggcuuccagcccaccaacggcgugggcuaccagcccuaccgggugguggugcugagcuucgagcugcugcacgcccccgccaccgugugcggcccuaaaaagagcaccaaccuggugaagaacaagugcgugaacuucaacuucaauggccugaccggcaccggcgugcugaccgagagcaacaagaaguuccugcccuuccagcaguucggccgggauaucgccgacaccaccgacgcagugcgggacccccagacccuggagauccuggacaucaccccaugcagcuucggcggcgugagcgucaucacccccggcacaaacaccagcaaccagguggccgugcuguaccagggagugaacugcaccgaggugcccguggccauccacgccgaccagcugacccccaccuggcggguguacagcaccggcagcaacguguuccagacccgggccggcugccugaucggcgccgagcacgugaacaacuccuacgagugcgacauccccaucggcgcuggcaucugcgccagcuaccagacccagaccaacagcccccggcgggcccggagcguggccagccagagcaucaucgccuacaccaugagcuuaggcgccgagaacagcguggccuacagcaacaacagcaucgcgaucccuaccaacuucaccaucagcgugaccaccgagauacugcccgugagcaugaccaagaccagcguggacuguaccauguacaucugcggcgacagcaccgagugcagcaaccugcugcugcaguacggcagcuucugcacccagcugaaccgggcccugaccggcaucgccguggagcaggacaagaacacccaagagguguucgcccaggugaagcagaucuacaagacucccccaaucaaggacuucggcggcuucaacuucagccagauccugcccgaccccagcaagcccagcaagcggagcuucaucgaggaccugcuguucaacaaggugacccuggccgacgccggcuucaucaagcaguacggcgacugccugggggauaucgccgcucgggaccugaucugcgcccagaaguucaacggccugaccgugcugcccccucugcugaccgacgagaugaucgcccaguacaccagcgcccugcuugccggcaccaucaccagcggcuggaccuucggcgccggcgcagcccugcagauccccuucgccaugcagauggccuaccgguucaacggcaucggcgugacccagaacgugcuguacgagaaccagaagcugaucgccaaccaguucaacagcgccaucggcaagauccaggacagccugagcagcaccgccagcgcccugggcaagcugcaggacguggugaaccagaacgcucaggcccugaacacccuggugaagcagcugagcagcaacuucggcgccaucagcucagugcugaacgacauccugagcaggcuggacaagguggaggccgaggugcagaucgaccggcugaucaccggccggcugcagagccugcagaccuacgugacccagcagcugauccgggccgccgagauccgggccagcgccaaucuggcagccaccaagaugagcgagugcgugcugggccagagcaagcggguggacuuuugcggcaagggcuaccaccugaugagcuucccccagagcgccccacacggcgugguguuccuccacgucacauacgugcccgcccaggagaagaacuucaccaccgcccccgccauuugccacgacggcaaggcucacuucccccgggagggaguguucgugagcaacggcacccacugguucgugacccagcggaacuucuacgagccccagaucaucaccaccgacaacaccuucgugagcggcaacugcgacguggugaucggcaucgugaacaacaccguguacgacccccugcagccugagcuggacagcuucaaggaggagcuggacaaguacuucaagaaccacaccagccccgacguggaucugggcgacaucagcggcaucaacgccagcguggugaacauccagaaggagaucgaccggcugaacgagguggccaagaaccugaacgagagccugaucgaccugcaggagcugggcaaguacgagcaguacaucaaguggcccugguacaucuggcugggcuucaucgccggccugaucgccaucgugauggugaccaucaugcugugcugcaugaccagcugcuguagcugccugaagggcugcugcagcugcggcagcugcugcaaguucgacgaggacgacagcgagccagugcugaagggcgugaagcugcacuacaccugauaauaggcuggagccucgguggccuagcuucuugccccuugggccuccccccagccccuccuccccuuccugcacccguacccccguggucuuugaauaaagucugagugggcggcaaaaaaaaaaaaaaaaaaaaaaaaaaaaaaaaaaaaaaaaaaaaaaaaaaaaaaaaaaaaaaaaaaaaaaaaaaaaaaaaaaaaaaaaaaaaaaaaaaaaucuag

SEQ ID NO: 26547 - RNA, 4100 nt, Artificial Sequence
  SARS-CoV-2/Wuhan/WIV05/2019__EPI_ISL_402128 spike protein mRNA gc (1-1273)(S477N_D614G)
gggaaauaagagagaaaagaagaguaagaagaaauauaagaccccggcgccgccaccauguucguguuccuggugcugcugccccuggugagcagccagugcgugaaccugaccacccggacccagcugcccccugccuacaccaacagcuucacccggggcguguacuaccccgacaagguguuccggagcagcgugcugcacagcacccaggaccuguuccugcccuucuucagcaacgugaccugguuccacgccauccacgugagcggcaccaacggcaccaagcgguucgacaacccagugcugcccuucaacgacggcguguacuucgccagcaccgagaagucaaacaucauccggggcuggaucuucggcaccacccuggacagcaagacacagagccugcugaucgugaacaacgccaccaacguggugaucaaggugugcgaguuucaguucugcaacgaccccuuccugggcguguacuaccacaagaacaacaagagcuggauggagagcgaguuccgggucuacagcagcgcuaacaauugcaccuucgaguacgugagccagcccuuccugauggaccucgagggcaagcagggcaacuucaagaaccugcgggaguucguguucaagaacaucgauggcuacuucaagaucuacagcaagcacacccccaucaaccuggugcgggaccugccccagggauucagcgcccuggagccucugguggaccugcccaucggcaucaacaucaccagguuccagacccugcuggcccugcaccggagcuaccugacccccggcgacagcagcagcggcuggaccgccggcgccgccgcauacuacgugggcuaccugcagccacggaccuuccugcugaaguacaacgagaacggcaccaucaccgacgccguggacugcgcccuggacccccugagcgagaccaagugcacccuaaagagcuucaccguggagaagggcaucuaccagaccagcaacuuccgggugcagcccacugagagcaucgugcgguuccccaacauuaccaaccugugucccuucggcgagguguucaacgccacccgguucgccagcguguacgccuggaaccggaagcggaucagcaacugcguggccgacuacagcgugcuguacaacagcgccagcuucagcaccuucaagugcuacggcgugagcccuaccaagcugaacgaccugugcuucaccaacguguacgcugacagcuucgugauccggggcgacgaggugcggcagaucgcccccggccagaccggcaagaucgccgacuacaacuacaagcugcccgacgacuucaccggcugcgugaucgccuggaacagcaacaaccuggacagcaaggugggcggcaacuacaacuaccuguaccggcuguuccguaagagcaaccugaagccauucgagcgggacaucagcaccgagaucuaccaggccggcaacacccccugcaacgguguggagggcuuuaacugcuacuucccccugcagagcuacggcuuccagcccaccaacggcgugggcuaccagcccuaccgggugguggugcugagcuucgagcugcugcacgcccccgccaccgugugcggcccuaaaaagagcaccaaccuggugaagaacaagugcgugaauuucaacuucaacggccugaccggcaccggcgugcugaccgagagcaacaagaaguuccugcccuuccagcaguucggccgggauaucgccgacaccaccgacgcagugcgggacccccagacccuggagauccuggacaucaccccaugcagcuucggcggcgugagcgucaucacccccggcacaaacaccagcaaccagguggccgugcuguaccagggagugaacugcaccgaggugcccguggccauccacgccgaccagcugacccccaccuggcggguguacagcaccggcagcaacguguuccagacccgggccggcugccugaucggcgccgagcacgugaacaacagcuacgagugcgacauccccaucggcgcuggcaucugcgccuccuaccagacccagaccaacagcccccggcgggcccggagcguggccagccagagcaucaucgccuacaccaugagcuuaggcgccgagaacagcguggccuacagcaacaacagcaucgcgaucccuaccaacuucaccaucagcgugaccaccgagauacugcccgugagcaugaccaagaccagcguggacuguaccauguacaucugcggcgacagcaccgagugcagcaaccugcugcugcaguacggcagcuucugcacccagcugaaccgggcccugaccggcaucgccguggagcaggacaagaacacccaagagguguucgcccaggugaagcagaucuacaagacucccccaaucaaggacuucggcggcuucaacuucagccagauccugcccgaccccagcaagcccagcaagcggagcuucaucgaggaccugcuguucaacaaggugacccuggccgacgccggcuucaucaagcaguacggcgacugccugggggauaucgccgcucgggaccugaucugcgcccagaaguucaacggccugaccgugcugcccccucugcugaccgacgagaugaucgcccaguacaccagcgcccugcuugccggcaccaucaccagcggcuggaccuucggcgccggcgcagcccugcagauccccuucgccaugcagauggccuaccgguucaacggcaucggcgugacccagaacgugcuguacgagaaccagaagcugaucgccaaccaguucaacagcgccaucggcaagauccaggacagccugagcagcaccgccagcgcccugggcaagcugcaggacguggugaaccagaacgcucaggcccugaacacccuggugaagcagcugagcagcaauuucggcgccaucagcagcgugcugaacgacauccugucaaggcuggacaagguggaggccgaggugcagaucgaccggcugaucaccggccggcugcagagccugcagaccuacgugacccagcagcugauccgggccgccgagauccgggccagcgccaaccuggcagccaccaagaugagcgagugcgugcugggccagagcaagcggguggacuuuugcggcaagggcuaccaccugaugagcuucccccagagcgccccacacggcgugguguuccuccacgucacauacgugcccgcccaggagaagaacuucaccaccgcccccgccauuugccacgacggcaaggcucacuucccccgggagggaguguucgugagcaacggcacccacugguucgugacccagcggaacuucuacgagccccagaucaucaccaccgacaacaccuucgugagcggcaacugcgacguggugaucggcaucgugaacaacaccguguacgacccccugcagccugagcuggacagcuucaaggaggagcuggacaaguacuucaagaaccacaccagccccgacguggaucugggcgacaucagcggcaucaacgccagcguggugaacauccagaaggagaucgaccggcugaacgagguggccaagaaccugaacgagagccugaucgaccugcaggagcugggcaaguacgagcaguacaucaaguggcccugguacaucuggcugggcuucaucgccggccugaucgccaucgugauggugaccaucaugcugugcugcaugaccagcugcuguagcugccugaagggcugcugcagcugcggcagcugcugcaaguucgacgaggacgacagcgagccagugcugaagggcgugaagcugcacuacaccugauaauaggcuggagccucgguggccuagcuucuugccccuugggccuccccccagccccuccuccccuuccugcacccguacccccguggucuuugaauaaagucugagugggcggcaaaaaaaaaaaaaaaaaaaaaaaaaaaaaaaaaaaaaaaaaaaaaaaaaaaaaaaaaaaaaaaaaaaaaaaaaaaaaaaaaaaaaaaaaaaaaaaaaaaaucuag

SEQ ID NO: 26548 - RNA, 4100 nt, Artificial Sequence
  SARS-CoV-2/Wuhan/WIV05/2019__EPI_ISL_402128 spike protein mRNA gc (1-1273)(N501Y_D614G)
gggaaauaagagagaaaagaagaguaagaagaaauauaagaccccggcgccgccaccauguucguguuccuggugcugcugccccuggugagcagccagugcgugaaccugaccacccggacccagcugcccccugccuacaccaacagcuucacccggggcguguacuaccccgacaagguguuccggagcagcgugcugcacagcacccaggaccuguuccugcccuucuucagcaacgugaccugguuccacgccauccacgugagcggcaccaacggcaccaagcgguucgacaacccagugcugcccuucaacgacggcguguacuucgccagcaccgagaagucaaacaucauccggggcuggaucuucggcaccacccuggacagcaagacacagagccugcugaucgugaacaacgccaccaacguggugaucaaggugugcgaguuucaguucugcaacgaccccuuccugggcguguacuaccacaagaacaacaagagcuggauggagagcgaguuccgggucuacagcagcgcuaacaauugcaccuucgaguacgugagccagcccuuccugauggaccucgagggcaagcagggcaacuucaagaaccugcgggaguucguguucaagaacaucgauggcuacuucaagaucuacagcaagcacacccccaucaaccuggugcgggaccugccccagggauucagcgcccuggagccucugguggaccugcccaucggcaucaacaucaccagguuccagacccugcuggcccugcaccggagcuaccugacccccggcgacagcagcagcggcuggaccgccggcgccgccgcauacuacgugggcuaccugcagccacggaccuuccugcugaaguacaacgagaacggcaccaucaccgacgccguggacugcgcccuggacccccugagcgagaccaagugcacccuaaagagcuucaccguggagaagggcaucuaccagaccagcaacuuccgggugcagcccacugagagcaucgugcgguuccccaacauuaccaaccugugucccuucggcgagguguucaacgccacccgguucgccagcguguacgccuggaaccggaagcggaucagcaacugcguggccgacuacagcgugcuguacaacagcgccagcuucagcaccuucaagugcuacggcgugagcccuaccaagcugaacgaccugugcuucaccaacguguacgcugacagcuucgugauccggggcgacgaggugcggcagaucgcccccggccagaccggcaagaucgccgacuacaacuacaagcugcccgacgacuucaccggcugcgugaucgccuggaacagcaacaaccuggacagcaaggugggcggcaacuacaacuaccuguaccggcuguuccguaagagcaaccugaagccauucgagcgggacaucagcaccgagaucuaccaggccggcagcacccccugcaacgguguggagggcuuuaacugcuacuucccccugcagagcuacggcuuccagcccaccuacggcgugggcuaccagcccuaccgggugguggugcugagcuucgagcugcugcacgcccccgccaccgugugcggcccuaaaaagagcaccaaccuggugaagaacaagugcgugaacuucaacuucaauggccugaccggcaccggcgugcugaccgagagcaacaagaaguuccugcccuuccagcaguucggccgggauaucgccgacaccaccgacgcagugcgggacccccagacccuggagauccuggacaucaccccaugcagcuucggcggcgugagcgucaucacccccggcacaaacaccagcaaccagguggccgugcuguaccagggagugaacugcaccgaggugcccguggccauccacgccgaccagcugacccccaccuggcggguguacagcaccggcagcaacguguuccagacccgggccggcugccugaucggcgccgagcacgugaacaacuccuacgagugcgacauccccaucggcgcuggcaucugcgccagcuaccagacccagaccaacagcccccggcgggcccggagcguggccagccagagcaucaucgccuacaccaugagcuuaggcgccgagaacagcguggccuacagcaacaacagcaucgcgaucccuaccaacuucaccaucagcgugaccaccgagauacugcccgugagcaugaccaagaccagcguggacuguaccauguacaucugcggcgacagcaccgagugcagcaaccugcugcugcaguacggcagcuucugcacccagcugaaccgggcccugaccggcaucgccguggagcaggacaagaacacccaagagguguucgcccaggugaagcagaucuacaagacucccccaaucaaggacuucggcggcuucaacuucagccagauccugcccgaccccagcaagcccagcaagcggagcuucaucgaggaccugcuguucaacaaggugacccuggccgacgccggcuucaucaagcaguacggcgacugccugggggauaucgccgcucgggaccugaucugcgcccagaaguucaacggccugaccgugcugcccccucugcugaccgacgagaugaucgcccaguacaccagcgcccugcuugccggcaccaucaccagcggcuggaccuucggcgccggcgcagcccugcagauccccuucgccaugcagauggccuaccgguucaacggcaucggcgugacccagaacgugcuguacgagaaccagaagcugaucgccaaccaguucaacagcgccaucggcaagauccaggacagccugagcagcaccgccagcgcccugggcaagcugcaggacguggugaaccagaacgcucaggcccugaacacccuggugaagcagcugagcagcaacuucggcgccaucagcucagugcugaacgacauccugagcaggcuggacaagguggaggccgaggugcagaucgaccggcugaucaccggccggcugcagagccugcagaccuacgugacccagcagcugauccgggccgccgagauccgggccagcgccaaucuggcagccaccaagaugagcgagugcgugcugggccagagcaagcggguggacuuuugcggcaagggcuaccaccugaugagcuucccccagagcgccccacacggcgugguguuccuccacgucacauacgugcccgcccaggagaagaacuucaccaccgcccccgccauuugccacgacggcaaggcucacuucccccgggagggaguguucgugagcaacggcacccacugguucgugacccagcggaacuucuacgagccccagaucaucaccaccgacaacaccuucgugagcggcaacugcgacguggugaucggcaucgugaacaacaccguguacgacccccugcagccugagcuggacagcuucaaggaggagcuggacaaguacuucaagaaccacaccagccccgacguggaucugggcgacaucagcggcaucaacgccagcguggugaacauccagaaggagaucgaccggcugaacgagguggccaagaaccugaacgagagccugaucgaccugcaggagcugggcaaguacgagcaguacaucaaguggcccugguacaucuggcugggcuucaucgccggccugaucgccaucgugauggugaccaucaugcugugcugcaugaccagcugcuguagcugccugaagggcugcugcagcugcggcagcugcugcaaguucgacgaggacgacagcgagccagugcugaagggcgugaagcugcacuacaccugauaauaggcuggagccucgguggccuagcuucuugccccuugggccuccccccagccccuccuccccuuccugcacccguacccccguggucuuugaauaaagucugagugggcggcaaaaaaaaaaaaaaaaaaaaaaaaaaaaaaaaaaaaaaaaaaaaaaaaaaaaaaaaaaaaaaaaaaaaaaaaaaaaaaaaaaaaaaaaaaaaaaaaaaaaucuag

SEQ ID NO: 26549 - RNA, 4094 nt, Artificial Sequence
  SARS-CoV-2/Wuhan/WIV05/2019__EPI_ISL_402128 spike protein mRNA gc (1-1273)(H69del_V70del_D614G)
gggaaauaagagagaaaagaagaguaagaagaaauauaagaccccggcgccgccaccauguucguguuccuggugcugcugccccuggugagcagccagugcgugaaccugaccacccggacccagcugcccccugccuacaccaacagcuucacccggggcguguacuaccccgacaagguguuccggagcagcgugcugcacagcacccaggaccuguuccugcccuucuucagcaacgugaccugguuccacgccaucagcggcaccaacggcaccaagcgguucgacaacccagugcugcccuucaacgacggcguguacuucgccagcaccgagaagucaaacaucauccggggcuggaucuucggcaccacccuggacagcaagacacagagccugcugaucgugaacaacgccaccaacguggugaucaaggugugcgaguuucaguucugcaacgaccccuuccugggcguguacuaccacaagaacaacaagagcuggauggagagcgaguuccggguguacagcagcgcuaacaauugcaccuucgaguacgucagccagcccuuccugauggaccucgagggcaagcagggcaacuucaagaaccugcgggaguucguguucaagaacaucgauggcuacuucaagaucuacagcaagcacacccccaucaaccuggugcgggaccugccccagggauucagcgcccuggagccucugguggaccugcccaucggcaucaacaucaccagguuccagacccugcuggcccugcaccggagcuaccugacccccggcgacagcagcagcggcuggaccgccggcgccgccgcauacuacgugggcuaccugcagccacggaccuuccugcugaaguacaacgagaacggcaccaucaccgacgccguggacugcgcccuggacccccugagcgagaccaagugcacccuaaagagcuucaccguggagaagggcaucuaccagaccagcaacuuccgggugcagcccacugagagcaucgugcgguuccccaacauuaccaaccugugucccuucggcgagguguucaacgccacccgguucgccagcguguacgccuggaaccggaagcggaucagcaacugcguggccgacuacagcgugcuguacaacagcgccagcuucagcaccuucaagugcuacggcgugagcccuaccaagcugaacgaccugugcuucaccaacguguacgcugacagcuucgugauccggggcgacgaggugcggcagaucgcccccggccagaccggcaagaucgccgacuacaacuacaagcugcccgacgacuucaccggcugcgugaucgccuggaacagcaacaaccuggacagcaaggugggcggcaacuacaacuaccuguaccggcuguuccguaagagcaaccugaagccauucgagcgggacaucagcaccgagaucuaccaggccggcagcacccccugcaacgguguggagggcuuuaacugcuacuucccccugcagagcuacggcuuccagcccaccaacggcgugggcuaccagcccuaccgggugguggugcugagcuucgagcugcugcacgcccccgccaccgugugcggcccuaaaaagagcaccaaccuggugaagaacaagugcgugaacuucaauuucaacggccugaccggcaccggcgugcugaccgagagcaacaagaaguuccugcccuuccagcaguucggccgggauaucgccgacaccaccgacgcagugcgggacccccagacccuggagauccuggacaucaccccaugcagcuucggcggcgugagcgugaucacccccggcacaaacaccagcaaccaggucgccgugcuguaccagggagugaacugcaccgaggugcccguggccauccacgccgaccagcugacccccaccuggcggguguacagcaccggcagcaacguguuccagacccgggccggcugccugaucggcgccgagcacgugaacaacuccuacgagugcgacauccccaucggcgcuggcaucugcgccagcuaccagacccagaccaacagcccccggcgggcccggagcguggccagccagagcaucaucgccuacaccaugagcuuaggcgccgagaacagcguggccuacagcaacaacagcaucgcgaucccuaccaacuucaccaucagcgugaccaccgagauacugcccgugagcaugaccaagaccagcguggacuguaccauguacaucugcggcgacagcaccgagugcagcaaccugcugcugcaguacggcagcuucugcacccagcugaaccgggcccugaccggcaucgccguggagcaggacaagaacacccaagagguguucgcccaggugaagcagaucuacaagacucccccaaucaaggacuucggcggcuucaacuucagccagauccugcccgaccccagcaagcccagcaagcggagcuucaucgaggaccugcuguucaacaaggugacccuggccgacgccggcuucaucaagcaguacggcgacugccugggggauaucgccgcucgggaccugaucugcgcccagaaguucaacggccugaccgugcugcccccucugcugaccgacgagaugaucgcccaguacaccagcgcccugcuugccggcaccaucaccagcggcuggaccuucggcgccggcgcagcccugcagauccccuucgccaugcagauggccuaccgguucaacggcaucggcgugacccagaacgugcuguacgagaaccagaagcugaucgccaaccaguucaacagcgccaucggcaagauccaggacagccugagcagcaccgccagcgcccugggcaagcugcaggacguggugaaccagaacgcucaggcccugaacacccuggugaagcagcugagcagcaacuucggcgccaucagcucagugcugaaugacauccugagcaggcuggacaagguggaggccgaggugcagaucgaccggcugaucaccggccggcugcagagccugcagaccuacgugacccagcagcugauccgggccgccgagauccgggccagcgccaaccuggcagccaccaagaugagcgagugcgugcugggccagagcaagcggguggacuuuugcggcaagggcuaccaccugaugagcuucccccagagcgccccacacggcgugguguuccuccacgugacauacguccccgcccaggagaagaacuucaccaccgcccccgccauuugccacgacggcaaggcucacuucccccgggagggaguguucgugagcaacggcacccacugguucgugacccagcggaacuucuacgagccccagaucaucaccaccgacaacaccuucgugagcggcaacugcgacguggugaucggcaucgugaacaacaccguguacgacccccugcagccugagcuggacagcuucaaggaggagcuggacaaguacuucaagaaccacaccagccccgacguggaucugggcgacaucagcggcaucaacgccagcguggugaacauccagaaggagaucgaccggcugaacgagguggccaagaaccugaacgagagccugaucgaccugcaggagcugggcaaguacgagcaguacaucaaguggcccugguacaucuggcugggcuucaucgccggccugaucgccaucgugauggugaccaucaugcugugcugcaugaccagcugcuguagcugccugaagggcugcugcagcugcggcagcugcugcaaguucgacgaggacgacagcgagccagugcugaagggcgugaagcugcacuacaccugauaauaggcuggagccucgguggccuagcuucuugccccuugggccuccccccagccccuccuccccuuccugcacccguacccccguggucuuugaauaaagucugagugggcggcaaaaaaaaaaaaaaaaaaaaaaaaaaaaaaaaaaaaaaaaaaaaaaaaaaaaaaaaaaaaaaaaaaaaaaaaaaaaaaaaaaaaaaaaaaaaaaaaaaaaucuag

SEQ ID NO: 26550 - RNA, 4100 nt, Artificial Sequence
  SARS-CoV-2/Wuhan/WIV05/2019__EPI_ISL_402128 spike protein mRNA gc (1-1273)(Y453F_D614G)
gggaaauaagagagaaaagaagaguaagaagaaauauaagaccccggcgccgccaccauguucguguuccuggugcugcugccccuggugagcagccagugcgugaaccugaccacccggacccagcugcccccugccuacaccaacagcuucacccggggcguguacuaccccgacaagguguuccggagcagcgugcugcacagcacccaggaccuguuccugcccuucuucagcaacgugaccugguuccacgccauccacgugagcggcaccaacggcaccaagcgguucgacaacccagugcugcccuucaacgacggcguguacuucgccagcaccgagaagucaaacaucauccggggcuggaucuucggcaccacccuggacagcaagacacagagccugcugaucgugaacaacgccaccaacguggugaucaaggugugcgaguuucaguucugcaacgaccccuuccugggcguguacuaccacaagaacaacaagagcuggauggagagcgaguuccgggucuacagcagcgcuaacaauugcaccuucgaguacgugagccagcccuuccugauggaccucgagggcaagcagggcaacuucaagaaccugcgggaguucguguucaagaacaucgauggcuacuucaagaucuacagcaagcacacccccaucaaccuggugcgggaccugccccagggauucagcgcccuggagccucugguggaccugcccaucggcaucaacaucaccagguuccagacccugcuggcccugcaccggagcuaccugacccccggcgacagcagcagcggcuggaccgccggcgccgccgcauacuacgugggcuaccugcagccacggaccuuccugcugaaguacaacgagaacggcaccaucaccgacgccguggacugcgcccuggacccccugagcgagaccaagugcacccuaaagagcuucaccguggagaagggcaucuaccagaccagcaacuuccgggugcagcccacugagagcaucgugcgguuccccaacauuaccaaccugugucccuucggcgagguguucaacgccacccgguucgccagcguguacgccuggaaccggaagcggaucagcaacugcguggccgacuacagcgugcuguacaacagcgccagcuucagcaccuucaagugcuacggcgugagcccuaccaagcugaacgaccugugcuucaccaacguguacgcugacagcuucgugauccggggcgacgaggugcggcagaucgcccccggccagaccggcaagaucgccgacuacaacuacaagcugcccgacgacuucaccggcugcgugaucgccuggaacagcaacaaccuggacagcaaggugggcggcaacuacaacuaccuguuccggcuguuccguaagagcaaccugaagccauuugagcgggacaucagcaccgagaucuaccaggccggcagcacccccugcaacgguguggagggcuucaacugcuacuucccccugcagagcuacggcuuccagcccaccaacggcgugggcuaccagcccuaccgggugguggugcugagcuucgagcugcugcacgcccccgccaccgugugcggcccuaaaaagagcaccaaccuggugaagaacaagugcgugaacuucaauuucaacggccugaccggcaccggcgugcugaccgagagcaacaagaaguuccugcccuuccagcaguucggccgggauaucgccgacaccaccgacgcagugcgggacccccagacccuggagauccuggacaucaccccaugcagcuucggcggcgugagcgucaucacccccggcacaaacaccagcaaccagguggccgugcuguaccagggagugaacugcaccgaggugcccguggccauccacgccgaccagcugacccccaccuggcggguguacagcaccggcagcaacguguuccagacccgggccggcugccugaucggcgccgagcacgugaacaacuccuacgagugcgacauccccaucggcgcuggcaucugcgccagcuaccagacccagaccaacagcccccggcgggcccggagcguggccagccagagcaucaucgccuacaccaugagcuuaggcgccgagaacagcguggccuacagcaacaacagcaucgcgaucccuaccaacuucaccaucagcgugaccaccgagauacugcccgugagcaugaccaagaccagcguggacuguaccauguacaucugcggcgacagcaccgagugcagcaaccugcugcugcaguacggcagcuucugcacccagcugaaccgggcccugaccggcaucgccguggagcaggacaagaacacccaagagguguucgcccaggugaagcagaucuacaagacucccccaaucaaggacuucggcggcuucaacuucagccagauccugcccgaccccagcaagcccagcaagcggagcuucaucgaggaccugcuguucaacaaggugacccuggccgacgccggcuucaucaagcaguacggcgacugccugggggauaucgccgcucgggaccugaucugcgcccagaaguucaacggccugaccgugcugcccccucugcugaccgacgagaugaucgcccaguacaccagcgcccugcuugccggcaccaucaccagcggcuggaccuucggcgccggcgcagcccugcagauccccuucgccaugcagauggccuaccgguucaacggcaucggcgugacccagaacgugcuguacgagaaccagaagcugaucgccaaccaguucaacagcgccaucggcaagauccaggacagccugagcagcaccgccagcgcccugggcaagcugcaggacguggugaaccagaacgcucaggcccugaacacccuggugaagcagcugagcagcaacuuuggcgccaucagcucagugcugaaugacauccugagcaggcuggacaagguggaggccgaggugcagaucgaccggcugaucaccggccggcugcagagccugcagaccuacgugacccagcagcugauccgggccgccgagauccgggccagcgccaaccuggcagccaccaagaugagcgagugcgugcugggccagagcaagcggguggacuucugcggcaagggcuaccaccugaugagcuucccccagagcgccccacacggcgugguguuccuccacgucacauacgugcccgcccaggagaagaacuucaccaccgcccccgccauuugccacgacggcaaggcucacuucccccgggagggaguguucgugagcaacggcacccacugguucgugacccagcggaacuucuacgagccccagaucaucaccaccgacaacaccuucgugagcggcaacugcgacguggugaucggcaucgugaacaacaccguguacgacccccugcagccugagcuggacagcuucaaggaggagcuggacaaguacuucaagaaccacaccagccccgacguggaucugggcgacaucagcggcaucaacgccagcguggugaacauccagaaggagaucgaccggcugaacgagguggccaagaaccugaacgagagccugaucgaccugcaggagcugggcaaguacgagcaguacaucaaguggcccugguacaucuggcugggcuucaucgccggccugaucgccaucgugauggugaccaucaugcugugcugcaugaccagcugcuguagcugccugaagggcugcugcagcugcggcagcugcugcaaguucgacgaggacgacagcgagccagugcugaagggcgugaagcugcacuacaccugauaauaggcuggagccucgguggccuagcuucuugccccuugggccuccccccagccccuccuccccuuccugcacccguacccccguggucuuugaauaaagucugagugggcggcaaaaaaaaaaaaaaaaaaaaaaaaaaaaaaaaaaaaaaaaaaaaaaaaaaaaaaaaaaaaaaaaaaaaaaaaaaaaaaaaaaaaaaaaaaaaaaaaaaaaucuag

SEQ ID NO: 26551 - RNA, 4100 nt, Artificial Sequence
  SARS-CoV-2/Wuhan/WIV05/2019__EPI_ISL_402128 spike protein mRNA gc (1-1273)(D614G_I692V)
gggaaauaagagagaaaagaagaguaagaagaaauauaagaccccggcgccgccaccauguucguguuccuggugcugcugccccuggugagcagccagugcgugaaccugaccacccggacccagcugcccccugccuacaccaacagcuucacccggggcguguacuaccccgacaagguguuccggagcagcgugcugcacagcacccaggaccuguuccugcccuucuucagcaacgugaccugguuccacgccauccacgugagcggcaccaacggcaccaagcgguucgacaacccagugcugcccuucaacgacggcguguacuucgccagcaccgagaagucaaacaucauccggggcuggaucuucggcaccacccuggacagcaagacacagagccugcugaucgugaacaacgccaccaacguggugaucaaggugugcgaguuucaguucugcaacgaccccuuccugggcguguacuaccacaagaacaacaagagcuggauggagagcgaguuccgggucuacagcagcgcuaacaauugcaccuucgaguacgugagccagcccuuccugauggaccucgagggcaagcagggcaacuucaagaaccugcgggaguucguguucaagaacaucgauggcuacuucaagaucuacagcaagcacacccccaucaaccuggugcgggaccugccccagggauucagcgcccuggagccucugguggaccugcccaucggcaucaacaucaccagguuccagacccugcuggcccugcaccggagcuaccugacccccggcgacagcagcagcggcuggaccgccggcgccgccgcauacuacgugggcuaccugcagccacggaccuuccugcugaaguacaacgagaacggcaccaucaccgacgccguggacugcgcccuggacccccugagcgagaccaagugcacccuaaagagcuucaccguggagaagggcaucuaccagaccagcaacuuccgggugcagcccacugagagcaucgugcgguuccccaacauuaccaaccugugucccuucggcgagguguucaacgccacccgguucgccagcguguacgccuggaaccggaagcggaucagcaacugcguggccgacuacagcgugcuguacaacagcgccagcuucagcaccuucaagugcuacggcgugagcccuaccaagcugaacgaccugugcuucaccaacguguacgcugacagcuucgugauccggggcgacgaggugcggcagaucgcccccggccagaccggcaagaucgccgacuacaacuacaagcugcccgacgacuucaccggcugcgugaucgccuggaacagcaacaaccuggacagcaaggugggcggcaacuacaacuaccuguaccggcuguuccguaagagcaaccugaagccauucgagcgggacaucagcaccgagaucuaccaggccggcagcacccccugcaacgguguggagggcuuuaacugcuacuucccccugcagagcuacggcuuccagcccaccaacggcgugggcuaccagcccuaccgggugguggugcugagcuucgagcugcugcacgcccccgccaccgugugcggcccuaaaaagagcaccaaccuggugaagaacaagugcgugaacuucaauuucaacggccugaccggcaccggcgugcugaccgagagcaacaagaaguuccugcccuuccagcaguucggccgggauaucgccgacaccaccgacgcagugcgggacccccagacccuggagauccuggacaucaccccaugcagcuucggcggcgugagcgucaucacccccggcacaaacaccagcaaccagguggccgugcuguaccagggagugaacugcaccgaggugcccguggccauccacgccgaccagcugacccccaccuggcggguguacagcaccggcagcaacguguuccagacccgggccggcugccugaucggcgccgagcacgugaacaacuccuacgagugcgacauccccaucggcgcuggcaucugcgccagcuaccagacccagaccaacagcccccggcgggcccggagcguggccagccagagcgugaucgccuacaccaugagcuuaggcgccgagaacagcguggccuacagcaacaacagcaucgcgaucccuaccaacuucaccaucagcgugaccaccgagauccugcccgugagcaugaccaagaccagcguggacuguaccauguacauaugcggcgacagcaccgagugcagcaaccugcugcugcaguacggcagcuucugcacccagcugaaccgggcccugaccggcaucgccguggagcaggacaagaacacccaagagguguucgcccaggugaagcagaucuacaagacucccccaaucaaggacuucggcggcuucaacuucagccagauccugcccgaccccagcaagcccagcaagcggagcuucaucgaggaccugcuguucaacaaggugacccuggccgacgccggcuucaucaagcaguacggcgacugccugggggauaucgccgcucgggaccugaucugcgcccagaaguucaacggccugaccgugcugcccccucugcugaccgacgagaugaucgcccaguacaccagcgcccugcuugccggcaccaucaccagcggcuggaccuucggcgccggcgcagcccugcagauccccuucgccaugcagauggccuaccgguucaacggcaucggcgugacccagaacgugcuguacgagaaccagaagcugaucgccaaccaguucaacagcgccaucggcaagauccaggacagccugagcagcaccgccagcgcccugggcaagcugcaggacguggugaaccagaacgcucaggcccugaacacccuggugaagcagcugagcagcaacuucggcgccaucagcucagugcugaaugacauccugagcaggcuggacaagguggaggccgaggugcagaucgaccggcugaucaccggccggcugcagagccugcagaccuacgugacccagcagcugauccgggccgccgagauccgggccagcgccaaccuggcagccaccaagaugagcgagugcgugcugggccagagcaagcggguggacuuuugcggcaagggcuaccaccugaugagcuucccccagagcgccccacacggcguggucuuccuccacgugacauacgugcccgcccaggagaagaacuucaccaccgcccccgccaucugccacgacggcaaggcucacuucccccgggagggaguguucgugagcaacggcacccacugguucgugacccagcggaacuucuacgagccccagauuaucaccaccgacaacaccuucgugagcggcaacugcgacguggugaucggcaucgugaacaacaccguguacgacccccugcagccugagcuggacagcuucaaggaggagcuggacaaguacuucaagaaccacaccagccccgacguggaucugggcgacaucagcggcaucaacgccagcguggugaacauccagaaggagaucgaccggcugaacgagguggccaagaaccugaacgagagccugaucgaccugcaggagcugggcaaguacgagcaguacaucaaguggcccugguacaucuggcugggcuucaucgccggccugaucgccaucgugauggugaccaucaugcugugcugcaugaccagcugcuguagcugccugaagggcugcugcagcugcggcagcugcugcaaguucgacgaggacgacagcgagccagugcugaagggcgugaagcugcacuacaccugauaauaggcuggagccucgguggccuagcuucuugccccuugggccuccccccagccccuccuccccuuccugcacccguacccccguggucuuugaauaaagucugagugggcggcaaaaaaaaaaaaaaaaaaaaaaaaaaaaaaaaaaaaaaaaaaaaaaaaaaaaaaaaaaaaaaaaaaaaaaaaaaaaaaaaaaaaaaaaaaaaaaaaaaaaucuag

SEQ ID NO: 26552 - RNA, 4100 nt, Artificial Sequence
  SARS-CoV-2/Wuhan/WIV05/2019__EPI_ISL_402128 spike protein mRNA gc (1-1273)(D614G_M1229I)
gggaaauaagagagaaaagaagaguaagaagaaauauaagaccccggcgccgccaccauguucguguuccuggugcugcugccccuggugagcagccagugcgugaaccugaccacccggacccagcugcccccugccuacaccaacagcuucacccggggcguguacuaccccgacaagguguuccggagcagcgugcugcacagcacccaggaccuguuccugcccuucuucagcaacgugaccugguuccacgccauccacgugagcggcaccaacggcaccaagcgguucgacaacccagugcugcccuucaacgacggcguguacuucgccagcaccgagaagucaaacaucauccggggcuggaucuucggcaccacccuggacagcaagacacagagccugcugaucgugaacaacgccaccaacguggugaucaaggugugcgaguuucaguucugcaacgaccccuuccugggcguguacuaccacaagaacaacaagagcuggauggagagcgaguuccgggucuacagcagcgcuaacaauugcaccuucgaguacgugagccagcccuuccugauggaccucgagggcaagcagggcaacuucaagaaccugcgggaguucguguucaagaacaucgauggcuacuucaagaucuacagcaagcacacccccaucaaccuggugcgggaccugccccagggauucagcgcccuggagccucugguggaccugcccaucggcaucaacaucaccagguuccagacccugcuggcccugcaccggagcuaccugacccccggcgacagcagcagcggcuggaccgccggcgccgccgcauacuacgugggcuaccugcagccacggaccuuccugcugaaguacaacgagaacggcaccaucaccgacgccguggacugcgcccuggacccccugagcgagaccaagugcacccuaaagagcuucaccguggagaagggcaucuaccagaccagcaacuuccgggugcagcccacugagagcaucgugcgguuccccaacauuaccaaccugugucccuucggcgagguguucaacgccacccgguucgccagcguguacgccuggaaccggaagcggaucagcaacugcguggccgacuacagcgugcuguacaacagcgccagcuucagcaccuucaagugcuacggcgugagcccuaccaagcugaacgaccugugcuucaccaacguguacgcugacagcuucgugauccggggcgacgaggugcggcagaucgcccccggccagaccggcaagaucgccgacuacaacuacaagcugcccgacgacuucaccggcugcgugaucgccuggaacagcaacaaccuggacagcaaggugggcggcaacuacaacuaccuguaccggcuguuccguaagagcaaccugaagccauucgagcgggacaucagcaccgagaucuaccaggccggcagcacccccugcaacgguguggagggcuuuaacugcuacuucccccugcagagcuacggcuuccagcccaccaacggcgugggcuaccagcccuaccgggugguggugcugagcuucgagcugcugcacgcccccgccaccgugugcggcccuaaaaagagcaccaaccuggugaagaacaagugcgugaacuucaauuucaacggccugaccggcaccggcgugcugaccgagagcaacaagaaguuccugcccuuccagcaguucggccgggauaucgccgacaccaccgacgcagugcgggacccccagacccuggagauccuggacaucaccccaugcagcuucggcggcgugagcgucaucacccccggcacaaacaccagcaaccagguggccgugcuguaccagggagugaacugcaccgaggugcccguggccauccacgccgaccagcugacccccaccuggcggguguacagcaccggcagcaacguguuccagacccgggccggcugccugaucggcgccgagcacgugaacaacuccuacgagugcgacauccccaucggcgcuggcaucugcgccagcuaccagacccagaccaacagcccccggcgggcccggagcguggccagccagagcaucaucgccuacaccaugagcuuaggcgccgagaacagcguggccuacagcaacaacagcaucgcgaucccuaccaacuucaccaucagcgugaccaccgagauacugcccgugagcaugaccaagaccagcguggacuguaccauguacaucugcggcgacagcaccgagugcagcaaccugcugcugcaguacggcagcuucugcacccagcugaaccgggcccugaccggcaucgccguggagcaggacaagaacacccaagagguguucgcccaggugaagcagaucuacaagacucccccaaucaaggacuucggcggcuucaacuucagccagauccugcccgaccccagcaagcccagcaagcggagcuucaucgaggaccugcuguucaacaaggugacccuggccgacgccggcuucaucaagcaguacggcgacugccugggggauaucgccgcucgggaccugaucugcgcccagaaguucaacggccugaccgugcugcccccucugcugaccgacgagaugaucgcccaguacaccagcgcccugcuugccggcaccaucaccagcggcuggaccuucggcgccggcgcagcccugcagauccccuucgccaugcagauggccuaccgguucaacggcaucggcgugacccagaacgugcuguacgagaaccagaagcugaucgccaaccaguucaacagcgccaucggcaagauccaggacagccugagcagcaccgccagcgcccugggcaagcugcaggacguggugaaccagaacgcucaggcccugaacacccuggugaagcagcugagcagcaacuucggcgccaucagcucagugcugaaugacauccugagcaggcuggacaagguggaggccgaggugcagaucgaccggcugaucaccggccggcugcagagccugcagaccuacgugacccagcagcugauccgggccgccgagauccgggccagcgccaaccuggcagccaccaagaugagcgagugcgugcugggccagagcaagcggguggacuuuugcggcaagggcuaccaccugaugagcuucccccagagcgccccacacggcgugguguuccuccacgucacauacgugcccgcccaggagaagaacuucaccaccgcccccgccauuugccacgacggcaaggcucacuucccccgggagggaguguucgugagcaacggcacccacugguucgugacccagcggaacuucuacgagccccagaucaucaccaccgacaacaccuucgugagcggcaacugcgacguggugaucggcaucgugaacaacaccguguacgacccccugcagccugagcuggacagcuucaaggaggagcuggacaaguacuucaagaaccacaccagccccgacguggaucugggcgacaucagcggcaucaacgccagcguggugaacauccagaaggagaucgaccggcugaacgagguggccaagaaccugaacgagagccugaucgaccugcaggagcugggcaaguacgagcaguacaucaaguggcccugguacaucuggcugggcuucaucgccggccugaucgccaucgugaucgugaccaucaugcugugcugcaugaccagcugcuguagcugccugaagggcugcugcagcugcggcagcugcugcaaguucgacgaggacgacagcgagccagugcugaagggcgugaagcugcacuacaccugauaauaggcuggagccucgguggccuagcuucuugccccuugggccuccccccagccccuccuccccuuccugcacccguacccccguggucuuugaauaaagucugagugggcggcaaaaaaaaaaaaaaaaaaaaaaaaaaaaaaaaaaaaaaaaaaaaaaaaaaaaaaaaaaaaaaaaaaaaaaaaaaaaaaaaaaaaaaaaaaaaaaaaaaaaucuag

SEQ ID NO: 26553 - RNA, 4094 nt, Artificial Sequence
  SARS-CoV-2/Wuhan/WIV05/2019__EPI_ISL_402128 spike protein mRNA gc (1-1273)(H69del_V70del_A222V_Y453F_S477N_D614G_I692V)
gggaaauaagagagaaaagaagaguaagaagaaauauaagaccccggcgccgccaccauguucguguuccuggugcugcugccccuggugagcagccagugcgugaaccugaccacccggacccagcugcccccugccuacaccaacagcuucacccggggcguguacuaccccgacaagguguuccggagcagcgugcugcacagcacccaggaccuguuccugcccuucuucagcaacgugaccugguuccacgccaucagcggcaccaacggcaccaagcgguucgacaacccagugcugcccuucaacgacggcguguacuucgccagcaccgagaagucaaacaucauccggggcuggaucuucggcaccacccuggacagcaagacacagagccugcugaucgugaacaacgccaccaacguggugaucaaggugugcgaguuucaguucugcaacgaccccuuccugggcguguacuaccacaagaacaacaagagcuggauggagagcgaguuccggguguacagcagcgcuaacaauugcaccuucgaguacgucagccagcccuuccugauggaccucgagggcaagcagggcaacuucaagaaccugcgggaguucguguucaagaacaucgauggcuacuucaagaucuacagcaagcacacccccaucaaccuggugcgggaccugccccagggauucagcgugcuggagccucugguggaccugcccaucggcaucaacaucaccagguuccagacccugcuggcccugcaccggagcuaccugacccccggcgacagcagcagcggcuggaccgccggcgccgccgccuacuacgugggcuaccugcagccacggaccuuccugcugaaguacaacgagaacggcaccaucaccgacgcaguggacugcgcccuggacccccugagcgagaccaagugcacccuaaagagcuucaccguggagaagggcaucuaccagaccagcaacuuccgggugcagcccacugagagcaucgugcgguuccccaacauuaccaaccugugucccuucggcgagguguucaacgccacccgguucgccagcguguacgccuggaaccggaagcggaucagcaacugcguggccgacuacagcgugcuguacaacagcgccagcuucagcaccuucaagugcuacggcgugagcccuaccaagcugaacgaccugugcuucaccaacguguacgccgacagcuucgugauccggggcgacgaggugcggcagaucgcucccggccagaccggcaagaucgccgacuacaacuacaagcugcccgacgacuucaccggcugcgugaucgccuggaacagcaacaaccuggacagcaaggugggcggcaacuacaacuaccuguuccggcuguuccguaagagcaaccugaagccauuugagcgggacaucagcaccgagaucuaccaggccggcaacacccccugcaacgguguggagggcuucaacugcuacuucccccugcagagcuacggcuuccagcccaccaacggcgugggcuaccagcccuaccgggugguggugcugagcuucgagcugcugcacgcccccgccaccgugugcggcccuaaaaagagcaccaaccuggugaagaacaagugcgugaauuucaacuucaacggccugaccggcaccggcgugcugaccgagagcaacaagaaguuccugcccuuccagcaguucggccgggauaucgccgacaccaccgacgccgugcgggacccccagacccuggagauccuggacaucaccccaugcagcuucggcggcgugagcgucaucacccccggcacaaacaccagcaaccagguggcagugcuguaccagggagugaacugcaccgaggugcccguggccauccacgccgaccagcugacccccaccuggcggguguacagcaccggcagcaacguguuccagacccgggccggcugccugaucggcgccgagcacgugaacaacagcuacgagugcgacauccccaucggcgccggcaucugcgcuuccuaccagacccagaccaacagcccccggcgggcccggagcguggccagccagagcgugaucgccuacaccaugagcuuaggcgccgagaacagcguggccuacagcaacaacagcaucgccaucccuaccaacuucaccaucagcgugaccaccgagauccugcccgugagcaugaccaagaccagcguggacuguaccauguacauaugcggcgacagcaccgagugcagcaaccugcugcugcaguacggcagcuucugcacccagcugaaccgggcgcugaccggcaucgccguggagcaggacaagaacacccaagagguguucgcccaggugaagcagaucuacaagacucccccaaucaaggacuucggcggcuucaacuucagccagauccugcccgaccccagcaagcccagcaagcggagcuucaucgaggaccugcuguucaacaaggugacccuggccgacgccggcuucaucaagcaguacggcgacugccugggggauaucgccgcccgggaccugaucugcgcucagaaguucaacggccugaccgugcugcccccucugcugaccgacgagaugaucgcccaguacaccagcgcccugcuugccggcaccaucaccagcggcuggaccuucggcgccggcgccgcacugcagauccccuucgccaugcagauggccuaccgguucaacggcaucggcgugacccagaacgugcuguacgagaaccagaagcugaucgccaaccaguucaacagcgccaucggcaagauccaggacagccugagcagcaccgccagcgcccugggcaagcugcaggacguggugaaccagaacgcccaggcucugaacacccuggugaagcagcugagcagcaauuuuggcgccaucagcagcgugcugaacgacauccugucaaggcuggacaagguggaggccgaggugcagaucgaccggcugaucaccggccggcugcagagccugcagaccuacgugacccagcagcugauccgggccgccgagauccgggccagcgccaaccuggccgcaaccaagaugagcgagugcgugcugggccagagcaagcggguggacuucugcggcaagggcuaccaccugaugagcuucccccagagcgccccacacggcguggucuuccuccacgugacauacgugcccgcccaggagaagaacuucaccaccgcccccgccaucugccacgacggcaaggcccacuucccccgggagggaguguucgugagcaacggcacccacugguucgugacccagcggaacuucuacgagccccagauuaucaccaccgacaacaccuucgugagcggcaacugcgacguggugaucggcaucgugaacaacaccguguacgacccccugcagccugagcuggacagcuucaaggaggagcuggacaaguacuucaagaaccacaccagccccgacguggaucugggcgacaucagcggcaucaacgcuagcguggugaacauccagaaggagaucgaccggcugaacgagguggccaagaaccugaacgagagccugaucgaccugcaggagcugggcaaguacgagcaguacaucaaguggcccugguacaucuggcugggcuucaucgccggccugaucgccaucgugauggugaccaucaugcugugcugcaugaccagcugcuguagcugccugaagggcugcugcagcugcggcagcugcugcaaguucgacgaggacgacagcgagccagugcugaagggcgugaagcugcacuacaccugauaauaggcuggagccucgguggccuagcuucuugccccuugggccuccccccagccccuccuccccuuccugcacccguacccccguggucuuugaauaaagucugagugggcggcaaaaaaaaaaaaaaaaaaaaaaaaaaaaaaaaaaaaaaaaaaaaaaaaaaaaaaaaaaaaaaaaaaaaaaaaaaaaaaaaaaaaaaaaaaaaaaaaaaaaucuag

SEQ ID NO: 26554 - RNA, 4094 nt, Artificial Sequence
  SARS-CoV-2/Wuhan/WIV05/2019__EPI_ISL_402128 spike protein mRNA gc (1-1273)(H69del_V70del_Y453F_D614G_I692V_M1229I)
gggaaauaagagagaaaagaagaguaagaagaaauauaagaccccggcgccgccaccauguucguguuccuggugcugcugccccuggugagcagccagugcgugaaccugaccacccggacccagcugcccccugccuacaccaacagcuucacccggggcguguacuaccccgacaagguguuccggagcagcgugcugcacagcacccaggaccuguuccugcccuucuucagcaacgugaccugguuccacgccaucagcggcaccaacggcaccaagcgguucgacaacccagugcugcccuucaacgacggcguguacuucgccagcaccgagaagucaaacaucauccggggcuggaucuucggcaccacccuggacagcaagacacagagccugcugaucgugaacaacgccaccaacguggugaucaaggugugcgaguuucaguucugcaacgaccccuuccugggcguguacuaccacaagaacaacaagagcuggauggagagcgaguuccggguguacagcagcgcuaacaauugcaccuucgaguacgucagccagcccuuccugauggaccucgagggcaagcagggcaacuucaagaaccugcgggaguucguguucaagaacaucgauggcuacuucaagaucuacagcaagcacacccccaucaaccuggugcgggaccugccccagggauucagcgcccuggagccucugguggaccugcccaucggcaucaacaucaccagguuccagacccugcuggcccugcaccggagcuaccugacccccggcgacagcagcagcggcuggaccgccggcgccgccgcauacuacgugggcuaccugcagccacggaccuuccugcugaaguacaacgagaacggcaccaucaccgacgccguggacugcgcccuggacccccugagcgagaccaagugcacccuaaagagcuucaccguggagaagggcaucuaccagaccagcaacuuccgggugcagcccacugagagcaucgugcgguuccccaacauuaccaaccugugucccuucggcgagguguucaacgccacccgguucgccagcguguacgccuggaaccggaagcggaucagcaacugcguggccgacuacagcgugcuguacaacagcgccagcuucagcaccuucaagugcuacggcgugagcccuaccaagcugaacgaccugugcuucaccaacguguacgcugacagcuucgugauccggggcgacgaggugcggcagaucgcccccggccagaccggcaagaucgccgacuacaacuacaagcugcccgacgacuucaccggcugcgugaucgccuggaacagcaacaaccuggacagcaaggugggcggcaacuacaacuaccuguuccggcuguuccguaagagcaaccugaagccauuugagcgggacaucagcaccgagaucuaccaggccggcagcacccccugcaacgguguggagggcuucaacugcuacuucccccugcagagcuacggcuuccagcccaccaacggcgugggcuaccagcccuaccgggugguggugcugagcuucgagcugcugcacgcccccgccaccgugugcggcccuaaaaagagcaccaaccuggugaagaacaagugcgugaacuucaauuucaacggccugaccggcaccggcgugcugaccgagagcaacaagaaguuccugcccuuccagcaguucggccgggauaucgccgacaccaccgacgcagugcgggacccccagacccuggagauccuggacaucaccccaugcagcuucggcggcgugagcgugaucacccccggcacaaacaccagcaaccaggucgccgugcuguaccagggagugaacugcaccgaggugcccguggccauccacgccgaccagcugacccccaccuggcggguguacagcaccggcagcaacguguuccagacccgggccggcugccugaucggcgccgagcacgugaacaacuccuacgagugcgacauccccaucggcgcuggcaucugcgccagcuaccagacccagaccaacagcccccggcgggcccggagcguggccagccagagcgugaucgccuacaccaugagcuuaggcgccgagaacagcguggccuacagcaacaacagcaucgcgaucccuaccaacuucaccaucagcgugaccaccgagauccugcccgugagcaugaccaagaccagcguggacuguaccauguacauaugcggcgacagcaccgagugcagcaaccugcugcugcaguacggcagcuucugcacccagcugaaccgggcccugaccggcaucgccguggagcaggacaagaacacccaagagguguucgcccaggugaagcagaucuacaagacucccccaaucaaggacuucggcggcuucaacuucagccagauccugcccgaccccagcaagcccagcaagcggagcuucaucgaggaccugcuguucaacaaggugacccuggccgacgccggcuucaucaagcaguacggcgacugccugggggauaucgccgcucgggaccugaucugcgcccagaaguucaacggccugaccgugcugcccccucugcugaccgacgagaugaucgcccaguacaccagcgcccugcuugccggcaccaucaccagcggcuggaccuucggcgccggcgcagcccugcagauccccuucgccaugcagauggccuaccgguucaacggcaucggcgugacccagaacgugcuguacgagaaccagaagcugaucgccaaccaguucaacagcgccaucggcaagauccaggacagccugagcagcaccgccagcgcccugggcaagcugcaggacguggugaaccagaacgcucaggcccugaacacccuggugaagcagcugagcagcaacuuuggcgccaucagcucagugcugaaugacauccugagcaggcuggacaagguggaggccgaggugcagaucgaccggcugaucaccggccggcugcagagccugcagaccuacgugacccagcagcugauccgggccgccgagauccgggccagcgccaaccuggcagccaccaagaugagcgagugcgugcugggccagagcaagcggguggacuucugcggcaagggcuaccaccugaugagcuucccccagagcgccccacacggcgugguguuccuccacgucacauacgugcccgcccaggagaagaacuucaccaccgcccccgccaucugccacgacggcaaggcucacuucccccgggagggaguguucgugagcaacggcacccacugguucgugacccagcggaacuucuacgagccccagauuaucaccaccgacaacaccuucgugagcggcaacugcgacguggugaucggcaucgugaacaacaccguguacgacccccugcagccugagcuggacagcuucaaggaggagcuggacaaguacuucaagaaccacaccagccccgacguggaucugggcgacaucagcggcaucaacgccagcguggugaacauccagaaggagaucgaccggcugaacgagguggccaagaaccugaacgagagccugaucgaccugcaggagcugggcaaguacgagcaguacaucaaguggcccugguacaucuggcugggcuucaucgccggccugaucgccaucgugaucgugaccaucaugcugugcugcaugaccagcugcuguagcugccugaagggcugcugcagcugcggcagcugcugcaaguucgacgaggacgacagcgagccagugcugaagggcgugaagcugcacuacaccugauaauaggcuggagccucgguggccuagcuucuugccccuugggccuccccccagccccuccuccccuuccugcacccguacccccguggucuuugaauaaagucugagugggcggcaaaaaaaaaaaaaaaaaaaaaaaaaaaaaaaaaaaaaaaaaaaaaaaaaaaaaaaaaaaaaaaaaaaaaaaaaaaaaaaaaaaaaaaaaaaaaaaaaaaaucuag

SEQ ID NO: 26555 - RNA, 4091 nt, Artificial Sequence
  SARS-CoV-2/Wuhan/WIV05/2019__EPI_ISL_402128 spike protein mRNA gc (1-1273)(H69del_V70del_Y144del_N501Y_A570D_D614G_P681H_T716I_S982 A_D1118H)
gggaaauaagagagaaaagaagaguaagaagaaauauaagaccccggcgccgccaccauguucguguuccuggugcugcugccccuggugagcagccagugcgugaaccugaccacccggacccagcugcccccugccuacaccaacagcuucacccggggcguguacuaccccgacaagguguuccggagcagcgugcugcacagcacccaggaccuguuccugcccuucuucagcaacgugaccugguuccacgccaucagcggcaccaacggcaccaagcgguucgacaacccagugcugcccuucaacgacggcguguacuucgccagcaccgagaagucaaacaucauccggggcuggaucuucggcaccacccuggacagcaagacacagagccugcugaucgugaacaacgccaccaacguggugaucaaggugugcgaguuucaguucugcaacgaccccuuccugggcguguaccacaagaacaacaagagcuggauggagagcgaguuccggguguacagcagcgcuaacaauugcaccuucgaguacgucagccagcccuuccugauggaccucgagggcaagcagggcaacuucaagaaccugcgggaguucguguucaagaacaucgauggcuacuucaagaucuacagcaagcacacccccaucaaccuggugcgggaccugccccagggauucagcgcccuggagccucugguggaccugcccaucggcaucaacaucaccagguuccagacccugcuggcccugcaccggagcuaccugacccccggcgacagcagcagcggcuggaccgccggcgccgccgcauacuacgugggcuaccugcagccacggaccuuccugcugaaguacaacgagaacggcaccaucaccgacgccguggacugcgcccuggacccccugagcgagaccaagugcacccuaaagagcuucaccguggagaagggcaucuaccagaccagcaacuuccgggugcagcccacugagagcaucgugcgguuccccaacauuaccaaccugugucccuucggcgagguguucaacgccacccgguucgccagcguguacgccuggaaccggaagcggaucagcaacugcguggccgacuacagcgugcuguacaacagcgccagcuucagcaccuucaagugcuacggcgugagcccuaccaagcugaacgaccugugcuucaccaacguguacgcugacagcuucgugauccggggcgacgaggugcggcagaucgcccccggccagaccggcaagaucgccgacuacaacuacaagcugcccgacgacuucaccggcugcgugaucgccuggaacagcaacaaccuggacagcaaggugggcggcaacuacaacuaccuguaccggcuguuccguaagagcaaccugaagccauucgagcgggacaucagcaccgagaucuaccaggccggcagcacccccugcaacgguguggagggcuuuaacugcuacuucccccugcagagcuacggcuuccagcccaccuacggcgugggcuaccagcccuaccgggugguggugcugagcuucgagcugcugcacgcccccgccaccgugugcggcccuaaaaagagcaccaaccuggugaagaacaagugcgugaacuucaacuucaauggccugaccggcaccggcgugcugaccgagagcaacaagaaguuccugcccuuccagcaguucggccgggauaucgacgacaccaccgacgccgugcgggacccccagacccuggagauccuggacaucaccccaugcagcuucggcggcgugagcgugaucacccccggcacaaacaccagcaaccaggucgcagugcuguaccagggagugaacugcaccgaggugcccguggccauccacgccgaccagcugacccccaccuggcggguguacagcaccggcagcaacguguuccagacccgggccggcugccugaucggcgccgagcacgugaacaacuccuacgagugcgacauccccaucggcgccggcaucugcgcuagcuaccagacccagaccaacagccaccggcgggcccggagcguggccagccagagcaucaucgccuacaccaugagcuuaggcgccgagaacagcguggccuacagcaacaacagcaucgccauccccaucaacuucaccauaagcgugaccaccgagauccugccugugagcaugaccaagaccagcguggacuguaccauguacaucugcggcgacagcaccgagugcagcaaccugcugcugcaguacggcagcuucugcacccagcugaaccgggcgcugaccggcaucgccguggagcaggacaagaacacccaagagguguucgcccaggugaagcagaucuacaagaccccacccaucaaggacuucggcggcuucaacuucagccagauccugcccgaccccagcaagcccagcaagcggagcuucaucgaggaccugcuguucaacaaggugacucuggccgacgccggcuucaucaagcaguacggcgauugccugggggacaucgccgcccgggaccugaucugcgcucagaaguucaacggccugaccgugcugccuccccugcugaccgacgagaugaucgcccaguacaccagcgcccugcuugccggcaccaucaccagcggcuggaccuucggcgccggcgccgcacugcagauccccuucgccaugcagauggccuaccgguucaacggcaucggcgugacccagaacgugcuguacgagaaccagaagcugaucgccaaccaguucaacagcgccaucggcaagauccaggacagccugagcagcaccgccagcgcccugggcaagcugcaggacguggugaaccagaacgcccaggcucugaacacccuggugaagcagcugagcagcaacuucggcgccaucagcucagugcugaacgacauccuggccaggcuggacaagguggaggccgaggugcagaucgaccggcugaucaccggccggcugcagagccugcagaccuacgugacccagcagcugauccgggccgccgagauucgggccagcgccaaucuggcagccaccaagaugagcgagugcgugcugggccagagcaagcggguggacuuuugcggcaagggcuaccaccugaugagcuucccccagagcgcuccccacggcgugguguuccuccacgugaccuacgucccagcccaggagaagaacuucacaaccgcccccgccaucugccacgacggcaaggcccacuucccccgggagggaguguucgugagcaacggcacccacugguucgugacccagcggaacuucuacgagccccagaucaucaccacccacaacaccuucgugagcggcaacugcgacguggugaucggcaucgugaacaacaccguguacgacccccugcagcccgagcuggacagcuucaaggaggagcuggacaaguacuucaagaaccacaccagcccugacguggaucugggcgacaucagcggcaucaacgccagcguggugaacauccagaaggagaucgaccggcugaacgagguggccaagaaccugaacgagagccugaucgaccugcaggagcugggcaaguacgagcaguacaucaaguggcccugguacaucuggcugggcuucaucgccggccugaucgccaucgugauggugaccaucaugcugugcugcaugaccagcugcuguagcugccugaagggcugcugcagcugcggcagcugcugcaaguucgacgaggacgacagcgagcccgugcugaagggcgugaagcugcacuacaccugauaauaggcuggagccucgguggccuagcuucuugccccuugggccuccccccagccccuccuccccuuccugcacccguacccccguggucuuugaauaaagucugagugggcggcaaaaaaaaaaaaaaaaaaaaaaaaaaaaaaaaaaaaaaaaaaaaaaaaaaaaaaaaaaaaaaaaaaaaaaaaaaaaaaaaaaaaaaaaaaaaaaaaaaaaucuag

SEQ ID NO: 26556 - RNA, 4100 nt, Artificial Sequence
  SARS-CoV-2/Wuhan/WIV05/2019__EPI_ISL_402128 spike protein mRNA gc (1-1273)(K417N_E484K_N501Y_D614G)
gggaaauaagagagaaaagaagaguaagaagaaauauaagaccccggcgccgccaccauguucguguuccuggugcugcugccccuggugagcagccagugcgugaaccugaccacccggacccagcugcccccugccuacaccaacagcuucacccggggcguguacuaccccgacaagguguuccggagcagcgugcugcacagcacccaggaccuguuccugcccuucuucagcaacgugaccugguuccacgccauccacgugagcggcaccaacggcaccaagcgguucgacaacccagugcugcccuucaacgacggcguguacuucgccagcaccgagaagucaaacaucauccggggcuggaucuucggcaccacccuggacagcaagacacagagccugcugaucgugaacaacgccaccaacguggugaucaaggugugcgaguuucaguucugcaacgaccccuuccugggcguguacuaccacaagaacaacaagagcuggauggagagcgaguuccgggucuacagcagcgcuaacaauugcaccuucgaguacgugagccagcccuuccugauggaccucgagggcaagcagggcaacuucaagaaccugcgggaguucguguucaagaacaucgauggcuacuucaagaucuacagcaagcacacccccaucaaccuggugcgggaccugccccagggauucagcgcccuggagccucugguggaccugcccaucggcaucaacaucaccagguuccagacccugcuggcccugcaccggagcuaccugacccccggcgacagcagcagcggcuggaccgccggcgccgccgcauacuacgugggcuaccugcagccacggaccuuccugcugaaguacaacgagaacggcaccaucaccgacgccguggacugcgcccuggacccccugagcgagaccaagugcacccuaaagagcuucaccguggagaagggcaucuaccagaccagcaacuuccgggugcagcccacugagagcaucgugcgguuccccaacauuaccaaccugugucccuucggcgagguguucaacgccacccgguucgccagcguguacgccuggaaccggaagcggaucagcaacugcguggccgacuacagcgugcuguacaacagcgccagcuucagcaccuucaagugcuacggcgugagcccuaccaagcugaacgaccugugcuucaccaacguguacgcugacagcuucgugauccggggcgacgaggugcggcagaucgcccccggccagaccggcaacaucgccgacuacaacuacaagcugcccgacgacuucaccggcugcgugaucgccuggaacagcaacaaccuggacagcaaggugggcggcaacuacaacuaccuguaccggcuguuccguaagagcaaccugaagccauucgagcgggacaucagcaccgagaucuaccaggccggcagcacccccugcaacggugugaagggcuuuaacugcuacuucccccugcagagcuacggcuuccagcccaccuacggcgugggcuaccagcccuaccgggugguggugcugagcuucgagcugcugcacgcccccgccaccgugugcggcccuaaaaagagcaccaaccuggugaagaacaagugcgugaacuucaauuucaacggccugaccggcaccggcgugcugaccgagagcaacaagaaguuccugcccuuccagcaguucggccgggauaucgccgacaccaccgacgcagugcgggacccccagacccuggagauccuggacaucaccccaugcagcuucggcggcgugagcgucaucacccccggcacaaacaccagcaaccagguggccgugcuguaccagggagugaacugcaccgaggugcccguggccauccacgccgaccagcugacccccaccuggcggguguacagcaccggcagcaacguguuccagacccgggccggcugccugaucggcgccgagcacgugaacaacuccuacgagugcgacauccccaucggcgcuggcaucugcgccagcuaccagacccagaccaacagcccccggcgggcccggagcguggccagccagagcaucaucgccuacaccaugagcuuaggcgccgagaacagcguggccuacagcaacaacagcaucgcgaucccuaccaacuucaccaucagcgugaccaccgagauacugcccgugagcaugaccaagaccagcguggacuguaccauguacaucugcggcgacagcaccgagugcagcaaccugcugcugcaguacggcagcuucugcacccagcugaaccgggcccugaccggcaucgccguggagcaggacaagaacacccaagagguguucgcccaggugaagcagaucuacaagacucccccaaucaaggacuucggcggcuucaacuucagccagauccugcccgaccccagcaagcccagcaagcggagcuucaucgaggaccugcuguucaacaaggugacccuggccgacgccggcuucaucaagcaguacggcgacugccugggggauaucgccgcucgggaccugaucugcgcccagaaguucaacggccugaccgugcugcccccucugcugaccgacgagaugaucgcccaguacaccagcgcccugcuugccggcaccaucaccagcggcuggaccuucggcgccggcgcagcccugcagauccccuucgccaugcagauggccuaccgguucaacggcaucggcgugacccagaacgugcuguacgagaaccagaagcugaucgccaaccaguucaacagcgccaucggcaagauccaggacagccugagcagcaccgccagcgcccugggcaagcugcaggacguggugaaccagaacgcucaggcccugaacacccuggugaagcagcugagcagcaacuucggcgccaucagcucagugcugaaugacauccugagcaggcuggacaagguggaggccgaggugcagaucgaccggcugaucaccggccggcugcagagccugcagaccuacgugacccagcagcugauccgggccgccgagauccgggccagcgccaaccuggcagccaccaagaugagcgagugcgugcugggccagagcaagcggguggacuuuugcggcaagggcuaccaccugaugagcuucccccagagcgccccacacggcgugguguuccuccacgucacauacgugcccgcccaggagaagaacuucaccaccgcccccgccauuugccacgacggcaaggcucacuucccccgggagggaguguucgugagcaacggcacccacugguucgugacccagcggaacuucuacgagccccagaucaucaccaccgacaacaccuucgugagcggcaacugcgacguggugaucggcaucgugaacaacaccguguacgacccccugcagccugagcuggacagcuucaaggaggagcuggacaaguacuucaagaaccacaccagccccgacguggaucugggcgacaucagcggcaucaacgccagcguggugaacauccagaaggagaucgaccggcugaacgagguggccaagaaccugaacgagagccugaucgaccugcaggagcugggcaaguacgagcaguacaucaaguggcccugguacaucuggcugggcuucaucgccggccugaucgccaucgugauggugaccaucaugcugugcugcaugaccagcugcuguagcugccugaagggcugcugcagcugcggcagcugcugcaaguucgacgaggacgacagcgagccagugcugaagggcgugaagcugcacuacaccugauaauaggcuggagccucgguggccuagcuucuugccccuugggccuccccccagccccuccuccccuuccugcacccguacccccguggucuuugaauaaagucugagugggcggcaaaaaaaaaaaaaaaaaaaaaaaaaaaaaaaaaaaaaaaaaaaaaaaaaaaaaaaaaaaaaaaaaaaaaaaaaaaaaaaaaaaaaaaaaaaaaaaaaaaaucuag

SEQ ID NO: 26557 - RNA, 4091 nt, Artificial Sequence
  SARS-CoV-2/Wuhan/WIV05/2019__EPI_ISL_402128 spike protein mRNA gc (1-1273)(L18F_D80A_D215G_L242del_A243del_L244del_R246I_K417N_E484 K_N501Y_D614G_A701V)
gggaaauaagagagaaaagaagaguaagaagaaauauaagaccccggcgccgccaccauguucguguuccuggugcugcugccccuggugagcagccagugcgugaacuucaccacccggacccagcugcccccugccuacaccaacagcuucacccggggcguguacuaccccgacaagguguuccggagcagcgugcugcacagcacccaggaccuguuccugcccuucuucagcaacgugaccugguuccacgccauccacgugagcggcaccaacggcaccaagcgguucgccaacccagugcugcccuucaacgacggcguguacuucgccagcaccgagaagucaaacaucauccggggcuggaucuuuggcaccacccuggacagcaagacacagagccugcugaucgugaacaacgcuaccaacguggugaucaaggugugcgaguuccaguucugcaacgaccccuuccugggcguguacuaccacaagaacaacaagagcuggauggagagcgaguuccgggucuacagcagcgccaacaauugcaccuucgaguacgugagccagcccuuccugauggaccuggagggcaagcagggcaacuucaagaaccuccgggaguucguguucaagaacaucgacggcuacuucaagaucuacagcaagcacacccccaucaaccuggugcggggacugccccagggcuucagcgcccuggagccucugguggaucugcccaucggcaucaacaucaccagguuccagacccugcacaucagcuaccugacccccggcgacagcagcagcggcuggaccgccggcgccgccgcauacuacgugggcuaccugcagccacggaccuuccugcugaaguacaacgagaacggcaccaucaccgacgccguggacugcgcccuggacccccugagcgagaccaagugcacccuuaagagcuucaccguggagaagggcaucuaccagaccagcaacuuccgggugcagcccacugagagcauugugcgguuccccaacaucaccaaccugugucccuucggcgagguguucaacgccacccgguucgccagcguguacgccuggaaccggaagcggaucagcaacugcguggccgacuacagcgugcuguacaacagcgccagcuucagcaccuucaagugcuacggcgugagcccuaccaagcugaacgaccugugcuucaccaacguguacgcugacagcuucgugauccggggcgacgaggugcggcagaucgcccccggccagaccggcaacaucgccgacuacaacuacaagcugcccgacgacuucaccggcugcgugaucgccuggaacagcaacaaccuggacagcaaggugggcggcaacuacaacuaccuguaccggcuauuccguaagagcaaccugaagccauuugagcgggacaucagcaccgagaucuaccaggccgguagcacccccugcaacggcgugaagggcuucaacugcuacuucccccugcagagcuacggcuuccagcccaccuacggcgugggcuaccagcccuaccgggugguggugcugagcuucgagcugcugcacgcccccgccaccgugugcggcccuaaaaagagcaccaaccuggugaagaacaagugcgugaacuucaauuucaacggccugaccggcaccggcgugcugaccgagagcaacaagaaguuccugcccuuccagcaguucggccgggacaucgccgacaccaccgaugcagugcgggacccccagacccuggagauccuggacaucaccccaugcagcuucggcggcgugagcgucaucacccccggaacaaacaccagcaaccagguggccgugcuguaccagggcgugaacugcaccgaggugcccguggccauccacgccgaccagcugacccccaccuggcggguguacagcaccggcagcaacguguuccagacccgggccggcugccugaucggcgccgagcacgugaacaacuccuacgagugcgacauccccaucggcgcuggcaucugcgccagcuaccagacccagaccaacagcccccggcgggcccggagcguggccagccagagcaucaucgccuacaccaugagccugggcguggagaacagcguggccuacagcaacaacagcaucgccaucccuaccaacuucaccauaagcgugaccaccgagauccugcccgugagcaugaccaagaccagcguggacuguaccauguacaucugcggcgacagcaccgagugcagcaaccuguuacugcaguacggcagcuucugcacccagcugaaccgggcgcugaccggcaucgccguggagcaggacaagaacacccaagagguguucgcccaggugaagcagaucuacaagacucccccaaucaaggacuucggcggcuucaacuucagccagauccugcccgaccccagcaagcccagcaagcggagcuucaucgaggaccugcuguucaacaaggugacccuggccgacgccggcuucaucaagcaguacggggacugccugggcgacaucgccgcccgggaccugaucugcgcucagaaguucaacggccugaccgugcugcccccucugcugaccgaugagaugaucgcccaguacaccagcgcccugcuggccggcaccaucaccagcggcuggaccuucggcgccggcgccgcacugcagauccccuucgccaugcagauggccuaccgguucaacggcaucggcgugacccagaacgugcuguacgagaaccagaagcugaucgccaaccaguucaacagcgccaucggcaagauccaggacagccugagcagcaccgccagcgcccugggcaagcugcaggacguggugaaccagaacgcccaggcucugaacacccuggugaagcagcugagcagcaacuuuggcgccaucagcucagugcugaaugacauccugagccggcuggacaagguggaggccgaggugcagaucgacaggcugaucaccggccggcugcagagccugcagaccuacgugacccagcagcugauccgggccgccgagauucgggccagcgccaaccuggccgcaaccaagaugagcgagugcgugcugggccagagcaagcggguggacuucugcggcaagggcuaccaccugaugagcuucccccagagcgccccacacggcguggucuuccugcacgugacauacgugcccgcccaggagaagaacuucaccaccgcccccgccaucugccacgacggaaaggcccacuucccccgggagggcguguucgugagcaacggcacccacugguucgugacccagcggaacuucuacgagccccagaucaucaccaccgacaacaccuucgugagcggcaacugcgacguggugaucggcaucgugaacaacaccguguacgacccccugcagccugagcuggacagcuucaaggaggagcucgacaaguacuucaagaaccacaccagccccgacguggaccugggcgacaucagcggcaucaacgcuagcguggugaacauccagaaggagaucgaucggcugaacgagguggccaagaaccugaacgagagccugaucgaccugcaggagcugggcaaguacgagcaguacaucaaguggcccugguacaucuggcugggcuucaucgccggccugaucgccaucgugauggugaccaucaugcugugcugcaugaccagcugcuguagcugccugaagggcugcugcagcugcggcagcugcugcaaguucgacgaggacgacagcgagccagugcugaagggcgugaagcugcacuacaccugauaauaggcuggagccucgguggccuagcuucuugccccuugggccuccccccagccccuccuccccuuccugcacccguacccccguggucuuugaauaaagucugagugggcggcaaaaaaaaaaaaaaaaaaaaaaaaaaaaaaaaaaaaaaaaaaaaaaaaaaaaaaaaaaaaaaaaaaaaaaaaaaaaaaaaaaaaaaaaaaaaaaaaaaaaucuag

SEQ ID NO: 26558 - RNA, 4100 nt, Artificial Sequence
  SARS-CoV-2/Wuhan/WIV05/2019__EPI_ISL_402128 spike protein mRNA gc (1-1273)(E484K_D614G)
gggaaauaagagagaaaagaagaguaagaagaaauauaagaccccggcgccgccaccauguucguguuccuggugcugcugccccuggugagcagccagugcgugaaccugaccacccggacccagcugcccccugccuacaccaacagcuucacccggggcguguacuaccccgacaagguguuccggagcagcgugcugcacagcacccaggaccuguuccugcccuucuucagcaacgugaccugguuccacgccauccacgugagcggcaccaacggcaccaagcgguucgacaacccagugcugcccuucaacgacggcguguacuucgccagcaccgagaagucaaacaucauccggggcuggaucuucggcaccacccuggacagcaagacacagagccugcugaucgugaacaacgccaccaacguggugaucaaggugugcgaguuucaguucugcaacgaccccuuccugggcguguacuaccacaagaacaacaagagcuggauggagagcgaguuccgggucuacagcagcgcuaacaauugcaccuucgaguacgugagccagcccuuccugauggaccucgagggcaagcagggcaacuucaagaaccugcgggaguucguguucaagaacaucgauggcuacuucaagaucuacagcaagcacacccccaucaaccuggugcgggaccugccccagggauucagcgcccuggagccucugguggaccugcccaucggcaucaacaucaccagguuccagacccugcuggcccugcaccggagcuaccugacccccggcgacagcagcagcggcuggaccgccggcgccgccgcauacuacgugggcuaccugcagccacggaccuuccugcugaaguacaacgagaacggcaccaucaccgacgccguggacugcgcccuggacccccugagcgagaccaagugcacccuaaagagcuucaccguggagaagggcaucuaccagaccagcaacuuccgggugcagcccacugagagcaucgugcgguuccccaacauuaccaaccugugucccuucggcgagguguucaacgccacccgguucgccagcguguacgccuggaaccggaagcggaucagcaacugcguggccgacuacagcgugcuguacaacagcgccagcuucagcaccuucaagugcuacggcgugagcccuaccaagcugaacgaccugugcuucaccaacguguacgcugacagcuucgugauccggggcgacgaggugcggcagaucgcccccggccagaccggcaagaucgccgacuacaacuacaagcugcccgacgacuucaccggcugcgugaucgccuggaacagcaacaaccuggacagcaaggugggcggcaacuacaacuaccuguaccggcuguuccguaagagcaaccugaagccauucgagcgggacaucagcaccgagaucuaccaggccggcagcacccccugcaacggugugaagggcuuuaacugcuacuucccccugcagagcuacggcuuccagcccaccaacggcgugggcuaccagcccuaccgggugguggugcugagcuucgagcugcugcacgcccccgccaccgugugcggcccuaaaaagagcaccaaccuggugaagaacaagugcgugaacuucaauuucaacggccugaccggcaccggcgugcugaccgagagcaacaagaaguuccugcccuuccagcaguucggccgggauaucgccgacaccaccgacgcagugcgggacccccagacccuggagauccuggacaucaccccaugcagcuucggcggcgugagcgucaucacccccggcacaaacaccagcaaccagguggccgugcuguaccagggagugaacugcaccgaggugcccguggccauccacgccgaccagcugacccccaccuggcggguguacagcaccggcagcaacguguuccagacccgggccggcugccugaucggcgccgagcacgugaacaacuccuacgagugcgacauccccaucggcgcuggcaucugcgccagcuaccagacccagaccaacagcccccggcgggcccggagcguggccagccagagcaucaucgccuacaccaugagcuuaggcgccgagaacagcguggccuacagcaacaacagcaucgcgaucccuaccaacuucaccaucagcgugaccaccgagauacugcccgugagcaugaccaagaccagcguggacuguaccauguacaucugcggcgacagcaccgagugcagcaaccugcugcugcaguacggcagcuucugcacccagcugaaccgggcccugaccggcaucgccguggagcaggacaagaacacccaagagguguucgcccaggugaagcagaucuacaagacucccccaaucaaggacuucggcggcuucaacuucagccagauccugcccgaccccagcaagcccagcaagcggagcuucaucgaggaccugcuguucaacaaggugacccuggccgacgccggcuucaucaagcaguacggcgacugccugggggauaucgccgcucgggaccugaucugcgcccagaaguucaacggccugaccgugcugcccccucugcugaccgacgagaugaucgcccaguacaccagcgcccugcuugccggcaccaucaccagcggcuggaccuucggcgccggcgcagcccugcagauccccuucgccaugcagauggccuaccgguucaacggcaucggcgugacccagaacgugcuguacgagaaccagaagcugaucgccaaccaguucaacagcgccaucggcaagauccaggacagccugagcagcaccgccagcgcccugggcaagcugcaggacguggugaaccagaacgcucaggcccugaacacccuggugaagcagcugagcagcaacuucggcgccaucagcucagugcugaaugacauccugagcaggcuggacaagguggaggccgaggugcagaucgaccggcugaucaccggccggcugcagagccugcagaccuacgugacccagcagcugauccgggccgccgagauccgggccagcgccaaccuggcagccaccaagaugagcgagugcgugcugggccagagcaagcggguggacuuuugcggcaagggcuaccaccugaugagcuucccccagagcgccccacacggcgugguguuccuccacgucacauacgugcccgcccaggagaagaacuucaccaccgcccccgccauuugccacgacggcaaggcucacuucccccgggagggaguguucgugagcaacggcacccacugguucgugacccagcggaacuucuacgagccccagaucaucaccaccgacaacaccuucgugagcggcaacugcgacguggugaucggcaucgugaacaacaccguguacgacccccugcagccugagcuggacagcuucaaggaggagcuggacaaguacuucaagaaccacaccagccccgacguggaucugggcgacaucagcggcaucaacgccagcguggugaacauccagaaggagaucgaccggcugaacgagguggccaagaaccugaacgagagccugaucgaccugcaggagcugggcaaguacgagcaguacaucaaguggcccugguacaucuggcugggcuucaucgccggccugaucgccaucgugauggugaccaucaugcugugcugcaugaccagcugcuguagcugccugaagggcugcugcagcugcggcagcugcugcaaguucgacgaggacgacagcgagccagugcugaagggcgugaagcugcacuacaccugauaauaggcuggagccucgguggccuagcuucuugccccuugggccuccccccagccccuccuccccuuccugcacccguacccccguggucuuugaauaaagucugagugggcggcaaaaaaaaaaaaaaaaaaaaaaaaaaaaaaaaaaaaaaaaaaaaaaaaaaaaaaaaaaaaaaaaaaaaaaaaaaaaaaaaaaaaaaaaaaaaaaaaaaaaucuag

SEQ ID NO: 26559 - RNA, 4100 nt, Artificial Sequence
  SARS-CoV-2/Wuhan/WIV05/2019__EPI_ISL_402128 spike protein mRNA gc (1-1273)(L18F_T20N_P26S_D138Y_R190S_K417T_E484K_N501Y_D614G_H655Y _T1027I)
gggaaauaagagagaaaagaagaguaagaagaaauauaagaccccggcgccgccaccauguucguguuccuggugcugcugccccuggugagcagccagugcgugaacuucaccaaccggacccagcugcccagcgccuacaccaacagcuucacccggggcguguacuacccugacaagguguuccggagcagcgugcugcacagcacccaggaccuguuccugcccuucuucagcaacgugaccugguuccacgccauccacgugagcggcaccaacggcaccaagcgguucgacaaccccgugcugccauucaacgacggcguguacuucgccagcaccgagaagucaaacaucauccggggcuggaucuuuggcaccacccuggacagcaagacccagagccugcugaucgugaacaacgccacaaacguggugaucaaggugugcgaguuccaguucugcaacuaccccuuccugggcguguacuaccacaagaacaacaagagcuggauggagagcgaguuccgggucuacagcagcgcuaauaacugcaccuucgaguacgugagccagcccuuccugauggaccuggagggcaagcagggcaacuucaagaaccucagcgaguucguguucaagaacaucgacggcuacuucaagaucuacagcaagcacacccccaucaaccuggugcgggaucugccccagggauucagcgcccuggagccccugguggaccugccuaucggcaucaacaucacccgguuccagacccugcuggcccugcacaggagcuaccugacccccggcgacagcagcagcggcuggaccgccggcgccgccgcauacuacgugggcuaccugcagccccggaccuuccugcugaaguacaacgagaacggcaccaucaccgacgccguggacugcgcccuggacccacugagcgagaccaagugcacccuaaagagcuucaccguggagaagggcaucuaccagaccagcaacuuccgggugcagcccaccgagagcaucgugcgguuccccaacauuacuaaccugugucccuucggcgagguguucaacgccacccgguucgccagcguguacgccuggaaccggaagcggaucagcaacugcguggccgacuacagcgugcuguacaacagcgccagcuucagcaccuucaagugcuacggcgugagccccaccaagcugaacgaccugugcuucaccaacguguacgcugacagcuucgugauccggggcgacgaggugcggcagaucgccccuggccagaccggcaccaucgccgacuacaacuacaagcugcccgacgacuucaccggcugcgugaucgccuggaacagcaacaaccuggacagcaaggugggcggcaacuacaacuaccuguaccggcuguuccguaagagcaaccugaagcccuuugagcgggacaucagcaccgagaucuaccaggccggcagcaccccaugcaacggugugaagggcuucaacugcuacuucccccugcagagcuacggcuuccagcccaccuacggcgugggcuaccagcccuaccgggugguggugcugagcuucgagcugcugcacgcccccgccaccgugugcggccccaaaaagagcaccaaccuggugaagaacaagugcgugaacuucaauuucaacggccugaccggcaccggcgugcugaccgagagcaacaagaaguuccugccuuuccagcaguucggccgggacaucgccgauaccaccgacgcagugcgggacccccagacccuggagauccuggacaucacccccugcagcuucggcggcgugagcgucaucaccccaggcacaaacaccagcaaccagguggccgugcuguaccagggagugaacugcaccgaggugcccguggccauccacgccgaccagcugacccccaccuggcggguguacuccaccggcagcaacguguuccagacccgggccggcugccugaucggcgccgaguacgugaacaacagcuacgagugcgacauccccaucggcgcuggcaucugcgccagcuaccagacccagaccaacagcccccggcgggcccggagcguggccagccagagcaucaucgccuacaccaugagccugggcgccgagaacagcguggccuacagcaacaacagcaucgcgauccccaccaacuucaccaucagcgugaccaccgagauauuaccugugagcaugaccaagaccagcguggacuguaccauguacaucugcggcgacagcaccgagugcagcaaccugcugcugcaguacggcagcuucugcacccagcugaaccgggcccugaccggcaucgccguggagcaggacaagaacacccaagagguguucgcccaggugaagcagaucuacaagacuccacccaucaaggacuucggcggcuucaacuucagccagauccugcccgaccccagcaagcccagcaagcggagcuucaucgaggaccugcuguucaacaaggugacccuggccgacgccggcuucaucaagcaguacggcgacugccugggggacaucgccgcucgggaucugaucugcgcccagaaguucaacggccugaccgugcugccuccccugcugaccgacgagaugaucgcccaguacaccagcgcccugcuggccggcaccaucaccagcggcuggaccuucggcgccggcgcagcccuucagauccccuucgccaugcagauggccuaccgguucaacggcaucggcgugacccagaacgugcuguacgagaaccagaagcugaucgccaaccaguucaacagcgccaucggcaagauccaggacagccugagcagcaccgccagcgcccugggcaagcugcaggacguggugaaccagaacgcucaggcccugaacacccuggugaagcagcugagcucaaacuuuggcgccaucagcagcgugcugaaugacauccugagccggcuggacaagguggaggccgaggugcagaucgacaggcugaucaccggccggcugcagagccugcagaccuacgugacccagcagcugauccgggccgccgagauccgggccagcgccaaccuggcagccauuaagaugagcgagugcgugcugggccagagcaagcggguggacuucugcggcaagggcuaccaccugaugagcuucccccagagcgcuccccacggcgugguguuccugcacgucaccuacgugccagcccaggagaagaacuucacaaccgcccccgccaucugccacgacggcaaggcccacuucccccgggagggaguguucgugagcaacggcacccacugguucgugacccagcggaacuucuacgagccccagaucaucaccaccgacaacaccuucgugagcggcaacugcgacguggugaucggcaucgugaacaacaccguguacgacccccuccagcccgagcuggacagcuucaaggaggagcuggacaaguacuucaagaaccacaccagcccugacguggaccugggcgauaucagcggcaucaacgccagcguggugaacauccagaaggagaucgaccggcugaacgagguggccaagaaccugaacgagagccugaucgaccugcaggagcugggcaaguacgagcaguacaucaaguggcccugguacaucuggcugggcuucaucgccggccugaucgccaucgugauggugaccaucaugcugugcugcaugaccagcugcuguagcugccugaagggcugcugcagcugcggcagcugcugcaaguucgacgaggacgacagcgagcccgugcugaagggcgugaagcugcacuacaccugauaauaggcuggagccucgguggccuagcuucuugccccuugggccuccccccagccccuccuccccuuccugcacccguacccccguggucuuugaauaaagucugagugggcggcaaaaaaaaaaaaaaaaaaaaaaaaaaaaaaaaaaaaaaaaaaaaaaaaaaaaaaaaaaaaaaaaaaaaaaaaaaaaaaaaaaaaaaaaaaaaaaaaaaaaucuag

SEQ ID NO: 26560 - RNA, 4100 nt, Artificial Sequence
  SARS-CoV-2/Wuhan/WIV05/2019__EPI_ISL_402128 spike protein mRNA gc (1-1273)(S13I_W152C_L452R_D614G)
gggaaauaagagagaaaagaagaguaagaagaaauauaagaccccggcgccgccaccauguucguguuccuggugcugcugccccuggugagcauccagugcgugaaccugaccacccggacccagcugcccccugccuacaccaacagcuucacccggggcguguacuaccccgacaagguguuccggagcagcgugcugcacagcacccaggaccuguuccugcccuucuucagcaacgugaccugguuccacgccauccacgugagcggcaccaacggcaccaagcgguucgacaacccagugcugcccuucaacgacggcguguacuucgccagcaccgagaagucaaacaucauccggggcuggaucuucggcaccacccuggacagcaagacacagagccugcugaucgugaacaacgccaccaacguggugaucaaggugugcgaguuucaguucugcaacgaccccuuccugggcguguacuaccacaagaacaacaagagcugcauggagagcgaguuccgggucuacagcagcgcuaacaauugcaccuucgaguacgugagccagcccuuccugauggaccucgagggcaagcagggcaacuucaagaaccugcgggaguucguguucaagaacaucgauggcuacuucaagaucuacagcaagcacacccccaucaaccuggugcgggaccugccccagggauucagcgcccuggagccucugguggaccugcccaucggcaucaacaucaccagguuccagacccugcuggcccugcaccggagcuaccugacccccggcgacagcagcagcggcuggaccgccggcgccgccgcauacuacgugggcuaccugcagccacggaccuuccugcugaaguacaacgagaacggcaccaucaccgacgccguggacugcgcccuggacccccugagcgagaccaaguguacccuaaagagcuucaccguggagaagggcaucuaccagaccagcaacuuccgggugcagcccacugagagcauugugcgguuccccaacaucaccaaccugugccccuucggcgagguguucaacgccacccgguucgccagcguguacgccuggaaccggaagcggaucagcaacugcguggccgacuacagcgugcuguacaacagcgccagcuucagcaccuucaagugcuacggcgugagcccuaccaagcugaacgaccugugcuucaccaacguguacgcugacagcuucgugauccggggcgacgaggugcggcagaucgcccccggccagaccggcaagaucgccgacuacaacuacaagcugcccgacgacuucaccggcugcgugaucgccuggaacagcaacaaccuggacagcaaggugggcggcaacuacaacuaccgguaccggcuguuccguaagagcaaccugaagccauucgagcgggacaucagcaccgagaucuaccaggccggcagcacccccugcaacgguguggagggcuuuaacugcuacuucccccugcagagcuacggcuuccagcccaccaacggcgugggcuaccagcccuaccgggugguggugcugagcuucgagcugcugcacgcccccgccaccgugugcggcccuaaaaagagcaccaaccuggugaagaacaagugcgugaacuucaauuucaacggccugaccggcaccggcgugcugaccgagagcaacaagaaguuccugcccuuccagcaguucggccgggauaucgccgacaccaccgacgcagugcgggacccccagacccuggagauccuggacaucaccccaugcagcuucggcggcgugagcgucaucacccccggcacaaacaccagcaaccagguggccgugcuguaccagggagugaacugcaccgaggugcccguggccauccacgccgaccagcugacccccaccuggcggguguacagcaccggcagcaacguguuccagacccgggccggcugccugaucggcgccgagcacgugaacaacagcuacgagugcgacauccccaucggcgcuggcaucugugccuccuaccagacccagaccaacagcccccggcgggcccggagcguggccagccagagcaucaucgccuacaccaugagccugggcgccgagaacagcguggccuacagcaacaacagcaucgcgaucccuaccaacuucaccauaagcgugaccaccgagaucuuacccgugagcaugaccaagaccagcguggacugcaccauguacaucugcggcgacagcaccgagugcagcaaccugcugcugcaguacggcagcuucugcacccagcugaaccgggcccugaccggcaucgccguggagcaggacaagaacacccaagagguguucgcccaggugaagcagaucuacaagacucccccaaucaaggacuucggcggcuucaacuucagccagauccugcccgaccccagcaagcccagcaagcggagcuucaucgaggaccugcuguucaacaaggugacccuggccgacgccggcuucaucaagcaguacggcgacugccugggggauaucgccgcucgggaccugaucugcgcccagaaguucaacggccugaccgugcugcccccucugcugaccgacgagaugaucgcccaguacaccagcgcccugcuggccggcaccaucaccagcggcuggaccuucggcgccggcgcagcccuucagauccccuucgccaugcagauggccuacagguucaacggcaucggcgugacccagaacgugcuguacgagaaccagaagcugaucgccaaccaguucaacagcgccaucggcaagauccaggacagccugagcagcaccgccagcgcccugggcaagcugcaggacguggugaaccagaacgcucaggcccugaacacccuggugaagcagcugagcagcaacuucggcgccaucagcagcgugcugaaugacauccugucacggcuggacaagguggaggccgaggugcagaucgaccggcugaucaccggccggcugcagagccugcagaccuacgugacccagcagcugauccgggccgccgagauucgggccagcgccaaccuggcagccaccaagaugagcgagugcgugcugggccagagcaagcggguggacuuuugcggcaagggcuaccaccugaugagcuucccccagagcgccccacacggcgugguguuccugcacgucacauacgugcccgcccaggagaagaacuucaccaccgcccccgccaucugccacgacggcaaggcucacuucccccgggagggaguguucgugagcaacggcacccacugguucgugacccagcggaacuucuacgagccccagaucaucaccaccgacaacaccuucgugagcggcaacugcgacguggugaucggcaucgugaacaacaccguguacgacccccuccagccugagcuggacagcuucaaggaggagcuggacaaguacuucaagaaccacaccagccccgacguggaucugggcgacaucagcggcaucaacgccagcguggugaacauccagaaggagaucgaccggcugaacgagguggccaagaaccugaacgagagccugaucgaccugcaggagcugggcaaguacgagcaguacaucaaguggcccugguacaucuggcugggcuucaucgccggccugaucgccaucgugauggugaccaucaugcugugcugcaugaccagcuguugcagcugccugaagggcugcugcagcugcggcagcugcugcaaguucgacgaggacgacagcgagccagugcugaagggcgugaagcugcacuacaccugauaauaggcuggagccucgguggccuagcuucuugccccuugggccuccccccagccccuccuccccuuccugcacccguacccccguggucuuugaauaaagucugagugggcggcaaaaaaaaaaaaaaaaaaaaaaaaaaaaaaaaaaaaaaaaaaaaaaaaaaaaaaaaaaaaaaaaaaaaaaaaaaaaaaaaaaaaaaaaaaaaaaaaaaaaucuag

SEQ ID NO: 26561 - RNA, 4100 nt, Artificial Sequence
  SARS-CoV-2/Wuhan/WIV05/2019__EPI_ISL_402128 spike protein mRNA gc mod (1-1273)
gggaaauaagagagaaaagaagaguaagaagaaauauaagaccccggcgccgccaccauguucguguuucuggugcugcugccccugguguccagccagugugugaaccugaccaccagaacacagcugccuccagccuacaccaacagcuucaccagaggcguguacuaccccgacaagguguucagauccagcgugcugcacucuacccaggaccuguuccugccuuucuucagcaacgugaccugguuccacgccauccacguguccggcaccaauggcaccaagagauucgacaaccccgugcugcccuucaacgacgggguguacuuugccagcaccgagaaguccaacaucaucagaggcuggaucuucggcaccacacuggacagcaagacccagagccugcugaucgugaacaacgccaccaacguggucaucaaagugugcgaguuccaguucugcaacgaccccuuccugggcgucuacuaccacaagaacaacaagagcuggauggaaagcgaguuccggguguacagcagcgccaacaacugcaccuucgaguacgugucccagccuuuccugauggaccuggaaggcaagcagggcaacuucaagaaccugcgcgaguucguguucaagaacaucgacggcuacuucaaaaucuacagcaagcacaccccuaucaaccucgugcgggaucugccucagggcuucucugcucuggaaccccugguggaucugcccaucggcaucaacaucacccgguuucagacacugcuggcccugcacagaagcuaccugacaccuggcgauagcagcagcggauggacagcuggugccgccgcuuacuaugugggcuaccugcagccuagaaccuuccugcugaaguacaacgagaacggcaccaucaccgacgccguggauugugcucuggauccucugagcgagacaaagugcacccugaaguccuucaccguggaaaagggcaucuaccagaccagcaacuuccgggugcagcccaccgaauccaucgugcgguuccccaauaucaccaaucugugccccuucggcgagguguucaaugccaccagauucgccucuguguacgccuggaaccggaagcggaucagcaauugcguggccgacuacuccgugcuguacaacuccgccagcuucagcaccuucaagugcuacggcguguccccuaccaagcugaacgaccugugcuucacaaacguguacgccgacagcuucgugauccggggagaugaagugcggcagauugccccuggacagacaggcaagaucgccgacuacaacuacaagcugcccgacgacuucaccggcugugugauugccuggaacagcaacaaccuggacuccaaagucggcggcaacuacaauuaccuguaccggcuguuccggaaguccaaucugaagcccuucgagcgggacaucagcaccgaaaucuaucaggccggcagcaccccuugcaacggcguggaaggcuucaacugcuacuucccacugcaguccuacggcuuucagcccacaaauggcgugggcuaucagcccuacagagugguggugcugagcuucgaacugcugcaugcuccugccacagugugcggcccuaagaaaagcaccaaucucgugaagaacaaaugcgugaacuucaacuucaacggccugaccggcaccggcgugcugacagagagcaacaagaaguuccugccauuccagcaguuuggccgggauaucgccgauaccacagacgccguuagagauccccagacacuggaaauccuggacaucaccccaugcagcuucggcggagugucugugaucaccccuggcaccaacaccagcaaucagguggcagugcuguaccaggacgugaacuguaccgaagugcccguggccauucacgccgaucagcugacaccuacauggcggguguacuccaccggcagcaauguguuucagaccagagccggcugucugaucggagccgagcacgugaacaauagcuacgagugcgacauccccaucggcgcuggcaucugugccagcuaccagacacagacaaacagccccagacgggcuagaagcguggccagccagagcaucauugccuacacaaugucucugggcgccgagaacagcguggccuacuccaacaacucuaucgcuauccccaccaacuucaccaucagcgugaccaccgagauccugccuguguccaugaccaagaccagcguggacugcaccauguacaucugcggcgauuccaccgagugcuccaaccugcugcugcaguacggcagcuucugcacccagcugaauagagcccugacagggaucgccguggaacaggacaagaacacccaagagguguucgcccaagugaagcaaaucuacaagaccccuccuaucaaggacuucggcggcuucaauuucagccagauucugcccgauccuagcaagcccagcaagcggagcuucaucgaggaccugcuguucaacaaagugacacuggccgacgccggcuucaucaagcaguauggcgauugucugggcgacauugccgccagggaucugauuugcgcccagaaguuuaacggacugacagugcugccuccucugcugaccgaugagaugaucgcccaguacacaucugcccugcuggccggcacaaucacaagcggcuggacauuuggagcuggcgccgcucugcagauccccuuugcuaugcagauggccuaccgguucaacggcaucggagugacccagaaugugcuguacgagaaccagaagcugaucgccaaccaguucaacagcgccaucggcaagauccaggacagccugagcagcacagcaagcgcccugggaaagcugcaggacguggucaaccagaaugcccaggcacugaacacccuggucaagcagcuguccuccaacuucggcgccaucagcucugugcugaacgauauccugagcagacuggacaaggucgaggccgaggugcagaucgacagacugaucacaggcagacugcagagccuccagacauacgugacccagcagcugaucagagccgccgagauuagagccucugccaaucuggccgccaccaagaugucugagugugugcugggccagagcaagagaguggacuuuugcggcaagggcuaccaccugaugagcuucccucagucugccccucacggcgugguguuucugcacgugacauaugugcccgcucaagagaagaauuucaccaccgcuccagccaucugccacgacggcaaagcccacuuuccuagagaaggcguguucguguccaacggcacccauugguucgugacacagcggaacuucuacgagccccagaucaucaccaccgacaacaccuucgugucuggcaacugcgacguugugaucggcauugugaacaauaccguguacgacccucugcagcccgagcuggacagcuucaaagaggaacuggacaaguacuuuaagaaccacacaagccccgacguggaccugggcgauaucagcggaaucaaugccagcgucgugaacauccagaaagagaucgaccggcugaacgagguggccaagaaucugaacgagagccugaucgaccugcaagaacuggggaaguacgagcaguacaucaaguggcccugguacaucuggcugggcuuuaucgccggacugauugccaucgugauggucacaaucaugcuguguugcaugaccagcugcuguagcugccugaagggcuguuguagcuguggcagcugcugcaaguucgacgaggacgauucugagcccgugcugaagggcgugaaacugcacuacaccugauaauaggcuggagccucgguggccuagcuucuugccccuugggccuccccccagccccuccuccccuuccugcacccguacccccguggucuuugaauaaagucugagugggcggcaaaaaaaaaaaaaaaaaaaaaaaaaaaaaaaaaaaaaaaaaaaaaaaaaaaaaaaaaaaaaaaaaaaaaaaaaaaaaaaaaaaaaaaaaaaaaaaaaaaaucuag

SEQ ID NO: 26562 - RNA, 4100 nt, Artificial Sequence
  SARS-CoV-2/Wuhan/WIV05/2019__EPI_ISL_402128 spike protein mRNA gc mod (1-1273)(D614G)
gggaaauaagagagaaaagaagaguaagaagaaauauaagaccccggcgccgccaccauguucguguuucuggugcugcugccccugguguccagccagugugugaaccugaccaccagaacacagcugccuccagccuacaccaacagcuucaccagaggcguguacuaccccgacaagguguucagauccagcgugcugcacucuacccaggaccuguuccugccuuucuucagcaacgugaccugguuccacgccauccacguguccggcaccaauggcaccaagagauucgacaaccccgugcugcccuucaacgacgggguguacuuugccagcaccgagaaguccaacaucaucagaggcuggaucuucggcaccacacuggacagcaagacccagagccugcugaucgugaacaacgccaccaacguggucaucaaagugugcgaguuccaguucugcaacgaccccuuccugggcgucuacuaccacaagaacaacaagagcuggauggaaagcgaguuccggguguacagcagcgccaacaacugcaccuucgaguacgugucccagccuuuccugauggaccuggaaggcaagcagggcaacuucaagaaccugcgcgaguucguguucaagaacaucgacggcuacuucaaaaucuacagcaagcacaccccuaucaaccucgugcgggaucugccucagggcuucucugcucuggaaccccugguggaucugcccaucggcaucaacaucacccgguuucagacacugcuggcccugcacagaagcuaccugacaccuggcgauagcagcagcggauggacagcuggugccgccgcuuacuaugugggcuaccugcagccuagaaccuuccugcugaaguacaacgagaacggcaccaucaccgacgccguggauugugcucuggauccucugagcgagacaaagugcacccugaaguccuucaccguggaaaagggcaucuaccagaccagcaacuuccgggugcagcccaccgaauccaucgugcgguuccccaauaucaccaaucugugccccuucggcgagguguucaaugccaccagauucgccucuguguacgccuggaaccggaagcggaucagcaauugcguggccgacuacuccgugcuguacaacuccgccagcuucagcaccuucaagugcuacggcguguccccuaccaagcugaacgaccugugcuucacaaacguguacgccgacagcuucgugauccggggagaugaagugcggcagauugccccuggacagacaggcaagaucgccgacuacaacuacaagcugcccgacgacuucaccggcugugugauugccuggaacagcaacaaccuggacuccaaagucggcggcaacuacaauuaccuguaccggcuguuccggaaguccaaucugaagcccuucgagcgggacaucagcaccgaaaucuaucaggccggcagcaccccuugcaacggcguggaaggcuucaacugcuacuucccacugcaguccuacggcuuucagcccacaaauggcgugggcuaucagcccuacagagugguggugcugagcuucgaacugcugcaugcuccugccacagugugcggcccuaagaaaagcaccaaucucgugaagaacaaaugcgugaacuucaacuucaacggccugaccggcaccggcgugcugacagagagcaacaagaaguuccugccauuccagcaguuuggccgggauaucgccgauaccacagacgccguuagagauccccagacacuggaaauccuggacaucaccccaugcagcuucggcggagugucugugaucaccccuggcaccaacaccagcaaucagguggcagugcuguaccagggcgugaacuguaccgaagugcccguggccauucacgccgaucagcugacaccuacauggcggguguacuccaccggcagcaauguguuucagaccagagccggcugucugaucggagccgagcacgugaacaauagcuacgagugcgacauccccaucggcgcuggcaucugugccagcuaccagacacagacaaacagccccagacgggcuagaagcguggccagccagagcaucauugccuacacaaugucucugggcgccgagaacagcguggccuacuccaacaacucuaucgcuauccccaccaacuucaccaucagcgugaccaccgagauccugccuguguccaugaccaagaccagcguggacugcaccauguacaucugcggcgauuccaccgagugcuccaaccugcugcugcaguacggcagcuucugcacccagcugaauagagcccugacagggaucgccguggaacaggacaagaacacccaagagguguucgcccaagugaagcaaaucuacaagaccccuccuaucaaggacuucggcggcuucaauuucagccagauucugcccgauccuagcaagcccagcaagcggagcuucaucgaggaccugcuguucaacaaagugacacuggccgacgccggcuucaucaagcaguauggcgauugucugggcgacauugccgccagggaucugauuugcgcccagaaguuuaacggacugacagugcugccuccucugcugaccgaugagaugaucgcccaguacacaucugcccugcuggccggcacaaucacaagcggcuggacauuuggagcuggcgccgcucugcagauccccuuugcuaugcagauggccuaccgguucaacggcaucggagugacccagaaugugcuguacgagaaccagaagcugaucgccaaccaguucaacagcgccaucggcaagauccaggacagccugagcagcacagcaagcgcccugggaaagcugcaggacguggucaaccagaaugcccaggcacugaacacccuggucaagcagcuguccuccaacuucggcgccaucagcucugugcugaacgauauccugagcagacuggacaaggucgaggccgaggugcagaucgacagacugaucacaggcagacugcagagccuccagacauacgugacccagcagcugaucagagccgccgagauuagagccucugccaaucuggccgccaccaagaugucugagugugugcugggccagagcaagagaguggacuuuugcggcaagggcuaccaccugaugagcuucccucagucugccccucacggcgugguguuucugcacgugacauaugugcccgcucaagagaagaauuucaccaccgcuccagccaucugccacgacggcaaagcccacuuuccuagagaaggcguguucguguccaacggcacccauugguucgugacacagcggaacuucuacgagccccagaucaucaccaccgacaacaccuucgugucuggcaacugcgacguugugaucggcauugugaacaauaccguguacgacccucugcagcccgagcuggacagcuucaaagaggaacuggacaaguacuuuaagaaccacacaagccccgacguggaccugggcgauaucagcggaaucaaugccagcgucgugaacauccagaaagagaucgaccggcugaacgagguggccaagaaucugaacgagagccugaucgaccugcaagaacuggggaaguacgagcaguacaucaaguggcccugguacaucuggcugggcuuuaucgccggacugauugccaucgugauggucacaaucaugcuguguugcaugaccagcugcuguagcugccugaagggcuguuguagcuguggcagcugcugcaaguucgacgaggacgauucugagcccgugcugaagggcgugaaacugcacuacaccugauaauaggcuggagccucgguggccuagcuucuugccccuugggccuccccccagccccuccuccccuuccugcacccguacccccguggucuuugaauaaagucugagugggcggcaaaaaaaaaaaaaaaaaaaaaaaaaaaaaaaaaaaaaaaaaaaaaaaaaaaaaaaaaaaaaaaaaaaaaaaaaaaaaaaaaaaaaaaaaaaaaaaaaaaaucuag

SEQ ID NO: 26563 - RNA, 4100 nt, Artificial Sequence
  SARS-CoV-2/Wuhan/WIV05/2019__EPI_ISL_402128 spike protein mRNA gc mod (1-1273)(A222V_D614G)
gggaaauaagagagaaaagaagaguaagaagaaauauaagaccccggcgccgccaccauguucguguuucuggugcugcugccccugguguccagccagugugugaaccugaccaccagaacacagcugccuccagccuacaccaacagcuucaccagaggcguguacuaccccgacaagguguucagauccagcgugcugcacucuacccaggaccuguuccugccuuucuucagcaacgugaccugguuccacgccauccacguguccggcaccaauggcaccaagagauucgacaaccccgugcugcccuucaacgacgggguguacuuugccagcaccgagaaguccaacaucaucagaggcuggaucuucggcaccacacuggacagcaagacccagagccugcugaucgugaacaacgccaccaacguggucaucaaagugugcgaguuccaguucugcaacgaccccuuccugggcgucuacuaccacaagaacaacaagagcuggauggaaagcgaguuccggguguacagcagcgccaacaacugcaccuucgaguacgugucccagccuuuccugauggaccuggaaggcaagcagggcaacuucaagaaccugcgcgaguucguguucaagaacaucgacggcuacuucaaaaucuacagcaagcacaccccuaucaaccucgugcgggaucugccucagggcuucucugugcuggaaccccugguggaucugcccaucggcaucaacaucacccgguuucagacacugcuggcccugcacagaagcuaccugacaccuggcgauagcagcagcggauggacagcuggugccgccgcuuacuaugugggcuaccugcagccuagaaccuuccugcugaaguacaacgagaacggcaccaucaccgacgccguggauugugcucuggauccucugagcgagacaaagugcacccugaaguccuucaccguggaaaagggcaucuaccagaccagcaacuuccgggugcagcccaccgaauccaucgugcgguuccccaauaucaccaaucugugccccuucggcgagguguucaaugccaccagauucgccucuguguacgccuggaaccggaagcggaucagcaauugcguggccgacuacuccgugcuguacaacuccgccagcuucagcaccuucaagugcuacggcguguccccuaccaagcugaacgaccugugcuucacaaacguguacgccgacagcuucgugauccggggagaugaagugcggcagauugccccuggacagacaggcaagaucgccgacuacaacuacaagcugcccgacgacuucaccggcugugugauugccuggaacagcaacaaccuggacuccaaagucggcggcaacuacaauuaccuguaccggcuguuccggaaguccaaucugaagcccuucgagcgggacaucagcaccgaaaucuaucaggccggcagcaccccuugcaacggcguggaaggcuucaacugcuacuucccacugcaguccuacggcuuucagcccacaaauggcgugggcuaucagcccuacagagugguggugcugagcuucgaacugcugcaugcuccugccacagugugcggcccuaagaaaagcaccaaucucgugaagaacaaaugcgugaacuucaacuucaacggccugaccggcaccggcgugcugacagagagcaacaagaaguuccugccauuccagcaguuuggccgggauaucgccgauaccacagacgccguuagagauccccagacacuggaaauccuggacaucaccccaugcagcuucggcggagugucugugaucaccccuggcaccaacaccagcaaucagguggcagugcuguaccagggcgugaacuguaccgaagugcccguggccauucacgccgaucagcugacaccuacauggcggguguacuccaccggcagcaauguguuucagaccagagccggcugucugaucggagccgagcacgugaacaauagcuacgagugcgacauccccaucggcgcuggcaucugugccagcuaccagacacagacaaacagccccagacgggcuagaagcguggccagccagagcaucauugccuacacaaugucucugggcgccgagaacagcguggccuacuccaacaacucuaucgcuauccccaccaacuucaccaucagcgugaccaccgagauccugccuguguccaugaccaagaccagcguggacugcaccauguacaucugcggcgauuccaccgagugcuccaaccugcugcugcaguacggcagcuucugcacccagcugaauagagcccugacagggaucgccguggaacaggacaagaacacccaagagguguucgcccaagugaagcaaaucuacaagaccccuccuaucaaggacuucggcggcuucaauuucagccagauucugcccgauccuagcaagcccagcaagcggagcuucaucgaggaccugcuguucaacaaagugacacuggccgacgccggcuucaucaagcaguauggcgauugucugggcgacauugccgccagggaucugauuugcgcccagaaguuuaacggacugacagugcugccuccucugcugaccgaugagaugaucgcccaguacacaucugcccugcuggccggcacaaucacaagcggcuggacauuuggagcuggcgccgcucugcagauccccuuugcuaugcagauggccuaccgguucaacggcaucggagugacccagaaugugcuguacgagaaccagaagcugaucgccaaccaguucaacagcgccaucggcaagauccaggacagccugagcagcacagcaagcgcccugggaaagcugcaggacguggucaaccagaaugcccaggcacugaacacccuggucaagcagcuguccuccaacuucggcgccaucagcucugugcugaacgauauccugagcagacuggacaaggucgaggccgaggugcagaucgacagacugaucacaggcagacugcagagccuccagacauacgugacccagcagcugaucagagccgccgagauuagagccucugccaaucuggccgccaccaagaugucugagugugugcugggccagagcaagagaguggacuuuugcggcaagggcuaccaccugaugagcuucccucagucugccccucacggcgugguguuucugcacgugacauaugugcccgcucaagagaagaauuucaccaccgcuccagccaucugccacgacggcaaagcccacuuuccuagagaaggcguguucguguccaacggcacccauugguucgugacacagcggaacuucuacgagccccagaucaucaccaccgacaacaccuucgugucuggcaacugcgacguugugaucggcauugugaacaauaccguguacgacccucugcagcccgagcuggacagcuucaaagaggaacuggacaaguacuuuaagaaccacacaagccccgacguggaccugggcgauaucagcggaaucaaugccagcgucgugaacauccagaaagagaucgaccggcugaacgagguggccaagaaucugaacgagagccugaucgaccugcaagaacuggggaaguacgagcaguacaucaaguggcccugguacaucuggcugggcuuuaucgccggacugauugccaucgugauggucacaaucaugcuguguugcaugaccagcugcuguagcugccugaagggcuguuguagcuguggcagcugcugcaaguucgacgaggacgauucugagcccgugcugaagggcgugaaacugcacuacaccugauaauaggcuggagccucgguggccuagcuucuugccccuugggccuccccccagccccuccuccccuuccugcacccguacccccguggucuuugaauaaagucugagugggcggcaaaaaaaaaaaaaaaaaaaaaaaaaaaaaaaaaaaaaaaaaaaaaaaaaaaaaaaaaaaaaaaaaaaaaaaaaaaaaaaaaaaaaaaaaaaaaaaaaaaaucuag

SEQ ID NO: 26564 - RNA, 4100 nt, Artificial Sequence
  SARS-CoV-2/Wuhan/WIV05/2019__EPI_ISL_402128 spike protein mRNA gc mod (1-1273)(N439K_D614G)
gggaaauaagagagaaaagaagaguaagaagaaauauaagaccccggcgccgccaccauguucguguuucuggugcugcugccccugguguccagccagugugugaaccugaccaccagaacacagcugccuccagccuacaccaacagcuucaccagaggcguguacuaccccgacaagguguucagauccagcgugcugcacucuacccaggaccuguuccugccuuucuucagcaacgugaccugguuccacgccauccacguguccggcaccaauggcaccaagagauucgacaaccccgugcugcccuucaacgacgggguguacuuugccagcaccgagaaguccaacaucaucagaggcuggaucuucggcaccacacuggacagcaagacccagagccugcugaucgugaacaacgccaccaacguggucaucaaagugugcgaguuccaguucugcaacgaccccuuccugggcgucuacuaccacaagaacaacaagagcuggauggaaagcgaguuccggguguacagcagcgccaacaacugcaccuucgaguacgugucccagccuuuccugauggaccuggaaggcaagcagggcaacuucaagaaccugcgcgaguucguguucaagaacaucgacggcuacuucaaaaucuacagcaagcacaccccuaucaaccucgugcgggaucugccucagggcuucucugcucuggaaccccugguggaucugcccaucggcaucaacaucacccgguuucagacacugcuggcccugcacagaagcuaccugacaccuggcgauagcagcagcggauggacagcuggugccgccgcuuacuaugugggcuaccugcagccuagaaccuuccugcugaaguacaacgagaacggcaccaucaccgacgccguggauugugcucuggauccucugagcgagacaaagugcacccugaaguccuucaccguggaaaagggcaucuaccagaccagcaacuuccgggugcagcccaccgaauccaucgugcgguuccccaauaucaccaaucugugccccuucggcgagguguucaaugccaccagauucgccucuguguacgccuggaaccggaagcggaucagcaauugcguggccgacuacuccgugcuguacaacuccgccagcuucagcaccuucaagugcuacggcguguccccuaccaagcugaacgaccugugcuucacaaacguguacgccgacagcuucgugauccggggagaugaagugcggcagauugccccuggacagacaggcaagaucgccgacuacaacuacaagcugcccgacgacuucaccggcugugugauugccuggaacagcaagaaccuggacuccaaagucggcggcaacuacaauuaccuguaccggcuguuccggaaguccaaucugaagcccuucgagcgggacaucagcaccgaaaucuaucaggccggcagcaccccuugcaacggcguggaaggcuucaacugcuacuucccacugcaguccuacggcuuucagcccacaaauggcgugggcuaucagcccuacagagugguggugcugagcuucgaacugcugcaugcuccugccacagugugcggcccuaagaaaagcaccaaucucgugaagaacaaaugcgugaacuucaacuucaacggccugaccggcaccggcgugcugacagagagcaacaagaaguuccugccauuccagcaguuuggccgggauaucgccgauaccacagacgccguuagagauccccagacacuggaaauccuggacaucaccccaugcagcuucggcggagugucugugaucaccccuggcaccaacaccagcaaucagguggcagugcuguaccagggcgugaacuguaccgaagugcccguggccauucacgccgaucagcugacaccuacauggcggguguacuccaccggcagcaauguguuucagaccagagccggcugucugaucggagccgagcacgugaacaauagcuacgagugcgacauccccaucggcgcuggcaucugugccagcuaccagacacagacaaacagccccagacgggcuagaagcguggccagccagagcaucauugccuacacaaugucucugggcgccgagaacagcguggccuacuccaacaacucuaucgcuauccccaccaacuucaccaucagcgugaccaccgagauccugccuguguccaugaccaagaccagcguggacugcaccauguacaucugcggcgauuccaccgagugcuccaaccugcugcugcaguacggcagcuucugcacccagcugaauagagcccugacagggaucgccguggaacaggacaagaacacccaagagguguucgcccaagugaagcaaaucuacaagaccccuccuaucaaggacuucggcggcuucaauuucagccagauucugcccgauccuagcaagcccagcaagcggagcuucaucgaggaccugcuguucaacaaagugacacuggccgacgccggcuucaucaagcaguauggcgauugucugggcgacauugccgccagggaucugauuugcgcccagaaguuuaacggacugacagugcugccuccucugcugaccgaugagaugaucgcccaguacacaucugcccugcuggccggcacaaucacaagcggcuggacauuuggagcuggcgccgcucugcagauccccuuugcuaugcagauggccuaccgguucaacggcaucggagugacccagaaugugcuguacgagaaccagaagcugaucgccaaccaguucaacagcgccaucggcaagauccaggacagccugagcagcacagcaagcgcccugggaaagcugcaggacguggucaaccagaaugcccaggcacugaacacccuggucaagcagcuguccuccaacuucggcgccaucagcucugugcugaacgauauccugagcagacuggacaaggucgaggccgaggugcagaucgacagacugaucacaggcagacugcagagccuccagacauacgugacccagcagcugaucagagccgccgagauuagagccucugccaaucuggccgccaccaagaugucugagugugugcugggccagagcaagagaguggacuuuugcggcaagggcuaccaccugaugagcuucccucagucugccccucacggcgugguguuucugcacgugacauaugugcccgcucaagagaagaauuucaccaccgcuccagccaucugccacgacggcaaagcccacuuuccuagagaaggcguguucguguccaacggcacccauugguucgugacacagcggaacuucuacgagccccagaucaucaccaccgacaacaccuucgugucuggcaacugcgacguugugaucggcauugugaacaauaccguguacgacccucugcagcccgagcuggacagcuucaaagaggaacuggacaaguacuuuaagaaccacacaagccccgacguggaccugggcgauaucagcggaaucaaugccagcgucgugaacauccagaaagagaucgaccggcugaacgagguggccaagaaucugaacgagagccugaucgaccugcaagaacuggggaaguacgagcaguacaucaaguggcccugguacaucuggcugggcuuuaucgccggacugauugccaucgugauggucacaaucaugcuguguugcaugaccagcugcuguagcugccugaagggcuguuguagcuguggcagcugcugcaaguucgacgaggacgauucugagcccgugcugaagggcgugaaacugcacuacaccugauaauaggcuggagccucgguggccuagcuucuugccccuugggccuccccccagccccuccuccccuuccugcacccguacccccguggucuuugaauaaagucugagugggcggcaaaaaaaaaaaaaaaaaaaaaaaaaaaaaaaaaaaaaaaaaaaaaaaaaaaaaaaaaaaaaaaaaaaaaaaaaaaaaaaaaaaaaaaaaaaaaaaaaaaaucuag

SEQ ID NO: 26565 - RNA, 4100 nt, Artificial Sequence
  SARS-CoV-2/Wuhan/WIV05/2019__EPI_ISL_402128 spike protein mRNA gc mod (1-1273)(S477N_D614G)
gggaaauaagagagaaaagaagaguaagaagaaauauaagaccccggcgccgccaccauguucguguuucuggugcugcugccccugguguccagccagugugugaaccugaccaccagaacacagcugccuccagccuacaccaacagcuucaccagaggcguguacuaccccgacaagguguucagauccagcgugcugcacucuacccaggaccuguuccugccuuucuucagcaacgugaccugguuccacgccauccacguguccggcaccaauggcaccaagagauucgacaaccccgugcugcccuucaacgacgggguguacuuugccagcaccgagaaguccaacaucaucagaggcuggaucuucggcaccacacuggacagcaagacccagagccugcugaucgugaacaacgccaccaacguggucaucaaagugugcgaguuccaguucugcaacgaccccuuccugggcgucuacuaccacaagaacaacaagagcuggauggaaagcgaguuccggguguacagcagcgccaacaacugcaccuucgaguacgugucccagccuuuccugauggaccuggaaggcaagcagggcaacuucaagaaccugcgcgaguucguguucaagaacaucgacggcuacuucaaaaucuacagcaagcacaccccuaucaaccucgugcgggaucugccucagggcuucucugcucuggaaccccugguggaucugcccaucggcaucaacaucacccgguuucagacacugcuggcccugcacagaagcuaccugacaccuggcgauagcagcagcggauggacagcuggugccgccgcuuacuaugugggcuaccugcagccuagaaccuuccugcugaaguacaacgagaacggcaccaucaccgacgccguggauugugcucuggauccucugagcgagacaaagugcacccugaaguccuucaccguggaaaagggcaucuaccagaccagcaacuuccgggugcagcccaccgaauccaucgugcgguuccccaauaucaccaaucugugccccuucggcgagguguucaaugccaccagauucgccucuguguacgccuggaaccggaagcggaucagcaauugcguggccgacuacuccgugcuguacaacuccgccagcuucagcaccuucaagugcuacggcguguccccuaccaagcugaacgaccugugcuucacaaacguguacgccgacagcuucgugauccggggagaugaagugcggcagauugccccuggacagacaggcaagaucgccgacuacaacuacaagcugcccgacgacuucaccggcugugugauugccuggaacagcaacaaccuggacuccaaagucggcggcaacuacaauuaccuguaccggcuguuccggaaguccaaucugaagcccuucgagcgggacaucagcaccgaaaucuaucaggccggcaacaccccuugcaacggcguggaaggcuucaacugcuacuucccacugcaguccuacggcuuucagcccacaaauggcgugggcuaucagcccuacagagugguggugcugagcuucgaacugcugcaugcuccugccacagugugcggcccuaagaaaagcaccaaucucgugaagaacaaaugcgugaacuucaacuucaacggccugaccggcaccggcgugcugacagagagcaacaagaaguuccugccauuccagcaguuuggccgggauaucgccgauaccacagacgccguuagagauccccagacacuggaaauccuggacaucaccccaugcagcuucggcggagugucugugaucaccccuggcaccaacaccagcaaucagguggcagugcuguaccagggcgugaacuguaccgaagugcccguggccauucacgccgaucagcugacaccuacauggcggguguacuccaccggcagcaauguguuucagaccagagccggcugucugaucggagccgagcacgugaacaauagcuacgagugcgacauccccaucggcgcuggcaucugugccagcuaccagacacagacaaacagccccagacgggcuagaagcguggccagccagagcaucauugccuacacaaugucucugggcgccgagaacagcguggccuacuccaacaacucuaucgcuauccccaccaacuucaccaucagcgugaccaccgagauccugccuguguccaugaccaagaccagcguggacugcaccauguacaucugcggcgauuccaccgagugcuccaaccugcugcugcaguacggcagcuucugcacccagcugaauagagcccugacagggaucgccguggaacaggacaagaacacccaagagguguucgcccaagugaagcaaaucuacaagaccccuccuaucaaggacuucggcggcuucaauuucagccagauucugcccgauccuagcaagcccagcaagcggagcuucaucgaggaccugcuguucaacaaagugacacuggccgacgccggcuucaucaagcaguauggcgauugucugggcgacauugccgccagggaucugauuugcgcccagaaguuuaacggacugacagugcugccuccucugcugaccgaugagaugaucgcccaguacacaucugcccugcuggccggcacaaucacaagcggcuggacauuuggagcuggcgccgcucugcagauccccuuugcuaugcagauggccuaccgguucaacggcaucggagugacccagaaugugcuguacgagaaccagaagcugaucgccaaccaguucaacagcgccaucggcaagauccaggacagccugagcagcacagcaagcgcccugggaaagcugcaggacguggucaaccagaaugcccaggcacugaacacccuggucaagcagcuguccuccaacuucggcgccaucagcucugugcugaacgauauccugagcagacuggacaaggucgaggccgaggugcagaucgacagacugaucacaggcagacugcagagccuccagacauacgugacccagcagcugaucagagccgccgagauuagagccucugccaaucuggccgccaccaagaugucugagugugugcugggccagagcaagagaguggacuuuugcggcaagggcuaccaccugaugagcuucccucagucugccccucacggcgugguguuucugcacgugacauaugugcccgcucaagagaagaauuucaccaccgcuccagccaucugccacgacggcaaagcccacuuuccuagagaaggcguguucguguccaacggcacccauugguucgugacacagcggaacuucuacgagccccagaucaucaccaccgacaacaccuucgugucuggcaacugcgacguugugaucggcauugugaacaauaccguguacgacccucugcagcccgagcuggacagcuucaaagaggaacuggacaaguacuuuaagaaccacacaagccccgacguggaccugggcgauaucagcggaaucaaugccagcgucgugaacauccagaaagagaucgaccggcugaacgagguggccaagaaucugaacgagagccugaucgaccugcaagaacuggggaaguacgagcaguacaucaaguggcccugguacaucuggcugggcuuuaucgccggacugauugccaucgugauggucacaaucaugcuguguugcaugaccagcugcuguagcugccugaagggcuguuguagcuguggcagcugcugcaaguucgacgaggacgauucugagcccgugcugaagggcgugaaacugcacuacaccugauaauaggcuggagccucgguggccuagcuucuugccccuugggccuccccccagccccuccuccccuuccugcacccguacccccguggucuuugaauaaagucugagugggcggcaaaaaaaaaaaaaaaaaaaaaaaaaaaaaaaaaaaaaaaaaaaaaaaaaaaaaaaaaaaaaaaaaaaaaaaaaaaaaaaaaaaaaaaaaaaaaaaaaaaaucuag

SEQ ID NO: 26566 - RNA, 4100 nt, Artificial Sequence
  SARS-CoV-2/Wuhan/WIV05/2019__EPI_ISL_402128 spike protein mRNA gc mod (1-1273)(N501Y_D614G)
gggaaauaagagagaaaagaagaguaagaagaaauauaagaccccggcgccgccaccauguucguguuucuggugcugcugccccugguguccagccagugugugaaccugaccaccagaacacagcugccuccagccuacaccaacagcuucaccagaggcguguacuaccccgacaagguguucagauccagcgugcugcacucuacccaggaccuguuccugccuuucuucagcaacgugaccugguuccacgccauccacguguccggcaccaauggcaccaagagauucgacaaccccgugcugcccuucaacgacgggguguacuuugccagcaccgagaaguccaacaucaucagaggcuggaucuucggcaccacacuggacagcaagacccagagccugcugaucgugaacaacgccaccaacguggucaucaaagugugcgaguuccaguucugcaacgaccccuuccugggcgucuacuaccacaagaacaacaagagcuggauggaaagcgaguuccggguguacagcagcgccaacaacugcaccuucgaguacgugucccagccuuuccugauggaccuggaaggcaagcagggcaacuucaagaaccugcgcgaguucguguucaagaacaucgacggcuacuucaaaaucuacagcaagcacaccccuaucaaccucgugcgggaucugccucagggcuucucugcucuggaaccccugguggaucugcccaucggcaucaacaucacccgguuucagacacugcuggcccugcacagaagcuaccugacaccuggcgauagcagcagcggauggacagcuggugccgccgcuuacuaugugggcuaccugcagccuagaaccuuccugcugaaguacaacgagaacggcaccaucaccgacgccguggauugugcucuggauccucugagcgagacaaagugcacccugaaguccuucaccguggaaaagggcaucuaccagaccagcaacuuccgggugcagcccaccgaauccaucgugcgguuccccaauaucaccaaucugugccccuucggcgagguguucaaugccaccagauucgccucuguguacgccuggaaccggaagcggaucagcaauugcguggccgacuacuccgugcuguacaacuccgccagcuucagcaccuucaagugcuacggcguguccccuaccaagcugaacgaccugugcuucacaaacguguacgccgacagcuucgugauccggggagaugaagugcggcagauugccccuggacagacaggcaagaucgccgacuacaacuacaagcugcccgacgacuucaccggcugugugauugccuggaacagcaacaaccuggacuccaaagucggcggcaacuacaauuaccuguaccggcuguuccggaaguccaaucugaagcccuucgagcgggacaucagcaccgaaaucuaucaggccggcagcaccccuugcaacggcguggaaggcuucaacugcuacuucccacugcaguccuacggcuuucagcccacauacggcgugggcuaucagcccuacagagugguggugcugagcuucgaacugcugcaugcuccugccacagugugcggcccuaagaaaagcaccaaucucgugaagaacaaaugcgugaacuucaacuucaacggccugaccggcaccggcgugcugacagagagcaacaagaaguuccugccauuccagcaguuuggccgggauaucgccgauaccacagacgccguuagagauccccagacacuggaaauccuggacaucaccccaugcagcuucggcggagugucugugaucaccccuggcaccaacaccagcaaucagguggcagugcuguaccagggcgugaacuguaccgaagugcccguggccauucacgccgaucagcugacaccuacauggcggguguacuccaccggcagcaauguguuucagaccagagccggcugucugaucggagccgagcacgugaacaauagcuacgagugcgacauccccaucggcgcuggcaucugugccagcuaccagacacagacaaacagccccagacgggcuagaagcguggccagccagagcaucauugccuacacaaugucucugggcgccgagaacagcguggccuacuccaacaacucuaucgcuauccccaccaacuucaccaucagcgugaccaccgagauccugccuguguccaugaccaagaccagcguggacugcaccauguacaucugcggcgauuccaccgagugcuccaaccugcugcugcaguacggcagcuucugcacccagcugaauagagcccugacagggaucgccguggaacaggacaagaacacccaagagguguucgcccaagugaagcaaaucuacaagaccccuccuaucaaggacuucggcggcuucaauuucagccagauucugcccgauccuagcaagcccagcaagcggagcuucaucgaggaccugcuguucaacaaagugacacuggccgacgccggcuucaucaagcaguauggcgauugucugggcgacauugccgccagggaucugauuugcgcccagaaguuuaacggacugacagugcugccuccucugcugaccgaugagaugaucgcccaguacacaucugcccugcuggccggcacaaucacaagcggcuggacauuuggagcuggcgccgcucugcagauccccuuugcuaugcagauggccuaccgguucaacggcaucggagugacccagaaugugcuguacgagaaccagaagcugaucgccaaccaguucaacagcgccaucggcaagauccaggacagccugagcagcacagcaagcgcccugggaaagcugcaggacguggucaaccagaaugcccaggcacugaacacccuggucaagcagcuguccuccaacuucggcgccaucagcucugugcugaacgauauccugagcagacuggacaaggucgaggccgaggugcagaucgacagacugaucacaggcagacugcagagccuccagacauacgugacccagcagcugaucagagccgccgagauuagagccucugccaaucuggccgccaccaagaugucugagugugugcugggccagagcaagagaguggacuuuugcggcaagggcuaccaccugaugagcuucccucagucugccccucacggcgugguguuucugcacgugacauaugugcccgcucaagagaagaauuucaccaccgcuccagccaucugccacgacggcaaagcccacuuuccuagagaaggcguguucguguccaacggcacccauugguucgugacacagcggaacuucuacgagccccagaucaucaccaccgacaacaccuucgugucuggcaacugcgacguugugaucggcauugugaacaauaccguguacgacccucugcagcccgagcuggacagcuucaaagaggaacuggacaaguacuuuaagaaccacacaagccccgacguggaccugggcgauaucagcggaaucaaugccagcgucgugaacauccagaaagagaucgaccggcugaacgagguggccaagaaucugaacgagagccugaucgaccugcaagaacuggggaaguacgagcaguacaucaaguggcccugguacaucuggcugggcuuuaucgccggacugauugccaucgugauggucacaaucaugcuguguugcaugaccagcugcuguagcugccugaagggcuguuguagcuguggcagcugcugcaaguucgacgaggacgauucugagcccgugcugaagggcgugaaacugcacuacaccugauaauaggcuggagccucgguggccuagcuucuugccccuugggccuccccccagccccuccuccccuuccugcacccguacccccguggucuuugaauaaagucugagugggcggcaaaaaaaaaaaaaaaaaaaaaaaaaaaaaaaaaaaaaaaaaaaaaaaaaaaaaaaaaaaaaaaaaaaaaaaaaaaaaaaaaaaaaaaaaaaaaaaaaaaaucuag

SEQ ID NO: 26567 - RNA, 4094 nt, Artificial Sequence
  SARS-CoV-2/Wuhan/WIV05/2019__EPI_ISL_402128 spike protein mRNA gc mod (1-1273)(H69del_V70del_D614G)
gggaaauaagagagaaaagaagaguaagaagaaauauaagaccccggcgccgccaccauguucguguuucuggugcugcugccccugguguccagccagugugugaaccugaccaccagaacacagcugccuccagccuacaccaacagcuucaccagaggcguguacuaccccgacaagguguucagauccagcgugcugcacucuacccaggaccuguuccugccuuucuucagcaacgugaccugguuccacgccaucuccggcaccaauggcaccaagagauucgacaaccccgugcugcccuucaacgacgggguguacuuugccagcaccgagaaguccaacaucaucagaggcuggaucuucggcaccacacuggacagcaagacccagagccugcugaucgugaacaacgccaccaacguggucaucaaagugugcgaguuccaguucugcaacgaccccuuccugggcgucuacuaccacaagaacaacaagagcuggauggaaagcgaguuccggguguacagcagcgccaacaacugcaccuucgaguacgugucccagccuuuccugauggaccuggaaggcaagcagggcaacuucaagaaccugcgcgaguucguguucaagaacaucgacggcuacuucaaaaucuacagcaagcacaccccuaucaaccucgugcgggaucugccucagggcuucucugcucuggaaccccugguggaucugcccaucggcaucaacaucacccgguuucagacacugcuggcccugcacagaagcuaccugacaccuggcgauagcagcagcggauggacagcuggugccgccgcuuacuaugugggcuaccugcagccuagaaccuuccugcugaaguacaacgagaacggcaccaucaccgacgccguggauugugcucuggauccucugagcgagacaaagugcacccugaaguccuucaccguggaaaagggcaucuaccagaccagcaacuuccgggugcagcccaccgaauccaucgugcgguuccccaauaucaccaaucugugccccuucggcgagguguucaaugccaccagauucgccucuguguacgccuggaaccggaagcggaucagcaauugcguggccgacuacuccgugcuguacaacuccgccagcuucagcaccuucaagugcuacggcguguccccuaccaagcugaacgaccugugcuucacaaacguguacgccgacagcuucgugauccggggagaugaagugcggcagauugccccuggacagacaggcaagaucgccgacuacaacuacaagcugcccgacgacuucaccggcugugugauugccuggaacagcaacaaccuggacuccaaagucggcggcaacuacaauuaccuguaccggcuguuccggaaguccaaucugaagcccuucgagcgggacaucagcaccgaaaucuaucaggccggcagcaccccuugcaacggcguggaaggcuucaacugcuacuucccacugcaguccuacggcuuucagcccacaaauggcgugggcuaucagcccuacagagugguggugcugagcuucgaacugcugcaugcuccugccacagugugcggcccuaagaaaagcaccaaucucgugaagaacaaaugcgugaacuucaacuucaacggccugaccggcaccggcgugcugacagagagcaacaagaaguuccugccauuccagcaguuuggccgggauaucgccgauaccacagacgccguuagagauccccagacacuggaaauccuggacaucaccccaugcagcuucggcggagugucugugaucaccccuggcaccaacaccagcaaucagguggcagugcuguaccagggcgugaacuguaccgaagugcccguggccauucacgccgaucagcugacaccuacauggcggguguacuccaccggcagcaauguguuucagaccagagccggcugucugaucggagccgagcacgugaacaauagcuacgagugcgacauccccaucggcgcuggcaucugugccagcuaccagacacagacaaacagccccagacgggcuagaagcguggccagccagagcaucauugccuacacaaugucucugggcgccgagaacagcguggccuacuccaacaacucuaucgcuauccccaccaacuucaccaucagcgugaccaccgagauccugccuguguccaugaccaagaccagcguggacugcaccauguacaucugcggcgauuccaccgagugcuccaaccugcugcugcaguacggcagcuucugcacccagcugaauagagcccugacagggaucgccguggaacaggacaagaacacccaagagguguucgcccaagugaagcaaaucuacaagaccccuccuaucaaggacuucggcggcuucaauuucagccagauucugcccgauccuagcaagcccagcaagcggagcuucaucgaggaccugcuguucaacaaagugacacuggccgacgccggcuucaucaagcaguauggcgauugucugggcgacauugccgccagggaucugauuugcgcccagaaguuuaacggacugacagugcugccuccucugcugaccgaugagaugaucgcccaguacacaucugcccugcuggccggcacaaucacaagcggcuggacauuuggagcuggcgccgcucugcagauccccuuugcuaugcagauggccuaccgguucaacggcaucggagugacccagaaugugcuguacgagaaccagaagcugaucgccaaccaguucaacagcgccaucggcaagauccaggacagccugagcagcacagcaagcgcccugggaaagcugcaggacguggucaaccagaaugcccaggcacugaacacccuggucaagcagcuguccuccaacuucggcgccaucagcucugugcugaacgauauccugagcagacuggacaaggucgaggccgaggugcagaucgacagacugaucacaggcagacugcagagccuccagacauacgugacccagcagcugaucagagccgccgagauuagagccucugccaaucuggccgccaccaagaugucugagugugugcugggccagagcaagagaguggacuuuugcggcaagggcuaccaccugaugagcuucccucagucugccccucacggcgugguguuucugcacgugacauaugugcccgcucaagagaagaauuucaccaccgcuccagccaucugccacgacggcaaagcccacuuuccuagagaaggcguguucguguccaacggcacccauugguucgugacacagcggaacuucuacgagccccagaucaucaccaccgacaacaccuucgugucuggcaacugcgacguugugaucggcauugugaacaauaccguguacgacccucugcagcccgagcuggacagcuucaaagaggaacuggacaaguacuuuaagaaccacacaagccccgacguggaccugggcgauaucagcggaaucaaugccagcgucgugaacauccagaaagagaucgaccggcugaacgagguggccaagaaucugaacgagagccugaucgaccugcaagaacuggggaaguacgagcaguacaucaaguggcccugguacaucuggcugggcuuuaucgccggacugauugccaucgugauggucacaaucaugcuguguugcaugaccagcugcuguagcugccugaagggcuguuguagcuguggcagcugcugcaaguucgacgaggacgauucugagcccgugcugaagggcgugaaacugcacuacaccugauaauaggcuggagccucgguggccuagcuucuugccccuugggccuccccccagccccuccuccccuuccugcacccguacccccguggucuuugaauaaagucugagugggcggcaaaaaaaaaaaaaaaaaaaaaaaaaaaaaaaaaaaaaaaaaaaaaaaaaaaaaaaaaaaaaaaaaaaaaaaaaaaaaaaaaaaaaaaaaaaaaaaaaaaaucuag

SEQ ID NO: 26568 - RNA, 4100 nt, Artificial Sequence
  SARS-CoV-2/Wuhan/WIV05/2019__EPI_ISL_402128 spike protein mRNA gc mod (1-1273)(Y453F_D614G)
gggaaauaagagagaaaagaagaguaagaagaaauauaagaccccggcgccgccaccauguucguguuucuggugcugcugccccugguguccagccagugugugaaccugaccaccagaacacagcugccuccagccuacaccaacagcuucaccagaggcguguacuaccccgacaagguguucagauccagcgugcugcacucuacccaggaccuguuccugccuuucuucagcaacgugaccugguuccacgccauccacguguccggcaccaauggcaccaagagauucgacaaccccgugcugcccuucaacgacgggguguacuuugccagcaccgagaaguccaacaucaucagaggcuggaucuucggcaccacacuggacagcaagacccagagccugcugaucgugaacaacgccaccaacguggucaucaaagugugcgaguuccaguucugcaacgaccccuuccugggcgucuacuaccacaagaacaacaagagcuggauggaaagcgaguuccggguguacagcagcgccaacaacugcaccuucgaguacgugucccagccuuuccugauggaccuggaaggcaagcagggcaacuucaagaaccugcgcgaguucguguucaagaacaucgacggcuacuucaaaaucuacagcaagcacaccccuaucaaccucgugcgggaucugccucagggcuucucugcucuggaaccccugguggaucugcccaucggcaucaacaucacccgguuucagacacugcuggcccugcacagaagcuaccugacaccuggcgauagcagcagcggauggacagcuggugccgccgcuuacuaugugggcuaccugcagccuagaaccuuccugcugaaguacaacgagaacggcaccaucaccgacgccguggauugugcucuggauccucugagcgagacaaagugcacccugaaguccuucaccguggaaaagggcaucuaccagaccagcaacuuccgggugcagcccaccgaauccaucgugcgguuccccaauaucaccaaucugugccccuucggcgagguguucaaugccaccagauucgccucuguguacgccuggaaccggaagcggaucagcaauugcguggccgacuacuccgugcuguacaacuccgccagcuucagcaccuucaagugcuacggcguguccccuaccaagcugaacgaccugugcuucacaaacguguacgccgacagcuucgugauccggggagaugaagugcggcagauugccccuggacagacaggcaagaucgccgacuacaacuacaagcugcccgacgacuucaccggcugugugauugccuggaacagcaacaaccuggacuccaaagucggcggcaacuacaauuaccuguuccggcuguuccggaaguccaaucugaagcccuucgagcgggacaucagcaccgaaaucuaucaggccggcagcaccccuugcaacggcguggaaggcuucaacugcuacuucccacugcaguccuacggcuuucagcccacaaauggcgugggcuaucagcccuacagagugguggugcugagcuucgaacugcugcaugcuccugccacagugugcggcccuaagaaaagcaccaaucucgugaagaacaaaugcgugaacuucaacuucaacggccugaccggcaccggcgugcugacagagagcaacaagaaguuccugccauuccagcaguuuggccgggauaucgccgauaccacagacgccguuagagauccccagacacuggaaauccuggacaucaccccaugcagcuucggcggagugucugugaucaccccuggcaccaacaccagcaaucagguggcagugcuguaccagggcgugaacuguaccgaagugcccguggccauucacgccgaucagcugacaccuacauggcggguguacuccaccggcagcaauguguuucagaccagagccggcugucugaucggagccgagcacgugaacaauagcuacgagugcgacauccccaucggcgcuggcaucugugccagcuaccagacacagacaaacagccccagacgggcuagaagcguggccagccagagcaucauugccuacacaaugucucugggcgccgagaacagcguggccuacuccaacaacucuaucgcuauccccaccaacuucaccaucagcgugaccaccgagauccugccuguguccaugaccaagaccagcguggacugcaccauguacaucugcggcgauuccaccgagugcuccaaccugcugcugcaguacggcagcuucugcacccagcugaauagagcccugacagggaucgccguggaacaggacaagaacacccaagagguguucgcccaagugaagcaaaucuacaagaccccuccuaucaaggacuucggcggcuucaauuucagccagauucugcccgauccuagcaagcccagcaagcggagcuucaucgaggaccugcuguucaacaaagugacacuggccgacgccggcuucaucaagcaguauggcgauugucugggcgacauugccgccagggaucugauuugcgcccagaaguuuaacggacugacagugcugccuccucugcugaccgaugagaugaucgcccaguacacaucugcccugcuggccggcacaaucacaagcggcuggacauuuggagcuggcgccgcucugcagauccccuuugcuaugcagauggccuaccgguucaacggcaucggagugacccagaaugugcuguacgagaaccagaagcugaucgccaaccaguucaacagcgccaucggcaagauccaggacagccugagcagcacagcaagcgcccugggaaagcugcaggacguggucaaccagaaugcccaggcacugaacacccuggucaagcagcuguccuccaacuucggcgccaucagcucugugcugaacgauauccugagcagacuggacaaggucgaggccgaggugcagaucgacagacugaucacaggcagacugcagagccuccagacauacgugacccagcagcugaucagagccgccgagauuagagccucugccaaucuggccgccaccaagaugucugagugugugcugggccagagcaagagaguggacuuuugcggcaagggcuaccaccugaugagcuucccucagucugccccucacggcgugguguuucugcacgugacauaugugcccgcucaagagaagaauuucaccaccgcuccagccaucugccacgacggcaaagcccacuuuccuagagaaggcguguucguguccaacggcacccauugguucgugacacagcggaacuucuacgagccccagaucaucaccaccgacaacaccuucgugucuggcaacugcgacguugugaucggcauugugaacaauaccguguacgacccucugcagcccgagcuggacagcuucaaagaggaacuggacaaguacuuuaagaaccacacaagccccgacguggaccugggcgauaucagcggaaucaaugccagcgucgugaacauccagaaagagaucgaccggcugaacgagguggccaagaaucugaacgagagccugaucgaccugcaagaacuggggaaguacgagcaguacaucaaguggcccugguacaucuggcugggcuuuaucgccggacugauugccaucgugauggucacaaucaugcuguguugcaugaccagcugcuguagcugccugaagggcuguuguagcuguggcagcugcugcaaguucgacgaggacgauucugagcccgugcugaagggcgugaaacugcacuacaccugauaauaggcuggagccucgguggccuagcuucuugccccuugggccuccccccagccccuccuccccuuccugcacccguacccccguggucuuugaauaaagucugagugggcggcaaaaaaaaaaaaaaaaaaaaaaaaaaaaaaaaaaaaaaaaaaaaaaaaaaaaaaaaaaaaaaaaaaaaaaaaaaaaaaaaaaaaaaaaaaaaaaaaaaaaucuag

SEQ ID NO: 26569 - RNA, 4100 nt, Artificial Sequence
  SARS-CoV-2/Wuhan/WIV05/2019__EPI_ISL_402128 spike protein mRNA gc mod (1-1273)(D614G_I692V)
gggaaauaagagagaaaagaagaguaagaagaaauauaagaccccggcgccgccaccauguucguguuucuggugcugcugccccugguguccagccagugugugaaccugaccaccagaacacagcugccuccagccuacaccaacagcuucaccagaggcguguacuaccccgacaagguguucagauccagcgugcugcacucuacccaggaccuguuccugccuuucuucagcaacgugaccugguuccacgccauccacguguccggcaccaauggcaccaagagauucgacaaccccgugcugcccuucaacgacgggguguacuuugccagcaccgagaaguccaacaucaucagaggcuggaucuucggcaccacacuggacagcaagacccagagccugcugaucgugaacaacgccaccaacguggucaucaaagugugcgaguuccaguucugcaacgaccccuuccugggcgucuacuaccacaagaacaacaagagcuggauggaaagcgaguuccggguguacagcagcgccaacaacugcaccuucgaguacgugucccagccuuuccugauggaccuggaaggcaagcagggcaacuucaagaaccugcgcgaguucguguucaagaacaucgacggcuacuucaaaaucuacagcaagcacaccccuaucaaccucgugcgggaucugccucagggcuucucugcucuggaaccccugguggaucugcccaucggcaucaacaucacccgguuucagacacugcuggcccugcacagaagcuaccugacaccuggcgauagcagcagcggauggacagcuggugccgccgcuuacuaugugggcuaccugcagccuagaaccuuccugcugaaguacaacgagaacggcaccaucaccgacgccguggauugugcucuggauccucugagcgagacaaagugcacccugaaguccuucaccguggaaaagggcaucuaccagaccagcaacuuccgggugcagcccaccgaauccaucgugcgguuccccaauaucaccaaucugugccccuucggcgagguguucaaugccaccagauucgccucuguguacgccuggaaccggaagcggaucagcaauugcguggccgacuacuccgugcuguacaacuccgccagcuucagcaccuucaagugcuacggcguguccccuaccaagcugaacgaccugugcuucacaaacguguacgccgacagcuucgugauccggggagaugaagugcggcagauugccccuggacagacaggcaagaucgccgacuacaacuacaagcugcccgacgacuucaccggcugugugauugccuggaacagcaacaaccuggacuccaaagucggcggcaacuacaauuaccuguaccggcuguuccggaaguccaaucugaagcccuucgagcgggacaucagcaccgaaaucuaucaggccggcagcaccccuugcaacggcguggaaggcuucaacugcuacuucccacugcaguccuacggcuuucagcccacaaauggcgugggcuaucagcccuacagagugguggugcugagcuucgaacugcugcaugcuccugccacagugugcggcccuaagaaaagcaccaaucucgugaagaacaaaugcgugaacuucaacuucaacggccugaccggcaccggcgugcugacagagagcaacaagaaguuccugccauuccagcaguuuggccgggauaucgccgauaccacagacgccguuagagauccccagacacuggaaauccuggacaucaccccaugcagcuucggcggagugucugugaucaccccuggcaccaacaccagcaaucagguggcagugcuguaccagggcgugaacuguaccgaagugcccguggccauucacgccgaucagcugacaccuacauggcggguguacuccaccggcagcaauguguuucagaccagagccggcugucugaucggagccgagcacgugaacaauagcuacgagugcgacauccccaucggcgcuggcaucugugccagcuaccagacacagacaaacagccccagacgggcuagaagcguggccagccagagcgugauugccuacacaaugucucugggcgccgagaacagcguggccuacuccaacaacucuaucgcuauccccaccaacuucaccaucagcgugaccaccgagauccugccuguguccaugaccaagaccagcguggacugcaccauguacaucugcggcgauuccaccgagugcuccaaccugcugcugcaguacggcagcuucugcacccagcugaauagagcccugacagggaucgccguggaacaggacaagaacacccaagagguguucgcccaagugaagcaaaucuacaagaccccuccuaucaaggacuucggcggcuucaauuucagccagauucugcccgauccuagcaagcccagcaagcggagcuucaucgaggaccugcuguucaacaaagugacacuggccgacgccggcuucaucaagcaguauggcgauugucugggcgacauugccgccagggaucugauuugcgcccagaaguuuaacggacugacagugcugccuccucugcugaccgaugagaugaucgcccaguacacaucugcccugcuggccggcacaaucacaagcggcuggacauuuggagcuggcgccgcucugcagauccccuuugcuaugcagauggccuaccgguucaacggcaucggagugacccagaaugugcuguacgagaaccagaagcugaucgccaaccaguucaacagcgccaucggcaagauccaggacagccugagcagcacagcaagcgcccugggaaagcugcaggacguggucaaccagaaugcccaggcacugaacacccuggucaagcagcuguccuccaacuucggcgccaucagcucugugcugaacgauauccugagcagacuggacaaggucgaggccgaggugcagaucgacagacugaucacaggcagacugcagagccuccagacauacgugacccagcagcugaucagagccgccgagauuagagccucugccaaucuggccgccaccaagaugucugagugugugcugggccagagcaagagaguggacuuuugcggcaagggcuaccaccugaugagcuucccucagucugccccucacggcgugguguuucugcacgugacauaugugcccgcucaagagaagaauuucaccaccgcuccagccaucugccacgacggcaaagcccacuuuccuagagaaggcguguucguguccaacggcacccauugguucgugacacagcggaacuucuacgagccccagaucaucaccaccgacaacaccuucgugucuggcaacugcgacguugugaucggcauugugaacaauaccguguacgacccucugcagcccgagcuggacagcuucaaagaggaacuggacaaguacuuuaagaaccacacaagccccgacguggaccugggcgauaucagcggaaucaaugccagcgucgugaacauccagaaagagaucgaccggcugaacgagguggccaagaaucugaacgagagccugaucgaccugcaagaacuggggaaguacgagcaguacaucaaguggcccugguacaucuggcugggcuuuaucgccggacugauugccaucgugauggucacaaucaugcuguguugcaugaccagcugcuguagcugccugaagggcuguuguagcuguggcagcugcugcaaguucgacgaggacgauucugagcccgugcugaagggcgugaaacugcacuacaccugauaauaggcuggagccucgguggccuagcuucuugccccuugggccuccccccagccccuccuccccuuccugcacccguacccccguggucuuugaauaaagucugagugggcggcaaaaaaaaaaaaaaaaaaaaaaaaaaaaaaaaaaaaaaaaaaaaaaaaaaaaaaaaaaaaaaaaaaaaaaaaaaaaaaaaaaaaaaaaaaaaaaaaaaaaucuag

SEQ ID NO: 26570 - RNA, 4100 nt, Artificial Sequence
  SARS-CoV-2/Wuhan/WIV05/2019__EPI_ISL_402128 spike protein mRNA gc mod (1-1273)(D614G_M1229I)
gggaaauaagagagaaaagaagaguaagaagaaauauaagaccccggcgccgccaccauguucguguuucuggugcugcugccccugguguccagccagugugugaaccugaccaccagaacacagcugccuccagccuacaccaacagcuucaccagaggcguguacuaccccgacaagguguucagauccagcgugcugcacucuacccaggaccuguuccugccuuucuucagcaacgugaccugguuccacgccauccacguguccggcaccaauggcaccaagagauucgacaaccccgugcugcccuucaacgacgggguguacuuugccagcaccgagaaguccaacaucaucagaggcuggaucuucggcaccacacuggacagcaagacccagagccugcugaucgugaacaacgccaccaacguggucaucaaagugugcgaguuccaguucugcaacgaccccuuccugggcgucuacuaccacaagaacaacaagagcuggauggaaagcgaguuccggguguacagcagcgccaacaacugcaccuucgaguacgugucccagccuuuccugauggaccuggaaggcaagcagggcaacuucaagaaccugcgcgaguucguguucaagaacaucgacggcuacuucaaaaucuacagcaagcacaccccuaucaaccucgugcgggaucugccucagggcuucucugcucuggaaccccugguggaucugcccaucggcaucaacaucacccgguuucagacacugcuggcccugcacagaagcuaccugacaccuggcgauagcagcagcggauggacagcuggugccgccgcuuacuaugugggcuaccugcagccuagaaccuuccugcugaaguacaacgagaacggcaccaucaccgacgccguggauugugcucuggauccucugagcgagacaaagugcacccugaaguccuucaccguggaaaagggcaucuaccagaccagcaacuuccgggugcagcccaccgaauccaucgugcgguuccccaauaucaccaaucugugccccuucggcgagguguucaaugccaccagauucgccucuguguacgccuggaaccggaagcggaucagcaauugcguggccgacuacuccgugcuguacaacuccgccagcuucagcaccuucaagugcuacggcguguccccuaccaagcugaacgaccugugcuucacaaacguguacgccgacagcuucgugauccggggagaugaagugcggcagauugccccuggacagacaggcaagaucgccgacuacaacuacaagcugcccgacgacuucaccggcugugugauugccuggaacagcaacaaccuggacuccaaagucggcggcaacuacaauuaccuguaccggcuguuccggaaguccaaucugaagcccuucgagcgggacaucagcaccgaaaucuaucaggccggcagcaccccuugcaacggcguggaaggcuucaacugcuacuucccacugcaguccuacggcuuucagcccacaaauggcgugggcuaucagcccuacagagugguggugcugagcuucgaacugcugcaugcuccugccacagugugcggcccuaagaaaagcaccaaucucgugaagaacaaaugcgugaacuucaacuucaacggccugaccggcaccggcgugcugacagagagcaacaagaaguuccugccauuccagcaguuuggccgggauaucgccgauaccacagacgccguuagagauccccagacacuggaaauccuggacaucaccccaugcagcuucggcggagugucugugaucaccccuggcaccaacaccagcaaucagguggcagugcuguaccagggcgugaacuguaccgaagugcccguggccauucacgccgaucagcugacaccuacauggcggguguacuccaccggcagcaauguguuucagaccagagccggcugucugaucggagccgagcacgugaacaauagcuacgagugcgacauccccaucggcgcuggcaucugugccagcuaccagacacagacaaacagccccagacgggcuagaagcguggccagccagagcaucauugccuacacaaugucucugggcgccgagaacagcguggccuacuccaacaacucuaucgcuauccccaccaacuucaccaucagcgugaccaccgagauccugccuguguccaugaccaagaccagcguggacugcaccauguacaucugcggcgauuccaccgagugcuccaaccugcugcugcaguacggcagcuucugcacccagcugaauagagcccugacagggaucgccguggaacaggacaagaacacccaagagguguucgcccaagugaagcaaaucuacaagaccccuccuaucaaggacuucggcggcuucaauuucagccagauucugcccgauccuagcaagcccagcaagcggagcuucaucgaggaccugcuguucaacaaagugacacuggccgacgccggcuucaucaagcaguauggcgauugucugggcgacauugccgccagggaucugauuugcgcccagaaguuuaacggacugacagugcugccuccucugcugaccgaugagaugaucgcccaguacacaucugcccugcuggccggcacaaucacaagcggcuggacauuuggagcuggcgccgcucugcagauccccuuugcuaugcagauggccuaccgguucaacggcaucggagugacccagaaugugcuguacgagaaccagaagcugaucgccaaccaguucaacagcgccaucggcaagauccaggacagccugagcagcacagcaagcgcccugggaaagcugcaggacguggucaaccagaaugcccaggcacugaacacccuggucaagcagcuguccuccaacuucggcgccaucagcucugugcugaacgauauccugagcagacuggacaaggucgaggccgaggugcagaucgacagacugaucacaggcagacugcagagccuccagacauacgugacccagcagcugaucagagccgccgagauuagagccucugccaaucuggccgccaccaagaugucugagugugugcugggccagagcaagagaguggacuuuugcggcaagggcuaccaccugaugagcuucccucagucugccccucacggcgugguguuucugcacgugacauaugugcccgcucaagagaagaauuucaccaccgcuccagccaucugccacgacggcaaagcccacuuuccuagagaaggcguguucguguccaacggcacccauugguucgugacacagcggaacuucuacgagccccagaucaucaccaccgacaacaccuucgugucuggcaacugcgacguugugaucggcauugugaacaauaccguguacgacccucugcagcccgagcuggacagcuucaaagaggaacuggacaaguacuuuaagaaccacacaagccccgacguggaccugggcgauaucagcggaaucaaugccagcgucgugaacauccagaaagagaucgaccggcugaacgagguggccaagaaucugaacgagagccugaucgaccugcaagaacuggggaaguacgagcaguacaucaaguggcccugguacaucuggcugggcuuuaucgccggacugauugccaucgugaucgucacaaucaugcuguguugcaugaccagcugcuguagcugccugaagggcuguuguagcuguggcagcugcugcaaguucgacgaggacgauucugagcccgugcugaagggcgugaaacugcacuacaccugauaauaggcuggagccucgguggccuagcuucuugccccuugggccuccccccagccccuccuccccuuccugcacccguacccccguggucuuugaauaaagucugagugggcggcaaaaaaaaaaaaaaaaaaaaaaaaaaaaaaaaaaaaaaaaaaaaaaaaaaaaaaaaaaaaaaaaaaaaaaaaaaaaaaaaaaaaaaaaaaaaaaaaaaaaucuag

SEQ ID NO: 26571 - RNA, 4094 nt, Artificial Sequence
  SARS-CoV-2/Wuhan/WIV05/2019__EPI_ISL_402128 spike protein mRNA gc mod (1-1273)(H69del_V70del_A222V_Y453F_S477N_D614G_I692V)
gggaaauaagagagaaaagaagaguaagaagaaauauaagaccccggcgccgccaccauguucguguuucuggugcugcugccccugguguccagccagugugugaaccugaccaccagaacacagcugccuccagccuacaccaacagcuucaccagaggcguguacuaccccgacaagguguucagauccagcgugcugcacucuacccaggaccuguuccugccuuucuucagcaacgugaccugguuccacgccaucuccggcaccaauggcaccaagagauucgacaaccccgugcugcccuucaacgacgggguguacuuugccagcaccgagaaguccaacaucaucagaggcuggaucuucggcaccacacuggacagcaagacccagagccugcugaucgugaacaacgccaccaacguggucaucaaagugugcgaguuccaguucugcaacgaccccuuccugggcgucuacuaccacaagaacaacaagagcuggauggaaagcgaguuccggguguacagcagcgccaacaacugcaccuucgaguacgugucccagccuuuccugauggaccuggaaggcaagcagggcaacuucaagaaccugcgcgaguucguguucaagaacaucgacggcuacuucaaaaucuacagcaagcacaccccuaucaaccucgugcgggaucugccucagggcuucucugugcuggaaccccugguggaucugcccaucggcaucaacaucacccgguuucagacacugcuggcccugcacagaagcuaccugacaccuggcgauagcagcagcggauggacagcuggugccgccgcuuacuaugugggcuaccugcagccuagaaccuuccugcugaaguacaacgagaacggcaccaucaccgacgccguggauugugcucuggauccucugagcgagacaaagugcacccugaaguccuucaccguggaaaagggcaucuaccagaccagcaacuuccgggugcagcccaccgaauccaucgugcgguuccccaauaucaccaaucugugccccuucggcgagguguucaaugccaccagauucgccucuguguacgccuggaaccggaagcggaucagcaauugcguggccgacuacuccgugcuguacaacuccgccagcuucagcaccuucaagugcuacggcguguccccuaccaagcugaacgaccugugcuucacaaacguguacgccgacagcuucgugauccggggagaugaagugcggcagauugccccuggacagacaggcaagaucgccgacuacaacuacaagcugcccgacgacuucaccggcugugugauugccuggaacagcaacaaccuggacuccaaagucggcggcaacuacaauuaccuguuccggcuguuccggaaguccaaucugaagcccuucgagcgggacaucagcaccgaaaucuaucaggccggcaacaccccuugcaacggcguggaaggcuucaacugcuacuucccacugcaguccuacggcuuucagcccacaaauggcgugggcuaucagcccuacagagugguggugcugagcuucgaacugcugcaugcuccugccacagugugcggcccuaagaaaagcaccaaucucgugaagaacaaaugcgugaacuucaacuucaacggccugaccggcaccggcgugcugacagagagcaacaagaaguuccugccauuccagcaguuuggccgggauaucgccgauaccacagacgccguuagagauccccagacacuggaaauccuggacaucaccccaugcagcuucggcggagugucugugaucaccccuggcaccaacaccagcaaucagguggcagugcuguaccagggcgugaacuguaccgaagugcccguggccauucacgccgaucagcugacaccuacauggcggguguacuccaccggcagcaauguguuucagaccagagccggcugucugaucggagccgagcacgugaacaauagcuacgagugcgacauccccaucggcgcuggcaucugugccagcuaccagacacagacaaacagccccagacgggcuagaagcguggccagccagagcgugauugccuacacaaugucucugggcgccgagaacagcguggccuacuccaacaacucuaucgcuauccccaccaacuucaccaucagcgugaccaccgagauccugccuguguccaugaccaagaccagcguggacugcaccauguacaucugcggcgauuccaccgagugcuccaaccugcugcugcaguacggcagcuucugcacccagcugaauagagcccugacagggaucgccguggaacaggacaagaacacccaagagguguucgcccaagugaagcaaaucuacaagaccccuccuaucaaggacuucggcggcuucaauuucagccagauucugcccgauccuagcaagcccagcaagcggagcuucaucgaggaccugcuguucaacaaagugacacuggccgacgccggcuucaucaagcaguauggcgauugucugggcgacauugccgccagggaucugauuugcgcccagaaguuuaacggacugacagugcugccuccucugcugaccgaugagaugaucgcccaguacacaucugcccugcuggccggcacaaucacaagcggcuggacauuuggagcuggcgccgcucugcagauccccuuugcuaugcagauggccuaccgguucaacggcaucggagugacccagaaugugcuguacgagaaccagaagcugaucgccaaccaguucaacagcgccaucggcaagauccaggacagccugagcagcacagcaagcgcccugggaaagcugcaggacguggucaaccagaaugcccaggcacugaacacccuggucaagcagcuguccuccaacuucggcgccaucagcucugugcugaacgauauccugagcagacuggacaaggucgaggccgaggugcagaucgacagacugaucacaggcagacugcagagccuccagacauacgugacccagcagcugaucagagccgccgagauuagagccucugccaaucuggccgccaccaagaugucugagugugugcugggccagagcaagagaguggacuuuugcggcaagggcuaccaccugaugagcuucccucagucugccccucacggcgugguguuucugcacgugacauaugugcccgcucaagagaagaauuucaccaccgcuccagccaucugccacgacggcaaagcccacuuuccuagagaaggcguguucguguccaacggcacccauugguucgugacacagcggaacuucuacgagccccagaucaucaccaccgacaacaccuucgugucuggcaacugcgacguugugaucggcauugugaacaauaccguguacgacccucugcagcccgagcuggacagcuucaaagaggaacuggacaaguacuuuaagaaccacacaagccccgacguggaccugggcgauaucagcggaaucaaugccagcgucgugaacauccagaaagagaucgaccggcugaacgagguggccaagaaucugaacgagagccugaucgaccugcaagaacuggggaaguacgagcaguacaucaaguggcccugguacaucuggcugggcuuuaucgccggacugauugccaucgugauggucacaaucaugcuguguugcaugaccagcugcuguagcugccugaagggcuguuguagcuguggcagcugcugcaaguucgacgaggacgauucugagcccgugcugaagggcgugaaacugcacuacaccugauaauaggcuggagccucgguggccuagcuucuugccccuugggccuccccccagccccuccuccccuuccugcacccguacccccguggucuuugaauaaagucugagugggcggcaaaaaaaaaaaaaaaaaaaaaaaaaaaaaaaaaaaaaaaaaaaaaaaaaaaaaaaaaaaaaaaaaaaaaaaaaaaaaaaaaaaaaaaaaaaaaaaaaaaaucuag

SEQ ID NO: 26572 - RNA, 4094 nt, Artificial Sequence
  SARS-CoV-2/Wuhan/WIV05/2019__EPI_ISL_402128 spike protein mRNA gc mod (1-1273)(H69del_V70del_Y453F_D614G_I692V_M1229I)
gggaaauaagagagaaaagaagaguaagaagaaauauaagaccccggcgccgccaccauguucguguuucuggugcugcugccccugguguccagccagugugugaaccugaccaccagaacacagcugccuccagccuacaccaacagcuucaccagaggcguguacuaccccgacaagguguucagauccagcgugcugcacucuacccaggaccuguuccugccuuucuucagcaacgugaccugguuccacgccaucuccggcaccaauggcaccaagagauucgacaaccccgugcugcccuucaacgacgggguguacuuugccagcaccgagaaguccaacaucaucagaggcuggaucuucggcaccacacuggacagcaagacccagagccugcugaucgugaacaacgccaccaacguggucaucaaagugugcgaguuccaguucugcaacgaccccuuccugggcgucuacuaccacaagaacaacaagagcuggauggaaagcgaguuccggguguacagcagcgccaacaacugcaccuucgaguacgugucccagccuuuccugauggaccuggaaggcaagcagggcaacuucaagaaccugcgcgaguucguguucaagaacaucgacggcuacuucaaaaucuacagcaagcacaccccuaucaaccucgugcgggaucugccucagggcuucucugcucuggaaccccugguggaucugcccaucggcaucaacaucacccgguuucagacacugcuggcccugcacagaagcuaccugacaccuggcgauagcagcagcggauggacagcuggugccgccgcuuacuaugugggcuaccugcagccuagaaccuuccugcugaaguacaacgagaacggcaccaucaccgacgccguggauugugcucuggauccucugagcgagacaaagugcacccugaaguccuucaccguggaaaagggcaucuaccagaccagcaacuuccgggugcagcccaccgaauccaucgugcgguuccccaauaucaccaaucugugccccuucggcgagguguucaaugccaccagauucgccucuguguacgccuggaaccggaagcggaucagcaauugcguggccgacuacuccgugcuguacaacuccgccagcuucagcaccuucaagugcuacggcguguccccuaccaagcugaacgaccugugcuucacaaacguguacgccgacagcuucgugauccggggagaugaagugcggcagauugccccuggacagacaggcaagaucgccgacuacaacuacaagcugcccgacgacuucaccggcugugugauugccuggaacagcaacaaccuggacuccaaagucggcggcaacuacaauuaccuguuccggcuguuccggaaguccaaucugaagcccuucgagcgggacaucagcaccgaaaucuaucaggccggcagcaccccuugcaacggcguggaaggcuucaacugcuacuucccacugcaguccuacggcuuucagcccacaaauggcgugggcuaucagcccuacagagugguggugcugagcuucgaacugcugcaugcuccugccacagugugcggcccuaagaaaagcaccaaucucgugaagaacaaaugcgugaacuucaacuucaacggccugaccggcaccggcgugcugacagagagcaacaagaaguuccugccauuccagcaguuuggccgggauaucgccgauaccacagacgccguuagagauccccagacacuggaaauccuggacaucaccccaugcagcuucggcggagugucugugaucaccccuggcaccaacaccagcaaucagguggcagugcuguaccagggcgugaacuguaccgaagugcccguggccauucacgccgaucagcugacaccuacauggcggguguacuccaccggcagcaauguguuucagaccagagccggcugucugaucggagccgagcacgugaacaauagcuacgagugcgacauccccaucggcgcuggcaucugugccagcuaccagacacagacaaacagccccagacgggcuagaagcguggccagccagagcgugauugccuacacaaugucucugggcgccgagaacagcguggccuacuccaacaacucuaucgcuauccccaccaacuucaccaucagcgugaccaccgagauccugccuguguccaugaccaagaccagcguggacugcaccauguacaucugcggcgauuccaccgagugcuccaaccugcugcugcaguacggcagcuucugcacccagcugaauagagcccugacagggaucgccguggaacaggacaagaacacccaagagguguucgcccaagugaagcaaaucuacaagaccccuccuaucaaggacuucggcggcuucaauuucagccagauucugcccgauccuagcaagcccagcaagcggagcuucaucgaggaccugcuguucaacaaagugacacuggccgacgccggcuucaucaagcaguauggcgauugucugggcgacauugccgccagggaucugauuugcgcccagaaguuuaacggacugacagugcugccuccucugcugaccgaugagaugaucgcccaguacacaucugcccugcuggccggcacaaucacaagcggcuggacauuuggagcuggcgccgcucugcagauccccuuugcuaugcagauggccuaccgguucaacggcaucggagugacccagaaugugcuguacgagaaccagaagcugaucgccaaccaguucaacagcgccaucggcaagauccaggacagccugagcagcacagcaagcgcccugggaaagcugcaggacguggucaaccagaaugcccaggcacugaacacccuggucaagcagcuguccuccaacuucggcgccaucagcucugugcugaacgauauccugagcagacuggacaaggucgaggccgaggugcagaucgacagacugaucacaggcagacugcagagccuccagacauacgugacccagcagcugaucagagccgccgagauuagagccucugccaaucuggccgccaccaagaugucugagugugugcugggccagagcaagagaguggacuuuugcggcaagggcuaccaccugaugagcuucccucagucugccccucacggcgugguguuucugcacgugacauaugugcccgcucaagagaagaauuucaccaccgcuccagccaucugccacgacggcaaagcccacuuuccuagagaaggcguguucguguccaacggcacccauugguucgugacacagcggaacuucuacgagccccagaucaucaccaccgacaacaccuucgugucuggcaacugcgacguugugaucggcauugugaacaauaccguguacgacccucugcagcccgagcuggacagcuucaaagaggaacuggacaaguacuuuaagaaccacacaagccccgacguggaccugggcgauaucagcggaaucaaugccagcgucgugaacauccagaaagagaucgaccggcugaacgagguggccaagaaucugaacgagagccugaucgaccugcaagaacuggggaaguacgagcaguacaucaaguggcccugguacaucuggcugggcuuuaucgccggacugauugccaucgugaucgucacaaucaugcuguguugcaugaccagcugcuguagcugccugaagggcuguuguagcuguggcagcugcugcaaguucgacgaggacgauucugagcccgugcugaagggcgugaaacugcacuacaccugauaauaggcuggagccucgguggccuagcuucuugccccuugggccuccccccagccccuccuccccuuccugcacccguacccccguggucuuugaauaaagucugagugggcggcaaaaaaaaaaaaaaaaaaaaaaaaaaaaaaaaaaaaaaaaaaaaaaaaaaaaaaaaaaaaaaaaaaaaaaaaaaaaaaaaaaaaaaaaaaaaaaaaaaaaucuag

SEQ ID NO: 26573 - RNA, 4091 nt, Artificial Sequence
  SARS-CoV-2/Wuhan/WIV05/2019__EPI_ISL_402128 spike protein mRNA gc mod (1-1273)(H69del_V70del_Y144del_N501Y_A570D_D614G_P681H_T716I_S982 A_D1118H)
gggaaauaagagagaaaagaagaguaagaagaaauauaagaccccggcgccgccaccauguucguguuucuggugcugcugccccugguguccagccagugugugaaccugaccaccagaacacagcugccuccagccuacaccaacagcuucaccagaggcguguacuaccccgacaagguguucagauccagcgugcugcacucuacccaggaccuguuccugccuuucuucagcaacgugaccugguuccacgccaucuccggcaccaauggcaccaagagauucgacaaccccgugcugcccuucaacgacgggguguacuuugccagcaccgagaaguccaacaucaucagaggcuggaucuucggcaccacacuggacagcaagacccagagccugcugaucgugaacaacgccaccaacguggucaucaaagugugcgaguuccaguucugcaacgaccccuuccugggcgucuaccacaagaacaacaagagcuggauggaaagcgaguuccggguguacagcagcgccaacaacugcaccuucgaguacgugucccagccuuuccugauggaccuggaaggcaagcagggcaacuucaagaaccugcgcgaguucguguucaagaacaucgacggcuacuucaaaaucuacagcaagcacaccccuaucaaccucgugcgggaucugccucagggcuucucugcucuggaaccccugguggaucugcccaucggcaucaacaucacccgguuucagacacugcuggcccugcacagaagcuaccugacaccuggcgauagcagcagcggauggacagcuggugccgccgcuuacuaugugggcuaccugcagccuagaaccuuccugcugaaguacaacgagaacggcaccaucaccgacgccguggauugugcucuggauccucugagcgagacaaagugcacccugaaguccuucaccguggaaaagggcaucuaccagaccagcaacuuccgggugcagcccaccgaauccaucgugcgguuccccaauaucaccaaucugugccccuucggcgagguguucaaugccaccagauucgccucuguguacgccuggaaccggaagcggaucagcaauugcguggccgacuacuccgugcuguacaacuccgccagcuucagcaccuucaagugcuacggcguguccccuaccaagcugaacgaccugugcuucacaaacguguacgccgacagcuucgugauccggggagaugaagugcggcagauugccccuggacagacaggcaagaucgccgacuacaacuacaagcugcccgacgacuucaccggcugugugauugccuggaacagcaacaaccuggacuccaaagucggcggcaacuacaauuaccuguaccggcuguuccggaaguccaaucugaagcccuucgagcgggacaucagcaccgaaaucuaucaggccggcagcaccccuugcaacggcguggaaggcuucaacugcuacuucccacugcaguccuacggcuuucagcccacauacggcgugggcuaucagcccuacagagugguggugcugagcuucgaacugcugcaugcuccugccacagugugcggcccuaagaaaagcaccaaucucgugaagaacaaaugcgugaacuucaacuucaacggccugaccggcaccggcgugcugacagagagcaacaagaaguuccugccauuccagcaguuuggccgggauaucgacgauaccacagacgccguuagagauccccagacacuggaaauccuggacaucaccccaugcagcuucggcggagugucugugaucaccccuggcaccaacaccagcaaucagguggcagugcuguaccagggcgugaacuguaccgaagugcccguggccauucacgccgaucagcugacaccuacauggcggguguacuccaccggcagcaauguguuucagaccagagccggcugucugaucggagccgagcacgugaacaauagcuacgagugcgacauccccaucggcgcuggcaucugugccagcuaccagacacagacaaacagccacagacgggcuagaagcguggccagccagagcaucauugccuacacaaugucucugggcgccgagaacagcguggccuacuccaacaacucuaucgcuauccccaucaacuucaccaucagcgugaccaccgagauccugccuguguccaugaccaagaccagcguggacugcaccauguacaucugcggcgauuccaccgagugcuccaaccugcugcugcaguacggcagcuucugcacccagcugaauagagcccugacagggaucgccguggaacaggacaagaacacccaagagguguucgcccaagugaagcaaaucuacaagaccccuccuaucaaggacuucggcggcuucaauuucagccagauucugcccgauccuagcaagcccagcaagcggagcuucaucgaggaccugcuguucaacaaagugacacuggccgacgccggcuucaucaagcaguauggcgauugucugggcgacauugccgccagggaucugauuugcgcccagaaguuuaacggacugacagugcugccuccucugcugaccgaugagaugaucgcccaguacacaucugcccugcuggccggcacaaucacaagcggcuggacauuuggagcuggcgccgcucugcagauccccuuugcuaugcagauggccuaccgguucaacggcaucggagugacccagaaugugcuguacgagaaccagaagcugaucgccaaccaguucaacagcgccaucggcaagauccaggacagccugagcagcacagcaagcgcccugggaaagcugcaggacguggucaaccagaaugcccaggcacugaacacccuggucaagcagcuguccuccaacuucggcgccaucagcucugugcugaacgauauccuggccagacuggacaaggucgaggccgaggugcagaucgacagacugaucacaggcagacugcagagccuccagacauacgugacccagcagcugaucagagccgccgagauuagagccucugccaaucuggccgccaccaagaugucugagugugugcugggccagagcaagagaguggacuuuugcggcaagggcuaccaccugaugagcuucccucagucugccccucacggcgugguguuucugcacgugacauaugugcccgcucaagagaagaauuucaccaccgcuccagccaucugccacgacggcaaagcccacuuuccuagagaaggcguguucguguccaacggcacccauugguucgugacacagcggaacuucuacgagccccagaucaucaccacccacaacaccuucgugucuggcaacugcgacguugugaucggcauugugaacaauaccguguacgacccucugcagcccgagcuggacagcuucaaagaggaacuggacaaguacuuuaagaaccacacaagccccgacguggaccugggcgauaucagcggaaucaaugccagcgucgugaacauccagaaagagaucgaccggcugaacgagguggccaagaaucugaacgagagccugaucgaccugcaagaacuggggaaguacgagcaguacaucaaguggcccugguacaucuggcugggcuuuaucgccggacugauugccaucgugauggucacaaucaugcuguguugcaugaccagcugcuguagcugccugaagggcuguuguagcuguggcagcugcugcaaguucgacgaggacgauucugagcccgugcugaagggcgugaaacugcacuacaccugauaauaggcuggagccucgguggccuagcuucuugccccuugggccuccccccagccccuccuccccuuccugcacccguacccccguggucuuugaauaaagucugagugggcggcaaaaaaaaaaaaaaaaaaaaaaaaaaaaaaaaaaaaaaaaaaaaaaaaaaaaaaaaaaaaaaaaaaaaaaaaaaaaaaaaaaaaaaaaaaaaaaaaaaaaucuag

SEQ ID NO: 26574 - RNA, 4100 nt, Artificial Sequence
  SARS-CoV-2/Wuhan/WIV05/2019__EPI_ISL_402128 spike protein mRNA gc mod (1-1273)(K417N_E484K_N501Y_D614G)
gggaaauaagagagaaaagaagaguaagaagaaauauaagaccccggcgccgccaccauguucguguuucuggugcugcugccccugguguccagccagugugugaaccugaccaccagaacacagcugccuccagccuacaccaacagcuucaccagaggcguguacuaccccgacaagguguucagauccagcgugcugcacucuacccaggaccuguuccugccuuucuucagcaacgugaccugguuccacgccauccacguguccggcaccaauggcaccaagagauucgacaaccccgugcugcccuucaacgacgggguguacuuugccagcaccgagaaguccaacaucaucagaggcuggaucuucggcaccacacuggacagcaagacccagagccugcugaucgugaacaacgccaccaacguggucaucaaagugugcgaguuccaguucugcaacgaccccuuccugggcgucuacuaccacaagaacaacaagagcuggauggaaagcgaguuccggguguacagcagcgccaacaacugcaccuucgaguacgugucccagccuuuccugauggaccuggaaggcaagcagggcaacuucaagaaccugcgcgaguucguguucaagaacaucgacggcuacuucaaaaucuacagcaagcacaccccuaucaaccucgugcgggaucugccucagggcuucucugcucuggaaccccugguggaucugcccaucggcaucaacaucacccgguuucagacacugcuggcccugcacagaagcuaccugacaccuggcgauagcagcagcggauggacagcuggugccgccgcuuacuaugugggcuaccugcagccuagaaccuuccugcugaaguacaacgagaacggcaccaucaccgacgccguggauugugcucuggauccucugagcgagacaaagugcacccugaaguccuucaccguggaaaagggcaucuaccagaccagcaacuuccgggugcagcccaccgaauccaucgugcgguuccccaauaucaccaaucugugccccuucggcgagguguucaaugccaccagauucgccucuguguacgccuggaaccggaagcggaucagcaauugcguggccgacuacuccgugcuguacaacuccgccagcuucagcaccuucaagugcuacggcguguccccuaccaagcugaacgaccugugcuucacaaacguguacgccgacagcuucgugauccggggagaugaagugcggcagauugccccuggacagacaggcaacaucgccgacuacaacuacaagcugcccgacgacuucaccggcugugugauugccuggaacagcaacaaccuggacuccaaagucggcggcaacuacaauuaccuguaccggcuguuccggaaguccaaucugaagcccuucgagcgggacaucagcaccgaaaucuaucaggccggcagcaccccuugcaacggcgugaagggcuucaacugcuacuucccacugcaguccuacggcuuucagcccacauacggcgugggcuaucagcccuacagagugguggugcugagcuucgaacugcugcaugcuccugccacagugugcggcccuaagaaaagcaccaaucucgugaagaacaaaugcgugaacuucaacuucaacggccugaccggcaccggcgugcugacagagagcaacaagaaguuccugccauuccagcaguuuggccgggauaucgccgauaccacagacgccguuagagauccccagacacuggaaauccuggacaucaccccaugcagcuucggcggagugucugugaucaccccuggcaccaacaccagcaaucagguggcagugcuguaccagggcgugaacuguaccgaagugcccguggccauucacgccgaucagcugacaccuacauggcggguguacuccaccggcagcaauguguuucagaccagagccggcugucugaucggagccgagcacgugaacaauagcuacgagugcgacauccccaucggcgcuggcaucugugccagcuaccagacacagacaaacagccccagacgggcuagaagcguggccagccagagcaucauugccuacacaaugucucugggcgccgagaacagcguggccuacuccaacaacucuaucgcuauccccaccaacuucaccaucagcgugaccaccgagauccugccuguguccaugaccaagaccagcguggacugcaccauguacaucugcggcgauuccaccgagugcuccaaccugcugcugcaguacggcagcuucugcacccagcugaauagagcccugacagggaucgccguggaacaggacaagaacacccaagagguguucgcccaagugaagcaaaucuacaagaccccuccuaucaaggacuucggcggcuucaauuucagccagauucugcccgauccuagcaagcccagcaagcggagcuucaucgaggaccugcuguucaacaaagugacacuggccgacgccggcuucaucaagcaguauggcgauugucugggcgacauugccgccagggaucugauuugcgcccagaaguuuaacggacugacagugcugccuccucugcugaccgaugagaugaucgcccaguacacaucugcccugcuggccggcacaaucacaagcggcuggacauuuggagcuggcgccgcucugcagauccccuuugcuaugcagauggccuaccgguucaacggcaucggagugacccagaaugugcuguacgagaaccagaagcugaucgccaaccaguucaacagcgccaucggcaagauccaggacagccugagcagcacagcaagcgcccugggaaagcugcaggacguggucaaccagaaugcccaggcacugaacacccuggucaagcagcuguccuccaacuucggcgccaucagcucugugcugaacgauauccugagcagacuggacaaggucgaggccgaggugcagaucgacagacugaucacaggcagacugcagagccuccagacauacgugacccagcagcugaucagagccgccgagauuagagccucugccaaucuggccgccaccaagaugucugagugugugcugggccagagcaagagaguggacuuuugcggcaagggcuaccaccugaugagcuucccucagucugccccucacggcgugguguuucugcacgugacauaugugcccgcucaagagaagaauuucaccaccgcuccagccaucugccacgacggcaaagcccacuuuccuagagaaggcguguucguguccaacggcacccauugguucgugacacagcggaacuucuacgagccccagaucaucaccaccgacaacaccuucgugucuggcaacugcgacguugugaucggcauugugaacaauaccguguacgacccucugcagcccgagcuggacagcuucaaagaggaacuggacaaguacuuuaagaaccacacaagccccgacguggaccugggcgauaucagcggaaucaaugccagcgucgugaacauccagaaagagaucgaccggcugaacgagguggccaagaaucugaacgagagccugaucgaccugcaagaacuggggaaguacgagcaguacaucaaguggcccugguacaucuggcugggcuuuaucgccggacugauugccaucgugauggucacaaucaugcuguguugcaugaccagcugcuguagcugccugaagggcuguuguagcuguggcagcugcugcaaguucgacgaggacgauucugagcccgugcugaagggcgugaaacugcacuacaccugauaauaggcuggagccucgguggccuagcuucuugccccuugggccuccccccagccccuccuccccuuccugcacccguacccccguggucuuugaauaaagucugagugggcggcaaaaaaaaaaaaaaaaaaaaaaaaaaaaaaaaaaaaaaaaaaaaaaaaaaaaaaaaaaaaaaaaaaaaaaaaaaaaaaaaaaaaaaaaaaaaaaaaaaaaucuag

SEQ ID NO: 26575 - RNA, 4091 nt, Artificial Sequence
  SARS-CoV-2/Wuhan/WIV05/2019__EPI_ISL_402128 spike protein mRNA gc mod (1-1273)(L18F_D80A_D215G_L242del_A243del_L244del_R246I_K417N_E484 K_N501Y_D614G_A701V)
gggaaauaagagagaaaagaagaguaagaagaaauauaagaccccggcgccgccaccauguucguguuucuggugcugcugccccugguguccagccagugugugaacuucaccaccagaacacagcugccuccagccuacaccaacagcuucaccagaggcguguacuaccccgacaagguguucagauccagcgugcugcacucuacccaggaccuguuccugccuuucuucagcaacgugaccugguuccacgccauccacguguccggcaccaauggcaccaagagauucgccaaccccgugcugcccuucaacgacgggguguacuuugccagcaccgagaaguccaacaucaucagaggcuggaucuucggcaccacacuggacagcaagacccagagccugcugaucgugaacaacgccaccaacguggucaucaaagugugcgaguuccaguucugcaacgaccccuuccugggcgucuacuaccacaagaacaacaagagcuggauggaaagcgaguuccggguguacagcagcgccaacaacugcaccuucgaguacgugucccagccuuuccugauggaccuggaaggcaagcagggcaacuucaagaaccugcgcgaguucguguucaagaacaucgacggcuacuucaaaaucuacagcaagcacaccccuaucaaccucgugcggggccugccucagggcuucucugcucuggaaccccugguggaucugcccaucggcaucaacaucacccgguuucagacacugcacaucagcuaccugacaccuggcgauagcagcagcggauggacagcuggugccgccgcuuacuaugugggcuaccugcagccuagaaccuuccugcugaaguacaacgagaacggcaccaucaccgacgccguggauugugcucuggauccucugagcgagacaaagugcacccugaaguccuucaccguggaaaagggcaucuaccagaccagcaacuuccgggugcagcccaccgaauccaucgugcgguuccccaauaucaccaaucugugccccuucggcgagguguucaaugccaccagauucgccucuguguacgccuggaaccggaagcggaucagcaauugcguggccgacuacuccgugcuguacaacuccgccagcuucagcaccuucaagugcuacggcguguccccuaccaagcugaacgaccugugcuucacaaacguguacgccgacagcuucgugauccggggagaugaagugcggcagauugccccuggacagacaggcaacaucgccgacuacaacuacaagcugcccgacgacuucaccggcugugugauugccuggaacagcaacaaccuggacuccaaagucggcggcaacuacaauuaccuguaccggcuguuccggaaguccaaucugaagcccuucgagcgggacaucagcaccgaaaucuaucaggccggcagcaccccuugcaacggcgugaagggcuucaacugcuacuucccacugcaguccuacggcuuucagcccacauacggcgugggcuaucagcccuacagagugguggugcugagcuucgaacugcugcaugcuccugccacagugugcggcccuaagaaaagcaccaaucucgugaagaacaaaugcgugaacuucaacuucaacggccugaccggcaccggcgugcugacagagagcaacaagaaguuccugccauuccagcaguuuggccgggauaucgccgauaccacagacgccguuagagauccccagacacuggaaauccuggacaucaccccaugcagcuucggcggagugucugugaucaccccuggcaccaacaccagcaaucagguggcagugcuguaccagggcgugaacuguaccgaagugcccguggccauucacgccgaucagcugacaccuacauggcggguguacuccaccggcagcaauguguuucagaccagagccggcugucugaucggagccgagcacgugaacaauagcuacgagugcgacauccccaucggcgcuggcaucugugccagcuaccagacacagacaaacagccccagacgggcuagaagcguggccagccagagcaucauugccuacacaaugucucugggcguggagaacagcguggccuacuccaacaacucuaucgcuauccccaccaacuucaccaucagcgugaccaccgagauccugccuguguccaugaccaagaccagcguggacugcaccauguacaucugcggcgauuccaccgagugcuccaaccugcugcugcaguacggcagcuucugcacccagcugaauagagcccugacagggaucgccguggaacaggacaagaacacccaagagguguucgcccaagugaagcaaaucuacaagaccccuccuaucaaggacuucggcggcuucaauuucagccagauucugcccgauccuagcaagcccagcaagcggagcuucaucgaggaccugcuguucaacaaagugacacuggccgacgccggcuucaucaagcaguauggcgauugucugggcgacauugccgccagggaucugauuugcgcccagaaguuuaacggacugacagugcugccuccucugcugaccgaugagaugaucgcccaguacacaucugcccugcuggccggcacaaucacaagcggcuggacauuuggagcuggcgccgcucugcagauccccuuugcuaugcagauggccuaccgguucaacggcaucggagugacccagaaugugcuguacgagaaccagaagcugaucgccaaccaguucaacagcgccaucggcaagauccaggacagccugagcagcacagcaagcgcccugggaaagcugcaggacguggucaaccagaaugcccaggcacugaacacccuggucaagcagcuguccuccaacuucggcgccaucagcucugugcugaacgauauccugagcagacuggacaaggucgaggccgaggugcagaucgacagacugaucacaggcagacugcagagccuccagacauacgugacccagcagcugaucagagccgccgagauuagagccucugccaaucuggccgccaccaagaugucugagugugugcugggccagagcaagagaguggacuuuugcggcaagggcuaccaccugaugagcuucccucagucugccccucacggcgugguguuucugcacgugacauaugugcccgcucaagagaagaauuucaccaccgcuccagccaucugccacgacggcaaagcccacuuuccuagagaaggcguguucguguccaacggcacccauugguucgugacacagcggaacuucuacgagccccagaucaucaccaccgacaacaccuucgugucuggcaacugcgacguugugaucggcauugugaacaauaccguguacgacccucugcagcccgagcuggacagcuucaaagaggaacuggacaaguacuuuaagaaccacacaagccccgacguggaccugggcgauaucagcggaaucaaugccagcgucgugaacauccagaaagagaucgaccggcugaacgagguggccaagaaucugaacgagagccugaucgaccugcaagaacuggggaaguacgagcaguacaucaaguggcccugguacaucuggcugggcuuuaucgccggacugauugccaucgugauggucacaaucaugcuguguugcaugaccagcugcuguagcugccugaagggcuguuguagcuguggcagcugcugcaaguucgacgaggacgauucugagcccgugcugaagggcgugaaacugcacuacaccugauaauaggcuggagccucgguggccuagcuucuugccccuugggccuccccccagccccuccuccccuuccugcacccguacccccguggucuuugaauaaagucugagugggcggcaaaaaaaaaaaaaaaaaaaaaaaaaaaaaaaaaaaaaaaaaaaaaaaaaaaaaaaaaaaaaaaaaaaaaaaaaaaaaaaaaaaaaaaaaaaaaaaaaaaaucuag

SEQ ID NO: 26576 - RNA, 4100 nt, Artificial Sequence
  SARS-CoV-2/Wuhan/WIV05/2019__EPI_ISL_402128 spike protein mRNA gc mod (1-1273)(E484K_D614G)
gggaaauaagagagaaaagaagaguaagaagaaauauaagaccccggcgccgccaccauguucguguuucuggugcugcugccccugguguccagccagugugugaaccugaccaccagaacacagcugccuccagccuacaccaacagcuucaccagaggcguguacuaccccgacaagguguucagauccagcgugcugcacucuacccaggaccuguuccugccuuucuucagcaacgugaccugguuccacgccauccacguguccggcaccaauggcaccaagagauucgacaaccccgugcugcccuucaacgacgggguguacuuugccagcaccgagaaguccaacaucaucagaggcuggaucuucggcaccacacuggacagcaagacccagagccugcugaucgugaacaacgccaccaacguggucaucaaagugugcgaguuccaguucugcaacgaccccuuccugggcgucuacuaccacaagaacaacaagagcuggauggaaagcgaguuccggguguacagcagcgccaacaacugcaccuucgaguacgugucccagccuuuccugauggaccuggaaggcaagcagggcaacuucaagaaccugcgcgaguucguguucaagaacaucgacggcuacuucaaaaucuacagcaagcacaccccuaucaaccucgugcgggaucugccucagggcuucucugcucuggaaccccugguggaucugcccaucggcaucaacaucacccgguuucagacacugcuggcccugcacagaagcuaccugacaccuggcgauagcagcagcggauggacagcuggugccgccgcuuacuaugugggcuaccugcagccuagaaccuuccugcugaaguacaacgagaacggcaccaucaccgacgccguggauugugcucuggauccucugagcgagacaaagugcacccugaaguccuucaccguggaaaagggcaucuaccagaccagcaacuuccgggugcagcccaccgaauccaucgugcgguuccccaauaucaccaaucugugccccuucggcgagguguucaaugccaccagauucgccucuguguacgccuggaaccggaagcggaucagcaauugcguggccgacuacuccgugcuguacaacuccgccagcuucagcaccuucaagugcuacggcguguccccuaccaagcugaacgaccugugcuucacaaacguguacgccgacagcuucgugauccggggagaugaagugcggcagauugccccuggacagacaggcaagaucgccgacuacaacuacaagcugcccgacgacuucaccggcugugugauugccuggaacagcaacaaccuggacuccaaagucggcggcaacuacaauuaccuguaccggcuguuccggaaguccaaucugaagcccuucgagcgggacaucagcaccgaaaucuaucaggccggcagcaccccuugcaacggcgugaagggcuucaacugcuacuucccacugcaguccuacggcuuucagcccacaaauggcgugggcuaucagcccuacagagugguggugcugagcuucgaacugcugcaugcuccugccacagugugcggcccuaagaaaagcaccaaucucgugaagaacaaaugcgugaacuucaacuucaacggccugaccggcaccggcgugcugacagagagcaacaagaaguuccugccauuccagcaguuuggccgggauaucgccgauaccacagacgccguuagagauccccagacacuggaaauccuggacaucaccccaugcagcuucggcggagugucugugaucaccccuggcaccaacaccagcaaucagguggcagugcuguaccagggcgugaacuguaccgaagugcccguggccauucacgccgaucagcugacaccuacauggcggguguacuccaccggcagcaauguguuucagaccagagccggcugucugaucggagccgagcacgugaacaauagcuacgagugcgacauccccaucggcgcuggcaucugugccagcuaccagacacagacaaacagccccagacgggcuagaagcguggccagccagagcaucauugccuacacaaugucucugggcgccgagaacagcguggccuacuccaacaacucuaucgcuauccccaccaacuucaccaucagcgugaccaccgagauccugccuguguccaugaccaagaccagcguggacugcaccauguacaucugcggcgauuccaccgagugcuccaaccugcugcugcaguacggcagcuucugcacccagcugaauagagcccugacagggaucgccguggaacaggacaagaacacccaagagguguucgcccaagugaagcaaaucuacaagaccccuccuaucaaggacuucggcggcuucaauuucagccagauucugcccgauccuagcaagcccagcaagcggagcuucaucgaggaccugcuguucaacaaagugacacuggccgacgccggcuucaucaagcaguauggcgauugucugggcgacauugccgccagggaucugauuugcgcccagaaguuuaacggacugacagugcugccuccucugcugaccgaugagaugaucgcccaguacacaucugcccugcuggccggcacaaucacaagcggcuggacauuuggagcuggcgccgcucugcagauccccuuugcuaugcagauggccuaccgguucaacggcaucggagugacccagaaugugcuguacgagaaccagaagcugaucgccaaccaguucaacagcgccaucggcaagauccaggacagccugagcagcacagcaagcgcccugggaaagcugcaggacguggucaaccagaaugcccaggcacugaacacccuggucaagcagcuguccuccaacuucggcgccaucagcucugugcugaacgauauccugagcagacuggacaaggucgaggccgaggugcagaucgacagacugaucacaggcagacugcagagccuccagacauacgugacccagcagcugaucagagccgccgagauuagagccucugccaaucuggccgccaccaagaugucugagugugugcugggccagagcaagagaguggacuuuugcggcaagggcuaccaccugaugagcuucccucagucugccccucacggcgugguguuucugcacgugacauaugugcccgcucaagagaagaauuucaccaccgcuccagccaucugccacgacggcaaagcccacuuuccuagagaaggcguguucguguccaacggcacccauugguucgugacacagcggaacuucuacgagccccagaucaucaccaccgacaacaccuucgugucuggcaacugcgacguugugaucggcauugugaacaauaccguguacgacccucugcagcccgagcuggacagcuucaaagaggaacuggacaaguacuuuaagaaccacacaagccccgacguggaccugggcgauaucagcggaaucaaugccagcgucgugaacauccagaaagagaucgaccggcugaacgagguggccaagaaucugaacgagagccugaucgaccugcaagaacuggggaaguacgagcaguacaucaaguggcccugguacaucuggcugggcuuuaucgccggacugauugccaucgugauggucacaaucaugcuguguugcaugaccagcugcuguagcugccugaagggcuguuguagcuguggcagcugcugcaaguucgacgaggacgauucugagcccgugcugaagggcgugaaacugcacuacaccugauaauaggcuggagccucgguggccuagcuucuugccccuugggccuccccccagccccuccuccccuuccugcacccguacccccguggucuuugaauaaagucugagugggcggcaaaaaaaaaaaaaaaaaaaaaaaaaaaaaaaaaaaaaaaaaaaaaaaaaaaaaaaaaaaaaaaaaaaaaaaaaaaaaaaaaaaaaaaaaaaaaaaaaaaaucuag

SEQ ID NO: 26577 - RNA, 4100 nt, Artificial Sequence
  SARS-CoV-2/Wuhan/WIV05/2019__EPI_ISL_402128 spike protein mRNA gc mod (1-1273)(L18F_T20N_P26S_D138Y_R190S_K417T_E484K_N501Y_D614G_H655Y _T1027I)
gggaaauaagagagaaaagaagaguaagaagaaauauaagaccccggcgccgccaccauguucguguuucuggugcugcugccccugguguccagccagugugugaacuucaccaacagaacacagcugccuagcgccuacaccaacagcuucaccagaggcguguacuaccccgacaagguguucagauccagcgugcugcacucuacccaggaccuguuccugccuuucuucagcaacgugaccugguuccacgccauccacguguccggcaccaauggcaccaagagauucgacaaccccgugcugcccuucaacgacgggguguacuuugccagcaccgagaaguccaacaucaucagaggcuggaucuucggcaccacacuggacagcaagacccagagccugcugaucgugaacaacgccaccaacguggucaucaaagugugcgaguuccaguucugcaacuaccccuuccugggcgucuacuaccacaagaacaacaagagcuggauggaaagcgaguuccggguguacagcagcgccaacaacugcaccuucgaguacgugucccagccuuuccugauggaccuggaaggcaagcagggcaacuucaagaaccugagcgaguucguguucaagaacaucgacggcuacuucaaaaucuacagcaagcacaccccuaucaaccucgugcgggaucugccucagggcuucucugcucuggaaccccugguggaucugcccaucggcaucaacaucacccgguuucagacacugcuggcccugcacagaagcuaccugacaccuggcgauagcagcagcggauggacagcuggugccgccgcuuacuaugugggcuaccugcagccuagaaccuuccugcugaaguacaacgagaacggcaccaucaccgacgccguggauugugcucuggauccucugagcgagacaaagugcacccugaaguccuucaccguggaaaagggcaucuaccagaccagcaacuuccgggugcagcccaccgaauccaucgugcgguuccccaauaucaccaaucugugccccuucggcgagguguucaaugccaccagauucgccucuguguacgccuggaaccggaagcggaucagcaauugcguggccgacuacuccgugcuguacaacuccgccagcuucagcaccuucaagugcuacggcguguccccuaccaagcugaacgaccugugcuucacaaacguguacgccgacagcuucgugauccggggagaugaagugcggcagauugccccuggacagacaggcaccaucgccgacuacaacuacaagcugcccgacgacuucaccggcugugugauugccuggaacagcaacaaccuggacuccaaagucggcggcaacuacaauuaccuguaccggcuguuccggaaguccaaucugaagcccuucgagcgggacaucagcaccgaaaucuaucaggccggcagcaccccuugcaacggcgugaagggcuucaacugcuacuucccacugcaguccuacggcuuucagcccacauacggcgugggcuaucagcccuacagagugguggugcugagcuucgaacugcugcaugcuccugccacagugugcggcccuaagaaaagcaccaaucucgugaagaacaaaugcgugaacuucaacuucaacggccugaccggcaccggcgugcugacagagagcaacaagaaguuccugccauuccagcaguuuggccgggauaucgccgauaccacagacgccguuagagauccccagacacuggaaauccuggacaucaccccaugcagcuucggcggagugucugugaucaccccuggcaccaacaccagcaaucagguggcagugcuguaccagggcgugaacuguaccgaagugcccguggccauucacgccgaucagcugacaccuacauggcggguguacuccaccggcagcaauguguuucagaccagagccggcugucugaucggagccgaguacgugaacaauagcuacgagugcgacauccccaucggcgcuggcaucugugccagcuaccagacacagacaaacagccccagacgggcuagaagcguggccagccagagcaucauugccuacacaaugucucugggcgccgagaacagcguggccuacuccaacaacucuaucgcuauccccaccaacuucaccaucagcgugaccaccgagauccugccuguguccaugaccaagaccagcguggacugcaccauguacaucugcggcgauuccaccgagugcuccaaccugcugcugcaguacggcagcuucugcacccagcugaauagagcccugacagggaucgccguggaacaggacaagaacacccaagagguguucgcccaagugaagcaaaucuacaagaccccuccuaucaaggacuucggcggcuucaauuucagccagauucugcccgauccuagcaagcccagcaagcggagcuucaucgaggaccugcuguucaacaaagugacacuggccgacgccggcuucaucaagcaguauggcgauugucugggcgacauugccgccagggaucugauuugcgcccagaaguuuaacggacugacagugcugccuccucugcugaccgaugagaugaucgcccaguacacaucugcccugcuggccggcacaaucacaagcggcuggacauuuggagcuggcgccgcucugcagauccccuuugcuaugcagauggccuaccgguucaacggcaucggagugacccagaaugugcuguacgagaaccagaagcugaucgccaaccaguucaacagcgccaucggcaagauccaggacagccugagcagcacagcaagcgcccugggaaagcugcaggacguggucaaccagaaugcccaggcacugaacacccuggucaagcagcuguccuccaacuucggcgccaucagcucugugcugaacgauauccugagcagacuggacaaggucgaggccgaggugcagaucgacagacugaucacaggcagacugcagagccuccagacauacgugacccagcagcugaucagagccgccgagauuagagccucugccaaucuggccgccaucaagaugucugagugugugcugggccagagcaagagaguggacuuuugcggcaagggcuaccaccugaugagcuucccucagucugccccucacggcgugguguuucugcacgugacauaugugcccgcucaagagaagaauuucaccaccgcuccagccaucugccacgacggcaaagcccacuuuccuagagaaggcguguucguguccaacggcacccauugguucgugacacagcggaacuucuacgagccccagaucaucaccaccgacaacaccuucgugucuggcaacugcgacguugugaucggcauugugaacaauaccguguacgacccucugcagcccgagcuggacagcuucaaagaggaacuggacaaguacuuuaagaaccacacaagccccgacguggaccugggcgauaucagcggaaucaaugccagcgucgugaacauccagaaagagaucgaccggcugaacgagguggccaagaaucugaacgagagccugaucgaccugcaagaacuggggaaguacgagcaguacaucaaguggcccugguacaucuggcugggcuuuaucgccggacugauugccaucgugauggucacaaucaugcuguguugcaugaccagcugcuguagcugccugaagggcuguuguagcuguggcagcugcugcaaguucgacgaggacgauucugagcccgugcugaagggcgugaaacugcacuacaccugauaauaggcuggagccucgguggccuagcuucuugccccuugggccuccccccagccccuccuccccuuccugcacccguacccccguggucuuugaauaaagucugagugggcggcaaaaaaaaaaaaaaaaaaaaaaaaaaaaaaaaaaaaaaaaaaaaaaaaaaaaaaaaaaaaaaaaaaaaaaaaaaaaaaaaaaaaaaaaaaaaaaaaaaaaucuag

SEQ ID NO: 26578 - RNA, 4100 nt, Artificial Sequence
  SARS-CoV-2/Wuhan/WIV05/2019__EPI_ISL_402128 spike protein mRNA gc mod (1-1273)(S13I_W152C_L452R_D614G)
gggaaauaagagagaaaagaagaguaagaagaaauauaagaccccggcgccgccaccauguucguguuucuggugcugcugccccugguguccauccagugugugaaccugaccaccagaacacagcugccuccagccuacaccaacagcuucaccagaggcguguacuaccccgacaagguguucagauccagcgugcugcacucuacccaggaccuguuccugccuuucuucagcaacgugaccugguuccacgccauccacguguccggcaccaauggcaccaagagauucgacaaccccgugcugcccuucaacgacgggguguacuuugccagcaccgagaaguccaacaucaucagaggcuggaucuucggcaccacacuggacagcaagacccagagccugcugaucgugaacaacgccaccaacguggucaucaaagugugcgaguuccaguucugcaacgaccccuuccugggcgucuacuaccacaagaacaacaagagcugcauggaaagcgaguuccggguguacagcagcgccaacaacugcaccuucgaguacgugucccagccuuuccugauggaccuggaaggcaagcagggcaacuucaagaaccugcgcgaguucguguucaagaacaucgacggcuacuucaaaaucuacagcaagcacaccccuaucaaccucgugcgggaucugccucagggcuucucugcucuggaaccccugguggaucugcccaucggcaucaacaucacccgguuucagacacugcuggcccugcacagaagcuaccugacaccuggcgauagcagcagcggauggacagcuggugccgccgcuuacuaugugggcuaccugcagccuagaaccuuccugcugaaguacaacgagaacggcaccaucaccgacgccguggauugugcucuggauccucugagcgagacaaagugcacccugaaguccuucaccguggaaaagggcaucuaccagaccagcaacuuccgggugcagcccaccgaauccaucgugcgguuccccaauaucaccaaucugugccccuucggcgagguguucaaugccaccagauucgccucuguguacgccuggaaccggaagcggaucagcaauugcguggccgacuacuccgugcuguacaacuccgccagcuucagcaccuucaagugcuacggcguguccccuaccaagcugaacgaccugugcuucacaaacguguacgccgacagcuucgugauccggggagaugaagugcggcagauugccccuggacagacaggcaagaucgccgacuacaacuacaagcugcccgacgacuucaccggcugugugauugccuggaacagcaacaaccuggacuccaaagucggcggcaacuacaauuaccgcuaccggcuguuccggaaguccaaucugaagcccuucgagcgggacaucagcaccgaaaucuaucaggccggcagcaccccuugcaacggcguggaaggcuucaacugcuacuucccacugcaguccuacggcuuucagcccacaaauggcgugggcuaucagcccuacagagugguggugcugagcuucgaacugcugcaugcuccugccacagugugcggcccuaagaaaagcaccaaucucgugaagaacaaaugcgugaacuucaacuucaacggccugaccggcaccggcgugcugacagagagcaacaagaaguuccugccauuccagcaguuuggccgggauaucgccgauaccacagacgccguuagagauccccagacacuggaaauccuggacaucaccccaugcagcuucggcggagugucugugaucaccccuggcaccaacaccagcaaucagguggcagugcuguaccagggcgugaacuguaccgaagugcccguggccauucacgccgaucagcugacaccuacauggcggguguacuccaccggcagcaauguguuucagaccagagccggcugucugaucggagccgagcacgugaacaauagcuacgagugcgacauccccaucggcgcuggcaucugugccagcuaccagacacagacaaacagccccagacgggcuagaagcguggccagccagagcaucauugccuacacaaugucucugggcgccgagaacagcguggccuacuccaacaacucuaucgcuauccccaccaacuucaccaucagcgugaccaccgagauccugccuguguccaugaccaagaccagcguggacugcaccauguacaucugcggcgauuccaccgagugcuccaaccugcugcugcaguacggcagcuucugcacccagcugaauagagcccugacagggaucgccguggaacaggacaagaacacccaagagguguucgcccaagugaagcaaaucuacaagaccccuccuaucaaggacuucggcggcuucaauuucagccagauucugcccgauccuagcaagcccagcaagcggagcuucaucgaggaccugcuguucaacaaagugacacuggccgacgccggcuucaucaagcaguauggcgauugucugggcgacauugccgccagggaucugauuugcgcccagaaguuuaacggacugacagugcugccuccucugcugaccgaugagaugaucgcccaguacacaucugcccugcuggccggcacaaucacaagcggcuggacauuuggagcuggcgccgcucugcagauccccuuugcuaugcagauggccuaccgguucaacggcaucggagugacccagaaugugcuguacgagaaccagaagcugaucgccaaccaguucaacagcgccaucggcaagauccaggacagccugagcagcacagcaagcgcccugggaaagcugcaggacguggucaaccagaaugcccaggcacugaacacccuggucaagcagcuguccuccaacuucggcgccaucagcucugugcugaacgauauccugagcagacuggacaaggucgaggccgaggugcagaucgacagacugaucacaggcagacugcagagccuccagacauacgugacccagcagcugaucagagccgccgagauuagagccucugccaaucuggccgccaccaagaugucugagugugugcugggccagagcaagagaguggacuuuugcggcaagggcuaccaccugaugagcuucccucagucugccccucacggcgugguguuucugcacgugacauaugugcccgcucaagagaagaauuucaccaccgcuccagccaucugccacgacggcaaagcccacuuuccuagagaaggcguguucguguccaacggcacccauugguucgugacacagcggaacuucuacgagccccagaucaucaccaccgacaacaccuucgugucuggcaacugcgacguugugaucggcauugugaacaauaccguguacgacccucugcagcccgagcuggacagcuucaaagaggaacuggacaaguacuuuaagaaccacacaagccccgacguggaccugggcgauaucagcggaaucaaugccagcgucgugaacauccagaaagagaucgaccggcugaacgagguggccaagaaucugaacgagagccugaucgaccugcaagaacuggggaaguacgagcaguacaucaaguggcccugguacaucuggcugggcuuuaucgccggacugauugccaucgugauggucacaaucaugcuguguugcaugaccagcugcuguagcugccugaagggcuguuguagcuguggcagcugcugcaaguucgacgaggacgauucugagcccgugcugaagggcgugaaacugcacuacaccugauaauaggcuggagccucgguggccuagcuucuugccccuugggccuccccccagccccuccuccccuuccugcacccguacccccguggucuuugaauaaagucugagugggcggcaaaaaaaaaaaaaaaaaaaaaaaaaaaaaaaaaaaaaaaaaaaaaaaaaaaaaaaaaaaaaaaaaaaaaaaaaaaaaaaaaaaaaaaaaaaaaaaaaaaaucuag

SEQ ID NO: 26579 - RNA, 4100 nt, Artificial Sequence
  SARS-CoV-2/Wuhan/WIV05/2019__EPI_ISL_402128 spike protein mRNA gc mod (1-1273)
gggaaauaagagagaaaagaagaguaagaagaaauauaagaccccggcgccgccaccauguucguguuccuggugcugcugccucugguguccagccagugugugaaccugaccaccagaacacagcugccuccagccuacaccaacagcuuuaccagaggcguguacuaccccgacaagguguucagauccagcgugcugcacucuacccaggaccuguuccugccuuucuucagcaacgugaccugguuccacgccauccacguguccggcaccaauggcaccaagagauucgacaaccccgugcugcccuucaacgacgggguguacuuugccagcaccgagaaguccaacaucaucagaggcuggaucuucggcaccacacuggacagcaagacccagagccugcugaucgugaacaacgccaccaacguggucaucaaagugugcgaguuccaguucugcaacgaccccuuccugggcgucuacuaccacaagaacaacaagagcuggauggaaagcgaguuccggguguacagcagcgccaacaacugcaccuucgaguacgugucccagccuuuccugauggaccuggaaggcaagcagggcaacuucaagaaccugcgcgaguucguguuuaagaacaucgacggcuacuucaagaucuacagcaagcacaccccuaucaaccucgugcgggaucugccucagggcuucucugcucuggaaccccugguggaucugcccaucggcaucaacaucacccgguuucagacacugcuggcccugcacagaagcuaccugacaccuggcgauagcagcagcggauggacagcuggugccgccgcuuacuaugugggcuaccugcagccuagaaccuuccugcugaaguacaacgagaacggcaccaucaccgacgccguggauugugcucuggauccucugagcgagacaaagugcacccugaaguccuucaccguggaaaagggcaucuaccagaccagcaacuuccgggugcagcccaccgaauccaucgugcgguuccccaauaucaccaaucugugccccuucggcgagguguucaaugccaccagauucgccucuguguacgccuggaaccggaagcggaucagcaauugcguggccgacuacuccgugcuguacaacuccgccagcuucagcaccuucaagugcuacggcguguccccuaccaagcugaacgaccugugcuucacaaacguguacgccgacagcuucgugauccggggagaugaagugcggcagauugccccuggacagacaggcaagaucgccgacuacaacuacaagcugcccgacgacuucaccggcugugugauugccuggaacagcaacaaccuggacuccaaagucggcggcaacuacaauuaccuguaccggcuguuccggaaguccaaucugaagcccuucgagcgggacaucuccaccgagaucuaucaggccggcagcaccccuuguaacggcguggaaggcuucaacugcuacuucccacugcaguccuacggcuuucagcccacaaauggcgugggcuaucagcccuacagagugguggugcugagcuucgaacugcugcaugccccugccacagugugcggcccuaagaaaagcaccaaucucgugaagaacaaaugcgugaacuucaacuucaacggccugaccggcaccggcgugcugacagagagcaacaagaaguuccugccauuccagcaguuuggccgggauaucgccgauaccacagacgccguuagagauccccagacacuggaaauccuggacaucaccccuugcagcuucggcggagugucugugaucaccccuggcaccaacaccagcaaucagguggcagugcuguaccaggacgugaacuguaccgaagugcccguggccauucacgccgaucagcugacaccuacauggcggguguacuccaccggcagcaauguguuucagaccagagccggcugucugaucggagccgagcacgugaacaauagcuacgagugcgacauccccaucggcgcuggaaucugcgccagcuaccagacacagacaaacagcccucggagagccagaagcguggccagccagagcaucauugccuacacaaugucucugggcgccgagaacagcguggccuacuccaacaacucuaucgcuauccccaccaacuucaccaucagcgugaccacagagauccugccuguguccaugaccaagaccagcguggacugcaccauguacaucugcggcgauuccaccgagugcuccaaccugcugcugcaguacggcagcuucugcacccagcugaauagagcccugacagggaucgccguggaacaggacaagaacacccaagagguguucgcccaagugaagcagaucuacaagaccccuccuaucaaggacuucggcggcuucaauuucagccagauucugcccgauccuagcaagcccagcaagcggagcuucaucgaggaccugcuguucaacaaagugacacuggccgacgccggcuucaucaagcaguauggcgauugucugggcgacauugccgccagggaucugauuugcgcccagaaguuuaacggacugacagugcugccuccucugcugaccgaugagaugaucgcccaguacacaucugcccugcuggccggcacaaucacaagcggcuggacauuuggagcaggcgccgcucugcagauccccuuugcuaugcagauggccuaccgguucaacggcaucggagugacccagaaugugcuguacgagaaccagaagcugaucgccaaccaguucaacagcgccaucggcaagauccaggacagccugagcagcacagcaagcgcccugggaaagcugcaggacguggucaaccagaaugcccaggcacugaacacccuggucaagcagcuguccuccaacuucggcgccaucagcucugugcugaacgauauccugagcagacuggacaaggucgaggccgaggugcagaucgacagacugaucacaggcagacugcagagccuccagacauacgugacccagcagcugaucagagccgccgagauuagagccucugccaaucuggccgccaccaagaugucugagugugugcugggccagagcaagagaguggacuuuugcggcaagggcuaccaccugaugagcuucccucagucugccccucacggcgugguguuucugcacgugacauaugugcccgcucaagagaagaauuucaccaccgcuccagccaucugccacgacggcaaagcccacuuuccuagagaaggcguguucguguccaacggcacccauugguucgugacacagcggaacuucuacgagccccagaucaucaccaccgacaacaccuucgugucuggcaacugcgacgucgugaucggcauugugaacaauaccguguacgacccucugcagcccgagcuggacagcuucaaagaggaacuggacaaguacuuuaagaaccacacaagccccgacguggaccugggcgauaucagcggaaucaaugccagcgucgugaacauccagaaagagaucgaccggcugaacgagguggccaagaaucugaacgagagccugaucgaccugcaagaacuggggaaguacgagcaguacaucaaguggcccugguacaucuggcugggcuuuaucgccggacugauugccaucgugauggucacaaucaugcuguguugcaugaccagcugcuguagcugccugaagggcuguuguagcuguggcagcugcugcaaguucgacgaggacgauucugagcccgugcugaagggcgugaaacugcacuacacaugauaauaggcuggagccucgguggccuagcuucuugccccuugggccuccccccagccccuccuccccuuccugcacccguacccccguggucuuugaauaaagucugagugggcggcaaaaaaaaaaaaaaaaaaaaaaaaaaaaaaaaaaaaaaaaaaaaaaaaaaaaaaaaaaaaaaaaaaaaaaaaaaaaaaaaaaaaaaaaaaaaaaaaaaaaucuag

SEQ ID NO: 26580 - RNA, 4100 nt, Artificial Sequence
  SARS-CoV-2/Wuhan/WIV05/2019__EPI_ISL_402128 spike protein mRNA gc mod (1-1273)(D614G)
gggaaauaagagagaaaagaagaguaagaagaaauauaagaccccggcgccgccaccauguucguguuccuggugcugcugccucugguguccagccagugugugaaccugaccaccagaacacagcugccuccagccuacaccaacagcuuuaccagaggcguguacuaccccgacaagguguucagauccagcgugcugcacucuacccaggaccuguuccugccuuucuucagcaacgugaccugguuccacgccauccacguguccggcaccaauggcaccaagagauucgacaaccccgugcugcccuucaacgacgggguguacuuugccagcaccgagaaguccaacaucaucagaggcuggaucuucggcaccacacuggacagcaagacccagagccugcugaucgugaacaacgccaccaacguggucaucaaagugugcgaguuccaguucugcaacgaccccuuccugggcgucuacuaccacaagaacaacaagagcuggauggaaagcgaguuccggguguacagcagcgccaacaacugcaccuucgaguacgugucccagccuuuccugauggaccuggaaggcaagcagggcaacuucaagaaccugcgcgaguucguguuuaagaacaucgacggcuacuucaagaucuacagcaagcacaccccuaucaaccucgugcgggaucugccucagggcuucucugcucuggaaccccugguggaucugcccaucggcaucaacaucacccgguuucagacacugcuggcccugcacagaagcuaccugacaccuggcgauagcagcagcggauggacagcuggugccgccgcuuacuaugugggcuaccugcagccuagaaccuuccugcugaaguacaacgagaacggcaccaucaccgacgccguggauugugcucuggauccucugagcgagacaaagugcacccugaaguccuucaccguggaaaagggcaucuaccagaccagcaacuuccgggugcagcccaccgaauccaucgugcgguuccccaauaucaccaaucugugccccuucggcgagguguucaaugccaccagauucgccucuguguacgccuggaaccggaagcggaucagcaauugcguggccgacuacuccgugcuguacaacuccgccagcuucagcaccuucaagugcuacggcguguccccuaccaagcugaacgaccugugcuucacaaacguguacgccgacagcuucgugauccggggagaugaagugcggcagauugccccuggacagacaggcaagaucgccgacuacaacuacaagcugcccgacgacuucaccggcugugugauugccuggaacagcaacaaccuggacuccaaagucggcggcaacuacaauuaccuguaccggcuguuccggaaguccaaucugaagcccuucgagcgggacaucuccaccgagaucuaucaggccggcagcaccccuuguaacggcguggaaggcuucaacugcuacuucccacugcaguccuacggcuuucagcccacaaauggcgugggcuaucagcccuacagagugguggugcugagcuucgaacugcugcaugccccugccacagugugcggcccuaagaaaagcaccaaucucgugaagaacaaaugcgugaacuucaacuucaacggccugaccggcaccggcgugcugacagagagcaacaagaaguuccugccauuccagcaguuuggccgggauaucgccgauaccacagacgccguuagagauccccagacacuggaaauccuggacaucaccccuugcagcuucggcggagugucugugaucaccccuggcaccaacaccagcaaucagguggcagugcuguaccagggcgugaacuguaccgaagugcccguggccauucacgccgaucagcugacaccuacauggcggguguacuccaccggcagcaauguguuucagaccagagccggcugucugaucggagccgagcacgugaacaauagcuacgagugcgacauccccaucggcgcuggaaucugcgccagcuaccagacacagacaaacagcccucggagagccagaagcguggccagccagagcaucauugccuacacaaugucucugggcgccgagaacagcguggccuacuccaacaacucuaucgcuauccccaccaacuucaccaucagcgugaccacagagauccugccuguguccaugaccaagaccagcguggacugcaccauguacaucugcggcgauuccaccgagugcuccaaccugcugcugcaguacggcagcuucugcacccagcugaauagagcccugacagggaucgccguggaacaggacaagaacacccaagagguguucgcccaagugaagcagaucuacaagaccccuccuaucaaggacuucggcggcuucaauuucagccagauucugcccgauccuagcaagcccagcaagcggagcuucaucgaggaccugcuguucaacaaagugacacuggccgacgccggcuucaucaagcaguauggcgauugucugggcgacauugccgccagggaucugauuugcgcccagaaguuuaacggacugacagugcugccuccucugcugaccgaugagaugaucgcccaguacacaucugcccugcuggccggcacaaucacaagcggcuggacauuuggagcaggcgccgcucugcagauccccuuugcuaugcagauggccuaccgguucaacggcaucggagugacccagaaugugcuguacgagaaccagaagcugaucgccaaccaguucaacagcgccaucggcaagauccaggacagccugagcagcacagcaagcgcccugggaaagcugcaggacguggucaaccagaaugcccaggcacugaacacccuggucaagcagcuguccuccaacuucggcgccaucagcucugugcugaacgauauccugagcagacuggacaaggucgaggccgaggugcagaucgacagacugaucacaggcagacugcagagccuccagacauacgugacccagcagcugaucagagccgccgagauuagagccucugccaaucuggccgccaccaagaugucugagugugugcugggccagagcaagagaguggacuuuugcggcaagggcuaccaccugaugagcuucccucagucugccccucacggcgugguguuucugcacgugacauaugugcccgcucaagagaagaauuucaccaccgcuccagccaucugccacgacggcaaagcccacuuuccuagagaaggcguguucguguccaacggcacccauugguucgugacacagcggaacuucuacgagccccagaucaucaccaccgacaacaccuucgugucuggcaacugcgacgucgugaucggcauugugaacaauaccguguacgacccucugcagcccgagcuggacagcuucaaagaggaacuggacaaguacuuuaagaaccacacaagccccgacguggaccugggcgauaucagcggaaucaaugccagcgucgugaacauccagaaagagaucgaccggcugaacgagguggccaagaaucugaacgagagccugaucgaccugcaagaacuggggaaguacgagcaguacaucaaguggcccugguacaucuggcugggcuuuaucgccggacugauugccaucgugauggucacaaucaugcuguguugcaugaccagcugcuguagcugccugaagggcuguuguagcuguggcagcugcugcaaguucgacgaggacgauucugagcccgugcugaagggcgugaaacugcacuacacaugauaauaggcuggagccucgguggccuagcuucuugccccuugggccuccccccagccccuccuccccuuccugcacccguacccccguggucuuugaauaaagucugagugggcggcaaaaaaaaaaaaaaaaaaaaaaaaaaaaaaaaaaaaaaaaaaaaaaaaaaaaaaaaaaaaaaaaaaaaaaaaaaaaaaaaaaaaaaaaaaaaaaaaaaaaucuag

SEQ ID NO: 26581 - RNA, 4100 nt, Artificial Sequence
  SARS-CoV-2/Wuhan/WIV05/2019__EPI_ISL_402128 spike protein mRNA gc mod (1-1273)(A222V_D614G)
gggaaauaagagagaaaagaagaguaagaagaaauauaagaccccggcgccgccaccauguucguguuccuggugcugcugccucugguguccagccagugugugaaccugaccaccagaacacagcugccuccagccuacaccaacagcuuuaccagaggcguguacuaccccgacaagguguucagauccagcgugcugcacucuacccaggaccuguuccugccuuucuucagcaacgugaccugguuccacgccauccacguguccggcaccaauggcaccaagagauucgacaaccccgugcugcccuucaacgacgggguguacuuugccagcaccgagaaguccaacaucaucagaggcuggaucuucggcaccacacuggacagcaagacccagagccugcugaucgugaacaacgccaccaacguggucaucaaagugugcgaguuccaguucugcaacgaccccuuccugggcgucuacuaccacaagaacaacaagagcuggauggaaagcgaguuccggguguacagcagcgccaacaacugcaccuucgaguacgugucccagccuuuccugauggaccuggaaggcaagcagggcaacuucaagaaccugcgcgaguucguguuuaagaacaucgacggcuacuucaagaucuacagcaagcacaccccuaucaaccucgugcgggaucugccucagggcuucucugugcuggaaccccugguggaucugcccaucggcaucaacaucacccgguuucagacacugcuggcccugcacagaagcuaccugacaccuggcgauagcagcagcggauggacagcuggugccgccgcuuacuaugugggcuaccugcagccuagaaccuuccugcugaaguacaacgagaacggcaccaucaccgacgccguggauugugcucuggauccucugagcgagacaaagugcacccugaaguccuucaccguggaaaagggcaucuaccagaccagcaacuuccgggugcagcccaccgaauccaucgugcgguuccccaauaucaccaaucugugccccuucggcgagguguucaaugccaccagauucgccucuguguacgccuggaaccggaagcggaucagcaauugcguggccgacuacuccgugcuguacaacuccgccagcuucagcaccuucaagugcuacggcguguccccuaccaagcugaacgaccugugcuucacaaacguguacgccgacagcuucgugauccggggagaugaagugcggcagauugccccuggacagacaggcaagaucgccgacuacaacuacaagcugcccgacgacuucaccggcugugugauugccuggaacagcaacaaccuggacuccaaagucggcggcaacuacaauuaccuguaccggcuguuccggaaguccaaucugaagcccuucgagcgggacaucuccaccgagaucuaucaggccggcagcaccccuuguaacggcguggaaggcuucaacugcuacuucccacugcaguccuacggcuuucagcccacaaauggcgugggcuaucagcccuacagagugguggugcugagcuucgaacugcugcaugccccugccacagugugcggcccuaagaaaagcaccaaucucgugaagaacaaaugcgugaacuucaacuucaacggccugaccggcaccggcgugcugacagagagcaacaagaaguuccugccauuccagcaguuuggccgggauaucgccgauaccacagacgccguuagagauccccagacacuggaaauccuggacaucaccccuugcagcuucggcggagugucugugaucaccccuggcaccaacaccagcaaucagguggcagugcuguaccagggcgugaacuguaccgaagugcccguggccauucacgccgaucagcugacaccuacauggcggguguacuccaccggcagcaauguguuucagaccagagccggcugucugaucggagccgagcacgugaacaauagcuacgagugcgacauccccaucggcgcuggaaucugcgccagcuaccagacacagacaaacagcccucggagagccagaagcguggccagccagagcaucauugccuacacaaugucucugggcgccgagaacagcguggccuacuccaacaacucuaucgcuauccccaccaacuucaccaucagcgugaccacagagauccugccuguguccaugaccaagaccagcguggacugcaccauguacaucugcggcgauuccaccgagugcuccaaccugcugcugcaguacggcagcuucugcacccagcugaauagagcccugacagggaucgccguggaacaggacaagaacacccaagagguguucgcccaagugaagcagaucuacaagaccccuccuaucaaggacuucggcggcuucaauuucagccagauucugcccgauccuagcaagcccagcaagcggagcuucaucgaggaccugcuguucaacaaagugacacuggccgacgccggcuucaucaagcaguauggcgauugucugggcgacauugccgccagggaucugauuugcgcccagaaguuuaacggacugacagugcugccuccucugcugaccgaugagaugaucgcccaguacacaucugcccugcuggccggcacaaucacaagcggcuggacauuuggagcaggcgccgcucugcagauccccuuugcuaugcagauggccuaccgguucaacggcaucggagugacccagaaugugcuguacgagaaccagaagcugaucgccaaccaguucaacagcgccaucggcaagauccaggacagccugagcagcacagcaagcgcccugggaaagcugcaggacguggucaaccagaaugcccaggcacugaacacccuggucaagcagcuguccuccaacuucggcgccaucagcucugugcugaacgauauccugagcagacuggacaaggucgaggccgaggugcagaucgacagacugaucacaggcagacugcagagccuccagacauacgugacccagcagcugaucagagccgccgagauuagagccucugccaaucuggccgccaccaagaugucugagugugugcugggccagagcaagagaguggacuuuugcggcaagggcuaccaccugaugagcuucccucagucugccccucacggcgugguguuucugcacgugacauaugugcccgcucaagagaagaauuucaccaccgcuccagccaucugccacgacggcaaagcccacuuuccuagagaaggcguguucguguccaacggcacccauugguucgugacacagcggaacuucuacgagccccagaucaucaccaccgacaacaccuucgugucuggcaacugcgacgucgugaucggcauugugaacaauaccguguacgacccucugcagcccgagcuggacagcuucaaagaggaacuggacaaguacuuuaagaaccacacaagccccgacguggaccugggcgauaucagcggaaucaaugccagcgucgugaacauccagaaagagaucgaccggcugaacgagguggccaagaaucugaacgagagccugaucgaccugcaagaacuggggaaguacgagcaguacaucaaguggcccugguacaucuggcugggcuuuaucgccggacugauugccaucgugauggucacaaucaugcuguguugcaugaccagcugcuguagcugccugaagggcuguuguagcuguggcagcugcugcaaguucgacgaggacgauucugagcccgugcugaagggcgugaaacugcacuacacaugauaauaggcuggagccucgguggccuagcuucuugccccuugggccuccccccagccccuccuccccuuccugcacccguacccccguggucuuugaauaaagucugagugggcggcaaaaaaaaaaaaaaaaaaaaaaaaaaaaaaaaaaaaaaaaaaaaaaaaaaaaaaaaaaaaaaaaaaaaaaaaaaaaaaaaaaaaaaaaaaaaaaaaaaaaucuag

SEQ ID NO: 26582 - RNA, 4100 nt, Artificial Sequence
  SARS-CoV-2/Wuhan/WIV05/2019__EPI_ISL_402128 spike protein mRNA gc mod (1-1273)(N439K_D614G)
gggaaauaagagagaaaagaagaguaagaagaaauauaagaccccggcgccgccaccauguucguguuccuggugcugcugccucugguguccagccagugugugaaccugaccaccagaacacagcugccuccagccuacaccaacagcuuuaccagaggcguguacuaccccgacaagguguucagauccagcgugcugcacucuacccaggaccuguuccugccuuucuucagcaacgugaccugguuccacgccauccacguguccggcaccaauggcaccaagagauucgacaaccccgugcugcccuucaacgacgggguguacuuugccagcaccgagaaguccaacaucaucagaggcuggaucuucggcaccacacuggacagcaagacccagagccugcugaucgugaacaacgccaccaacguggucaucaaagugugcgaguuccaguucugcaacgaccccuuccugggcgucuacuaccacaagaacaacaagagcuggauggaaagcgaguuccggguguacagcagcgccaacaacugcaccuucgaguacgugucccagccuuuccugauggaccuggaaggcaagcagggcaacuucaagaaccugcgcgaguucguguuuaagaacaucgacggcuacuucaagaucuacagcaagcacaccccuaucaaccucgugcgggaucugccucagggcuucucugcucuggaaccccugguggaucugcccaucggcaucaacaucacccgguuucagacacugcuggcccugcacagaagcuaccugacaccuggcgauagcagcagcggauggacagcuggugccgccgcuuacuaugugggcuaccugcagccuagaaccuuccugcugaaguacaacgagaacggcaccaucaccgacgccguggauugugcucuggauccucugagcgagacaaagugcacccugaaguccuucaccguggaaaagggcaucuaccagaccagcaacuuccgggugcagcccaccgaauccaucgugcgguuccccaauaucaccaaucugugccccuucggcgagguguucaaugccaccagauucgccucuguguacgccuggaaccggaagcggaucagcaauugcguggccgacuacuccgugcuguacaacuccgccagcuucagcaccuucaagugcuacggcguguccccuaccaagcugaacgaccugugcuucacaaacguguacgccgacagcuucgugauccggggagaugaagugcggcagauugccccuggacagacaggcaagaucgccgacuacaacuacaagcugcccgacgacuucaccggcugugugauugccuggaacagcaagaaccuggacuccaaagucggcggcaacuacaauuaccuguaccggcuguuccggaaguccaaucugaagcccuucgagcgggacaucuccaccgagaucuaucaggccggcagcaccccuuguaacggcguggaaggcuucaacugcuacuucccacugcaguccuacggcuuucagcccacaaauggcgugggcuaucagcccuacagagugguggugcugagcuucgaacugcugcaugccccugccacagugugcggcccuaagaaaagcaccaaucucgugaagaacaaaugcgugaacuucaacuucaacggccugaccggcaccggcgugcugacagagagcaacaagaaguuccugccauuccagcaguuuggccgggauaucgccgauaccacagacgccguuagagauccccagacacuggaaauccuggacaucaccccuugcagcuucggcggagugucugugaucaccccuggcaccaacaccagcaaucagguggcagugcuguaccagggcgugaacuguaccgaagugcccguggccauucacgccgaucagcugacaccuacauggcggguguacuccaccggcagcaauguguuucagaccagagccggcugucugaucggagccgagcacgugaacaauagcuacgagugcgacauccccaucggcgcuggaaucugcgccagcuaccagacacagacaaacagcccucggagagccagaagcguggccagccagagcaucauugccuacacaaugucucugggcgccgagaacagcguggccuacuccaacaacucuaucgcuauccccaccaacuucaccaucagcgugaccacagagauccugccuguguccaugaccaagaccagcguggacugcaccauguacaucugcggcgauuccaccgagugcuccaaccugcugcugcaguacggcagcuucugcacccagcugaauagagcccugacagggaucgccguggaacaggacaagaacacccaagagguguucgcccaagugaagcagaucuacaagaccccuccuaucaaggacuucggcggcuucaauuucagccagauucugcccgauccuagcaagcccagcaagcggagcuucaucgaggaccugcuguucaacaaagugacacuggccgacgccggcuucaucaagcaguauggcgauugucugggcgacauugccgccagggaucugauuugcgcccagaaguuuaacggacugacagugcugccuccucugcugaccgaugagaugaucgcccaguacacaucugcccugcuggccggcacaaucacaagcggcuggacauuuggagcaggcgccgcucugcagauccccuuugcuaugcagauggccuaccgguucaacggcaucggagugacccagaaugugcuguacgagaaccagaagcugaucgccaaccaguucaacagcgccaucggcaagauccaggacagccugagcagcacagcaagcgcccugggaaagcugcaggacguggucaaccagaaugcccaggcacugaacacccuggucaagcagcuguccuccaacuucggcgccaucagcucugugcugaacgauauccugagcagacuggacaaggucgaggccgaggugcagaucgacagacugaucacaggcagacugcagagccuccagacauacgugacccagcagcugaucagagccgccgagauuagagccucugccaaucuggccgccaccaagaugucugagugugugcugggccagagcaagagaguggacuuuugcggcaagggcuaccaccugaugagcuucccucagucugccccucacggcgugguguuucugcacgugacauaugugcccgcucaagagaagaauuucaccaccgcuccagccaucugccacgacggcaaagcccacuuuccuagagaaggcguguucguguccaacggcacccauugguucgugacacagcggaacuucuacgagccccagaucaucaccaccgacaacaccuucgugucuggcaacugcgacgucgugaucggcauugugaacaauaccguguacgacccucugcagcccgagcuggacagcuucaaagaggaacuggacaaguacuuuaagaaccacacaagccccgacguggaccugggcgauaucagcggaaucaaugccagcgucgugaacauccagaaagagaucgaccggcugaacgagguggccaagaaucugaacgagagccugaucgaccugcaagaacuggggaaguacgagcaguacaucaaguggcccugguacaucuggcugggcuuuaucgccggacugauugccaucgugauggucacaaucaugcuguguugcaugaccagcugcuguagcugccugaagggcuguuguagcuguggcagcugcugcaaguucgacgaggacgauucugagcccgugcugaagggcgugaaacugcacuacacaugauaauaggcuggagccucgguggccuagcuucuugccccuugggccuccccccagccccuccuccccuuccugcacccguacccccguggucuuugaauaaagucugagugggcggcaaaaaaaaaaaaaaaaaaaaaaaaaaaaaaaaaaaaaaaaaaaaaaaaaaaaaaaaaaaaaaaaaaaaaaaaaaaaaaaaaaaaaaaaaaaaaaaaaaaaucuag

SEQ ID NO: 26583 - RNA, 4100 nt, Artificial Sequence
  SARS-CoV-2/Wuhan/WIV05/2019__EPI_ISL_402128 spike protein mRNA gc mod (1-1273)(S477N_D614G)
gggaaauaagagagaaaagaagaguaagaagaaauauaagaccccggcgccgccaccauguucguguuccuggugcugcugccucugguguccagccagugugugaaccugaccaccagaacacagcugccuccagccuacaccaacagcuuuaccagaggcguguacuaccccgacaagguguucagauccagcgugcugcacucuacccaggaccuguuccugccuuucuucagcaacgugaccugguuccacgccauccacguguccggcaccaauggcaccaagagauucgacaaccccgugcugcccuucaacgacgggguguacuuugccagcaccgagaaguccaacaucaucagaggcuggaucuucggcaccacacuggacagcaagacccagagccugcugaucgugaacaacgccaccaacguggucaucaaagugugcgaguuccaguucugcaacgaccccuuccugggcgucuacuaccacaagaacaacaagagcuggauggaaagcgaguuccggguguacagcagcgccaacaacugcaccuucgaguacgugucccagccuuuccugauggaccuggaaggcaagcagggcaacuucaagaaccugcgcgaguucguguuuaagaacaucgacggcuacuucaagaucuacagcaagcacaccccuaucaaccucgugcgggaucugccucagggcuucucugcucuggaaccccugguggaucugcccaucggcaucaacaucacccgguuucagacacugcuggcccugcacagaagcuaccugacaccuggcgauagcagcagcggauggacagcuggugccgccgcuuacuaugugggcuaccugcagccuagaaccuuccugcugaaguacaacgagaacggcaccaucaccgacgccguggauugugcucuggauccucugagcgagacaaagugcacccugaaguccuucaccguggaaaagggcaucuaccagaccagcaacuuccgggugcagcccaccgaauccaucgugcgguuccccaauaucaccaaucugugccccuucggcgagguguucaaugccaccagauucgccucuguguacgccuggaaccggaagcggaucagcaauugcguggccgacuacuccgugcuguacaacuccgccagcuucagcaccuucaagugcuacggcguguccccuaccaagcugaacgaccugugcuucacaaacguguacgccgacagcuucgugauccggggagaugaagugcggcagauugccccuggacagacaggcaagaucgccgacuacaacuacaagcugcccgacgacuucaccggcugugugauugccuggaacagcaacaaccuggacuccaaagucggcggcaacuacaauuaccuguaccggcuguuccggaaguccaaucugaagcccuucgagcgggacaucuccaccgagaucuaucaggccggcaacaccccuuguaacggcguggaaggcuucaacugcuacuucccacugcaguccuacggcuuucagcccacaaauggcgugggcuaucagcccuacagagugguggugcugagcuucgaacugcugcaugccccugccacagugugcggcccuaagaaaagcaccaaucucgugaagaacaaaugcgugaacuucaacuucaacggccugaccggcaccggcgugcugacagagagcaacaagaaguuccugccauuccagcaguuuggccgggauaucgccgauaccacagacgccguuagagauccccagacacuggaaauccuggacaucaccccuugcagcuucggcggagugucugugaucaccccuggcaccaacaccagcaaucagguggcagugcuguaccagggcgugaacuguaccgaagugcccguggccauucacgccgaucagcugacaccuacauggcggguguacuccaccggcagcaauguguuucagaccagagccggcugucugaucggagccgagcacgugaacaauagcuacgagugcgacauccccaucggcgcuggaaucugcgccagcuaccagacacagacaaacagcccucggagagccagaagcguggccagccagagcaucauugccuacacaaugucucugggcgccgagaacagcguggccuacuccaacaacucuaucgcuauccccaccaacuucaccaucagcgugaccacagagauccugccuguguccaugaccaagaccagcguggacugcaccauguacaucugcggcgauuccaccgagugcuccaaccugcugcugcaguacggcagcuucugcacccagcugaauagagcccugacagggaucgccguggaacaggacaagaacacccaagagguguucgcccaagugaagcagaucuacaagaccccuccuaucaaggacuucggcggcuucaauuucagccagauucugcccgauccuagcaagcccagcaagcggagcuucaucgaggaccugcuguucaacaaagugacacuggccgacgccggcuucaucaagcaguauggcgauugucugggcgacauugccgccagggaucugauuugcgcccagaaguuuaacggacugacagugcugccuccucugcugaccgaugagaugaucgcccaguacacaucugcccugcuggccggcacaaucacaagcggcuggacauuuggagcaggcgccgcucugcagauccccuuugcuaugcagauggccuaccgguucaacggcaucggagugacccagaaugugcuguacgagaaccagaagcugaucgccaaccaguucaacagcgccaucggcaagauccaggacagccugagcagcacagcaagcgcccugggaaagcugcaggacguggucaaccagaaugcccaggcacugaacacccuggucaagcagcuguccuccaacuucggcgccaucagcucugugcugaacgauauccugagcagacuggacaaggucgaggccgaggugcagaucgacagacugaucacaggcagacugcagagccuccagacauacgugacccagcagcugaucagagccgccgagauuagagccucugccaaucuggccgccaccaagaugucugagugugugcugggccagagcaagagaguggacuuuugcggcaagggcuaccaccugaugagcuucccucagucugccccucacggcgugguguuucugcacgugacauaugugcccgcucaagagaagaauuucaccaccgcuccagccaucugccacgacggcaaagcccacuuuccuagagaaggcguguucguguccaacggcacccauugguucgugacacagcggaacuucuacgagccccagaucaucaccaccgacaacaccuucgugucuggcaacugcgacgucgugaucggcauugugaacaauaccguguacgacccucugcagcccgagcuggacagcuucaaagaggaacuggacaaguacuuuaagaaccacacaagccccgacguggaccugggcgauaucagcggaaucaaugccagcgucgugaacauccagaaagagaucgaccggcugaacgagguggccaagaaucugaacgagagccugaucgaccugcaagaacuggggaaguacgagcaguacaucaaguggcccugguacaucuggcugggcuuuaucgccggacugauugccaucgugauggucacaaucaugcuguguugcaugaccagcugcuguagcugccugaagggcuguuguagcuguggcagcugcugcaaguucgacgaggacgauucugagcccgugcugaagggcgugaaacugcacuacacaugauaauaggcuggagccucgguggccuagcuucuugccccuugggccuccccccagccccuccuccccuuccugcacccguacccccguggucuuugaauaaagucugagugggcggcaaaaaaaaaaaaaaaaaaaaaaaaaaaaaaaaaaaaaaaaaaaaaaaaaaaaaaaaaaaaaaaaaaaaaaaaaaaaaaaaaaaaaaaaaaaaaaaaaaaaucuag

SEQ ID NO: 26584 - RNA, 4100 nt, Artificial Sequence
  SARS-CoV-2/Wuhan/WIV05/2019__EPI_ISL_402128 spike protein mRNA gc mod (1-1273)(N501Y_D614G)
gggaaauaagagagaaaagaagaguaagaagaaauauaagaccccggcgccgccaccauguucguguuccuggugcugcugccucugguguccagccagugugugaaccugaccaccagaacacagcugccuccagccuacaccaacagcuuuaccagaggcguguacuaccccgacaagguguucagauccagcgugcugcacucuacccaggaccuguuccugccuuucuucagcaacgugaccugguuccacgccauccacguguccggcaccaauggcaccaagagauucgacaaccccgugcugcccuucaacgacgggguguacuuugccagcaccgagaaguccaacaucaucagaggcuggaucuucggcaccacacuggacagcaagacccagagccugcugaucgugaacaacgccaccaacguggucaucaaagugugcgaguuccaguucugcaacgaccccuuccugggcgucuacuaccacaagaacaacaagagcuggauggaaagcgaguuccggguguacagcagcgccaacaacugcaccuucgaguacgugucccagccuuuccugauggaccuggaaggcaagcagggcaacuucaagaaccugcgcgaguucguguuuaagaacaucgacggcuacuucaagaucuacagcaagcacaccccuaucaaccucgugcgggaucugccucagggcuucucugcucuggaaccccugguggaucugcccaucggcaucaacaucacccgguuucagacacugcuggcccugcacagaagcuaccugacaccuggcgauagcagcagcggauggacagcuggugccgccgcuuacuaugugggcuaccugcagccuagaaccuuccugcugaaguacaacgagaacggcaccaucaccgacgccguggauugugcucuggauccucugagcgagacaaagugcacccugaaguccuucaccguggaaaagggcaucuaccagaccagcaacuuccgggugcagcccaccgaauccaucgugcgguuccccaauaucaccaaucugugccccuucggcgagguguucaaugccaccagauucgccucuguguacgccuggaaccggaagcggaucagcaauugcguggccgacuacuccgugcuguacaacuccgccagcuucagcaccuucaagugcuacggcguguccccuaccaagcugaacgaccugugcuucacaaacguguacgccgacagcuucgugauccggggagaugaagugcggcagauugccccuggacagacaggcaagaucgccgacuacaacuacaagcugcccgacgacuucaccggcugugugauugccuggaacagcaacaaccuggacuccaaagucggcggcaacuacaauuaccuguaccggcuguuccggaaguccaaucugaagcccuucgagcgggacaucuccaccgagaucuaucaggccggcagcaccccuuguaacggcguggaaggcuucaacugcuacuucccacugcaguccuacggcuuucagcccacauacggcgugggcuaucagcccuacagagugguggugcugagcuucgaacugcugcaugccccugccacagugugcggcccuaagaaaagcaccaaucucgugaagaacaaaugcgugaacuucaacuucaacggccugaccggcaccggcgugcugacagagagcaacaagaaguuccugccauuccagcaguuuggccgggauaucgccgauaccacagacgccguuagagauccccagacacuggaaauccuggacaucaccccuugcagcuucggcggagugucugugaucaccccuggcaccaacaccagcaaucagguggcagugcuguaccagggcgugaacuguaccgaagugcccguggccauucacgccgaucagcugacaccuacauggcggguguacuccaccggcagcaauguguuucagaccagagccggcugucugaucggagccgagcacgugaacaauagcuacgagugcgacauccccaucggcgcuggaaucugcgccagcuaccagacacagacaaacagcccucggagagccagaagcguggccagccagagcaucauugccuacacaaugucucugggcgccgagaacagcguggccuacuccaacaacucuaucgcuauccccaccaacuucaccaucagcgugaccacagagauccugccuguguccaugaccaagaccagcguggacugcaccauguacaucugcggcgauuccaccgagugcuccaaccugcugcugcaguacggcagcuucugcacccagcugaauagagcccugacagggaucgccguggaacaggacaagaacacccaagagguguucgcccaagugaagcagaucuacaagaccccuccuaucaaggacuucggcggcuucaauuucagccagauucugcccgauccuagcaagcccagcaagcggagcuucaucgaggaccugcuguucaacaaagugacacuggccgacgccggcuucaucaagcaguauggcgauugucugggcgacauugccgccagggaucugauuugcgcccagaaguuuaacggacugacagugcugccuccucugcugaccgaugagaugaucgcccaguacacaucugcccugcuggccggcacaaucacaagcggcuggacauuuggagcaggcgccgcucugcagauccccuuugcuaugcagauggccuaccgguucaacggcaucggagugacccagaaugugcuguacgagaaccagaagcugaucgccaaccaguucaacagcgccaucggcaagauccaggacagccugagcagcacagcaagcgcccugggaaagcugcaggacguggucaaccagaaugcccaggcacugaacacccuggucaagcagcuguccuccaacuucggcgccaucagcucugugcugaacgauauccugagcagacuggacaaggucgaggccgaggugcagaucgacagacugaucacaggcagacugcagagccuccagacauacgugacccagcagcugaucagagccgccgagauuagagccucugccaaucuggccgccaccaagaugucugagugugugcugggccagagcaagagaguggacuuuugcggcaagggcuaccaccugaugagcuucccucagucugccccucacggcgugguguuucugcacgugacauaugugcccgcucaagagaagaauuucaccaccgcuccagccaucugccacgacggcaaagcccacuuuccuagagaaggcguguucguguccaacggcacccauugguucgugacacagcggaacuucuacgagccccagaucaucaccaccgacaacaccuucgugucuggcaacugcgacgucgugaucggcauugugaacaauaccguguacgacccucugcagcccgagcuggacagcuucaaagaggaacuggacaaguacuuuaagaaccacacaagccccgacguggaccugggcgauaucagcggaaucaaugccagcgucgugaacauccagaaagagaucgaccggcugaacgagguggccaagaaucugaacgagagccugaucgaccugcaagaacuggggaaguacgagcaguacaucaaguggcccugguacaucuggcugggcuuuaucgccggacugauugccaucgugauggucacaaucaugcuguguugcaugaccagcugcuguagcugccugaagggcuguuguagcuguggcagcugcugcaaguucgacgaggacgauucugagcccgugcugaagggcgugaaacugcacuacacaugauaauaggcuggagccucgguggccuagcuucuugccccuugggccuccccccagccccuccuccccuuccugcacccguacccccguggucuuugaauaaagucugagugggcggcaaaaaaaaaaaaaaaaaaaaaaaaaaaaaaaaaaaaaaaaaaaaaaaaaaaaaaaaaaaaaaaaaaaaaaaaaaaaaaaaaaaaaaaaaaaaaaaaaaaaucuag

SEQ ID NO: 26585 - RNA, 4094 nt, Artificial Sequence
  SARS-CoV-2/Wuhan/WIV05/2019__EPI_ISL_402128 spike protein mRNA gc mod (1-1273)(H69del_V70del_D614G)
gggaaauaagagagaaaagaagaguaagaagaaauauaagaccccggcgccgccaccauguucguguuccuggugcugcugccucugguguccagccagugugugaaccugaccaccagaacacagcugccuccagccuacaccaacagcuuuaccagaggcguguacuaccccgacaagguguucagauccagcgugcugcacucuacccaggaccuguuccugccuuucuucagcaacgugaccugguuccacgccaucuccggcaccaauggcaccaagagauucgacaaccccgugcugcccuucaacgacgggguguacuuugccagcaccgagaaguccaacaucaucagaggcuggaucuucggcaccacacuggacagcaagacccagagccugcugaucgugaacaacgccaccaacguggucaucaaagugugcgaguuccaguucugcaacgaccccuuccugggcgucuacuaccacaagaacaacaagagcuggauggaaagcgaguuccggguguacagcagcgccaacaacugcaccuucgaguacgugucccagccuuuccugauggaccuggaaggcaagcagggcaacuucaagaaccugcgcgaguucguguuuaagaacaucgacggcuacuucaagaucuacagcaagcacaccccuaucaaccucgugcgggaucugccucagggcuucucugcucuggaaccccugguggaucugcccaucggcaucaacaucacccgguuucagacacugcuggcccugcacagaagcuaccugacaccuggcgauagcagcagcggauggacagcuggugccgccgcuuacuaugugggcuaccugcagccuagaaccuuccugcugaaguacaacgagaacggcaccaucaccgacgccguggauugugcucuggauccucugagcgagacaaagugcacccugaaguccuucaccguggaaaagggcaucuaccagaccagcaacuuccgggugcagcccaccgaauccaucgugcgguuccccaauaucaccaaucugugccccuucggcgagguguucaaugccaccagauucgccucuguguacgccuggaaccggaagcggaucagcaauugcguggccgacuacuccgugcuguacaacuccgccagcuucagcaccuucaagugcuacggcguguccccuaccaagcugaacgaccugugcuucacaaacguguacgccgacagcuucgugauccggggagaugaagugcggcagauugccccuggacagacaggcaagaucgccgacuacaacuacaagcugcccgacgacuucaccggcugugugauugccuggaacagcaacaaccuggacuccaaagucggcggcaacuacaauuaccuguaccggcuguuccggaaguccaaucugaagcccuucgagcgggacaucuccaccgagaucuaucaggccggcagcaccccuuguaacggcguggaaggcuucaacugcuacuucccacugcaguccuacggcuuucagcccacaaauggcgugggcuaucagcccuacagagugguggugcugagcuucgaacugcugcaugccccugccacagugugcggcccuaagaaaagcaccaaucucgugaagaacaaaugcgugaacuucaacuucaacggccugaccggcaccggcgugcugacagagagcaacaagaaguuccugccauuccagcaguuuggccgggauaucgccgauaccacagacgccguuagagauccccagacacuggaaauccuggacaucaccccuugcagcuucggcggagugucugugaucaccccuggcaccaacaccagcaaucagguggcagugcuguaccagggcgugaacuguaccgaagugcccguggccauucacgccgaucagcugacaccuacauggcggguguacuccaccggcagcaauguguuucagaccagagccggcugucugaucggagccgagcacgugaacaauagcuacgagugcgacauccccaucggcgcuggaaucugcgccagcuaccagacacagacaaacagcccucggagagccagaagcguggccagccagagcaucauugccuacacaaugucucugggcgccgagaacagcguggccuacuccaacaacucuaucgcuauccccaccaacuucaccaucagcgugaccacagagauccugccuguguccaugaccaagaccagcguggacugcaccauguacaucugcggcgauuccaccgagugcuccaaccugcugcugcaguacggcagcuucugcacccagcugaauagagcccugacagggaucgccguggaacaggacaagaacacccaagagguguucgcccaagugaagcagaucuacaagaccccuccuaucaaggacuucggcggcuucaauuucagccagauucugcccgauccuagcaagcccagcaagcggagcuucaucgaggaccugcuguucaacaaagugacacuggccgacgccggcuucaucaagcaguauggcgauugucugggcgacauugccgccagggaucugauuugcgcccagaaguuuaacggacugacagugcugccuccucugcugaccgaugagaugaucgcccaguacacaucugcccugcuggccggcacaaucacaagcggcuggacauuuggagcaggcgccgcucugcagauccccuuugcuaugcagauggccuaccgguucaacggcaucggagugacccagaaugugcuguacgagaaccagaagcugaucgccaaccaguucaacagcgccaucggcaagauccaggacagccugagcagcacagcaagcgcccugggaaagcugcaggacguggucaaccagaaugcccaggcacugaacacccuggucaagcagcuguccuccaacuucggcgccaucagcucugugcugaacgauauccugagcagacuggacaaggucgaggccgaggugcagaucgacagacugaucacaggcagacugcagagccuccagacauacgugacccagcagcugaucagagccgccgagauuagagccucugccaaucuggccgccaccaagaugucugagugugugcugggccagagcaagagaguggacuuuugcggcaagggcuaccaccugaugagcuucccucagucugccccucacggcgugguguuucugcacgugacauaugugcccgcucaagagaagaauuucaccaccgcuccagccaucugccacgacggcaaagcccacuuuccuagagaaggcguguucguguccaacggcacccauugguucgugacacagcggaacuucuacgagccccagaucaucaccaccgacaacaccuucgugucuggcaacugcgacgucgugaucggcauugugaacaauaccguguacgacccucugcagcccgagcuggacagcuucaaagaggaacuggacaaguacuuuaagaaccacacaagccccgacguggaccugggcgauaucagcggaaucaaugccagcgucgugaacauccagaaagagaucgaccggcugaacgagguggccaagaaucugaacgagagccugaucgaccugcaagaacuggggaaguacgagcaguacaucaaguggcccugguacaucuggcugggcuuuaucgccggacugauugccaucgugauggucacaaucaugcuguguugcaugaccagcugcuguagcugccugaagggcuguuguagcuguggcagcugcugcaaguucgacgaggacgauucugagcccgugcugaagggcgugaaacugcacuacacaugauaauaggcuggagccucgguggccuagcuucuugccccuugggccuccccccagccccuccuccccuuccugcacccguacccccguggucuuugaauaaagucugagugggcggcaaaaaaaaaaaaaaaaaaaaaaaaaaaaaaaaaaaaaaaaaaaaaaaaaaaaaaaaaaaaaaaaaaaaaaaaaaaaaaaaaaaaaaaaaaaaaaaaaaaaucuag

SEQ ID NO: 26586 - RNA, 4100 nt, Artificial Sequence
  SARS-CoV-2/Wuhan/WIV05/2019__EPI_ISL_402128 spike protein mRNA gc mod (1-1273)(Y453F_D614G)
gggaaauaagagagaaaagaagaguaagaagaaauauaagaccccggcgccgccaccauguucguguuccuggugcugcugccucugguguccagccagugugugaaccugaccaccagaacacagcugccuccagccuacaccaacagcuuuaccagaggcguguacuaccccgacaagguguucagauccagcgugcugcacucuacccaggaccuguuccugccuuucuucagcaacgugaccugguuccacgccauccacguguccggcaccaauggcaccaagagauucgacaaccccgugcugcccuucaacgacgggguguacuuugccagcaccgagaaguccaacaucaucagaggcuggaucuucggcaccacacuggacagcaagacccagagccugcugaucgugaacaacgccaccaacguggucaucaaagugugcgaguuccaguucugcaacgaccccuuccugggcgucuacuaccacaagaacaacaagagcuggauggaaagcgaguuccggguguacagcagcgccaacaacugcaccuucgaguacgugucccagccuuuccugauggaccuggaaggcaagcagggcaacuucaagaaccugcgcgaguucguguuuaagaacaucgacggcuacuucaagaucuacagcaagcacaccccuaucaaccucgugcgggaucugccucagggcuucucugcucuggaaccccugguggaucugcccaucggcaucaacaucacccgguuucagacacugcuggcccugcacagaagcuaccugacaccuggcgauagcagcagcggauggacagcuggugccgccgcuuacuaugugggcuaccugcagccuagaaccuuccugcugaaguacaacgagaacggcaccaucaccgacgccguggauugugcucuggauccucugagcgagacaaagugcacccugaaguccuucaccguggaaaagggcaucuaccagaccagcaacuuccgggugcagcccaccgaauccaucgugcgguuccccaauaucaccaaucugugccccuucggcgagguguucaaugccaccagauucgccucuguguacgccuggaaccggaagcggaucagcaauugcguggccgacuacuccgugcuguacaacuccgccagcuucagcaccuucaagugcuacggcguguccccuaccaagcugaacgaccugugcuucacaaacguguacgccgacagcuucgugauccggggagaugaagugcggcagauugccccuggacagacaggcaagaucgccgacuacaacuacaagcugcccgacgacuucaccggcugugugauugccuggaacagcaacaaccuggacuccaaagucggcggcaacuacaauuaccuguuccggcuguuccggaaguccaaucugaagcccuucgagcgggacaucuccaccgagaucuaucaggccggcagcaccccuuguaacggcguggaaggcuucaacugcuacuucccacugcaguccuacggcuuucagcccacaaauggcgugggcuaucagcccuacagagugguggugcugagcuucgaacugcugcaugccccugccacagugugcggcccuaagaaaagcaccaaucucgugaagaacaaaugcgugaacuucaacuucaacggccugaccggcaccggcgugcugacagagagcaacaagaaguuccugccauuccagcaguuuggccgggauaucgccgauaccacagacgccguuagagauccccagacacuggaaauccuggacaucaccccuugcagcuucggcggagugucugugaucaccccuggcaccaacaccagcaaucagguggcagugcuguaccagggcgugaacuguaccgaagugcccguggccauucacgccgaucagcugacaccuacauggcggguguacuccaccggcagcaauguguuucagaccagagccggcugucugaucggagccgagcacgugaacaauagcuacgagugcgacauccccaucggcgcuggaaucugcgccagcuaccagacacagacaaacagcccucggagagccagaagcguggccagccagagcaucauugccuacacaaugucucugggcgccgagaacagcguggccuacuccaacaacucuaucgcuauccccaccaacuucaccaucagcgugaccacagagauccugccuguguccaugaccaagaccagcguggacugcaccauguacaucugcggcgauuccaccgagugcuccaaccugcugcugcaguacggcagcuucugcacccagcugaauagagcccugacagggaucgccguggaacaggacaagaacacccaagagguguucgcccaagugaagcagaucuacaagaccccuccuaucaaggacuucggcggcuucaauuucagccagauucugcccgauccuagcaagcccagcaagcggagcuucaucgaggaccugcuguucaacaaagugacacuggccgacgccggcuucaucaagcaguauggcgauugucugggcgacauugccgccagggaucugauuugcgcccagaaguuuaacggacugacagugcugccuccucugcugaccgaugagaugaucgcccaguacacaucugcccugcuggccggcacaaucacaagcggcuggacauuuggagcaggcgccgcucugcagauccccuuugcuaugcagauggccuaccgguucaacggcaucggagugacccagaaugugcuguacgagaaccagaagcugaucgccaaccaguucaacagcgccaucggcaagauccaggacagccugagcagcacagcaagcgcccugggaaagcugcaggacguggucaaccagaaugcccaggcacugaacacccuggucaagcagcuguccuccaacuucggcgccaucagcucugugcugaacgauauccugagcagacuggacaaggucgaggccgaggugcagaucgacagacugaucacaggcagacugcagagccuccagacauacgugacccagcagcugaucagagccgccgagauuagagccucugccaaucuggccgccaccaagaugucugagugugugcugggccagagcaagagaguggacuuuugcggcaagggcuaccaccugaugagcuucccucagucugccccucacggcgugguguuucugcacgugacauaugugcccgcucaagagaagaauuucaccaccgcuccagccaucugccacgacggcaaagcccacuuuccuagagaaggcguguucguguccaacggcacccauugguucgugacacagcggaacuucuacgagccccagaucaucaccaccgacaacaccuucgugucuggcaacugcgacgucgugaucggcauugugaacaauaccguguacgacccucugcagcccgagcuggacagcuucaaagaggaacuggacaaguacuuuaagaaccacacaagccccgacguggaccugggcgauaucagcggaaucaaugccagcgucgugaacauccagaaagagaucgaccggcugaacgagguggccaagaaucugaacgagagccugaucgaccugcaagaacuggggaaguacgagcaguacaucaaguggcccugguacaucuggcugggcuuuaucgccggacugauugccaucgugauggucacaaucaugcuguguugcaugaccagcugcuguagcugccugaagggcuguuguagcuguggcagcugcugcaaguucgacgaggacgauucugagcccgugcugaagggcgugaaacugcacuacacaugauaauaggcuggagccucgguggccuagcuucuugccccuugggccuccccccagccccuccuccccuuccugcacccguacccccguggucuuugaauaaagucugagugggcggcaaaaaaaaaaaaaaaaaaaaaaaaaaaaaaaaaaaaaaaaaaaaaaaaaaaaaaaaaaaaaaaaaaaaaaaaaaaaaaaaaaaaaaaaaaaaaaaaaaaaucuag

SEQ ID NO: 26587 - RNA, 4100 nt, Artificial Sequence
  SARS-CoV-2/Wuhan/WIV05/2019__EPI_ISL_402128 spike protein mRNA gc mod (1-1273)(D614G_I692V)
gggaaauaagagagaaaagaagaguaagaagaaauauaagaccccggcgccgccaccauguucguguuccuggugcugcugccucugguguccagccagugugugaaccugaccaccagaacacagcugccuccagccuacaccaacagcuuuaccagaggcguguacuaccccgacaagguguucagauccagcgugcugcacucuacccaggaccuguuccugccuuucuucagcaacgugaccugguuccacgccauccacguguccggcaccaauggcaccaagagauucgacaaccccgugcugcccuucaacgacgggguguacuuugccagcaccgagaaguccaacaucaucagaggcuggaucuucggcaccacacuggacagcaagacccagagccugcugaucgugaacaacgccaccaacguggucaucaaagugugcgaguuccaguucugcaacgaccccuuccugggcgucuacuaccacaagaacaacaagagcuggauggaaagcgaguuccggguguacagcagcgccaacaacugcaccuucgaguacgugucccagccuuuccugauggaccuggaaggcaagcagggcaacuucaagaaccugcgcgaguucguguuuaagaacaucgacggcuacuucaagaucuacagcaagcacaccccuaucaaccucgugcgggaucugccucagggcuucucugcucuggaaccccugguggaucugcccaucggcaucaacaucacccgguuucagacacugcuggcccugcacagaagcuaccugacaccuggcgauagcagcagcggauggacagcuggugccgccgcuuacuaugugggcuaccugcagccuagaaccuuccugcugaaguacaacgagaacggcaccaucaccgacgccguggauugugcucuggauccucugagcgagacaaagugcacccugaaguccuucaccguggaaaagggcaucuaccagaccagcaacuuccgggugcagcccaccgaauccaucgugcgguuccccaauaucaccaaucugugccccuucggcgagguguucaaugccaccagauucgccucuguguacgccuggaaccggaagcggaucagcaauugcguggccgacuacuccgugcuguacaacuccgccagcuucagcaccuucaagugcuacggcguguccccuaccaagcugaacgaccugugcuucacaaacguguacgccgacagcuucgugauccggggagaugaagugcggcagauugccccuggacagacaggcaagaucgccgacuacaacuacaagcugcccgacgacuucaccggcugugugauugccuggaacagcaacaaccuggacuccaaagucggcggcaacuacaauuaccuguaccggcuguuccggaaguccaaucugaagcccuucgagcgggacaucuccaccgagaucuaucaggccggcagcaccccuuguaacggcguggaaggcuucaacugcuacuucccacugcaguccuacggcuuucagcccacaaauggcgugggcuaucagcccuacagagugguggugcugagcuucgaacugcugcaugccccugccacagugugcggcccuaagaaaagcaccaaucucgugaagaacaaaugcgugaacuucaacuucaacggccugaccggcaccggcgugcugacagagagcaacaagaaguuccugccauuccagcaguuuggccgggauaucgccgauaccacagacgccguuagagauccccagacacuggaaauccuggacaucaccccuugcagcuucggcggagugucugugaucaccccuggcaccaacaccagcaaucagguggcagugcuguaccagggcgugaacuguaccgaagugcccguggccauucacgccgaucagcugacaccuacauggcggguguacuccaccggcagcaauguguuucagaccagagccggcugucugaucggagccgagcacgugaacaauagcuacgagugcgacauccccaucggcgcuggaaucugcgccagcuaccagacacagacaaacagcccucggagagccagaagcguggccagccagagcgugauugccuacacaaugucucugggcgccgagaacagcguggccuacuccaacaacucuaucgcuauccccaccaacuucaccaucagcgugaccacagagauccugccuguguccaugaccaagaccagcguggacugcaccauguacaucugcggcgauuccaccgagugcuccaaccugcugcugcaguacggcagcuucugcacccagcugaauagagcccugacagggaucgccguggaacaggacaagaacacccaagagguguucgcccaagugaagcagaucuacaagaccccuccuaucaaggacuucggcggcuucaauuucagccagauucugcccgauccuagcaagcccagcaagcggagcuucaucgaggaccugcuguucaacaaagugacacuggccgacgccggcuucaucaagcaguauggcgauugucugggcgacauugccgccagggaucugauuugcgcccagaaguuuaacggacugacagugcugccuccucugcugaccgaugagaugaucgcccaguacacaucugcccugcuggccggcacaaucacaagcggcuggacauuuggagcaggcgccgcucugcagauccccuuugcuaugcagauggccuaccgguucaacggcaucggagugacccagaaugugcuguacgagaaccagaagcugaucgccaaccaguucaacagcgccaucggcaagauccaggacagccugagcagcacagcaagcgcccugggaaagcugcaggacguggucaaccagaaugcccaggcacugaacacccuggucaagcagcuguccuccaacuucggcgccaucagcucugugcugaacgauauccugagcagacuggacaaggucgaggccgaggugcagaucgacagacugaucacaggcagacugcagagccuccagacauacgugacccagcagcugaucagagccgccgagauuagagccucugccaaucuggccgccaccaagaugucugagugugugcugggccagagcaagagaguggacuuuugcggcaagggcuaccaccugaugagcuucccucagucugccccucacggcgugguguuucugcacgugacauaugugcccgcucaagagaagaauuucaccaccgcuccagccaucugccacgacggcaaagcccacuuuccuagagaaggcguguucguguccaacggcacccauugguucgugacacagcggaacuucuacgagccccagaucaucaccaccgacaacaccuucgugucuggcaacugcgacgucgugaucggcauugugaacaauaccguguacgacccucugcagcccgagcuggacagcuucaaagaggaacuggacaaguacuuuaagaaccacacaagccccgacguggaccugggcgauaucagcggaaucaaugccagcgucgugaacauccagaaagagaucgaccggcugaacgagguggccaagaaucugaacgagagccugaucgaccugcaagaacuggggaaguacgagcaguacaucaaguggcccugguacaucuggcugggcuuuaucgccggacugauugccaucgugauggucacaaucaugcuguguugcaugaccagcugcuguagcugccugaagggcuguuguagcuguggcagcugcugcaaguucgacgaggacgauucugagcccgugcugaagggcgugaaacugcacuacacaugauaauaggcuggagccucgguggccuagcuucuugccccuugggccuccccccagccccuccuccccuuccugcacccguacccccguggucuuugaauaaagucugagugggcggcaaaaaaaaaaaaaaaaaaaaaaaaaaaaaaaaaaaaaaaaaaaaaaaaaaaaaaaaaaaaaaaaaaaaaaaaaaaaaaaaaaaaaaaaaaaaaaaaaaaaucuag

SEQ ID NO: 26588 - RNA, 4100 nt, Artificial Sequence
  SARS-CoV-2/Wuhan/WIV05/2019__EPI_ISL_402128 spike protein mRNA gc mod (1-1273)(D614G_M1229I)
gggaaauaagagagaaaagaagaguaagaagaaauauaagaccccggcgccgccaccauguucguguuccuggugcugcugccucugguguccagccagugugugaaccugaccaccagaacacagcugccuccagccuacaccaacagcuuuaccagaggcguguacuaccccgacaagguguucagauccagcgugcugcacucuacccaggaccuguuccugccuuucuucagcaacgugaccugguuccacgccauccacguguccggcaccaauggcaccaagagauucgacaaccccgugcugcccuucaacgacgggguguacuuugccagcaccgagaaguccaacaucaucagaggcuggaucuucggcaccacacuggacagcaagacccagagccugcugaucgugaacaacgccaccaacguggucaucaaagugugcgaguuccaguucugcaacgaccccuuccugggcgucuacuaccacaagaacaacaagagcuggauggaaagcgaguuccggguguacagcagcgccaacaacugcaccuucgaguacgugucccagccuuuccugauggaccuggaaggcaagcagggcaacuucaagaaccugcgcgaguucguguuuaagaacaucgacggcuacuucaagaucuacagcaagcacaccccuaucaaccucgugcgggaucugccucagggcuucucugcucuggaaccccugguggaucugcccaucggcaucaacaucacccgguuucagacacugcuggcccugcacagaagcuaccugacaccuggcgauagcagcagcggauggacagcuggugccgccgcuuacuaugugggcuaccugcagccuagaaccuuccugcugaaguacaacgagaacggcaccaucaccgacgccguggauugugcucuggauccucugagcgagacaaagugcacccugaaguccuucaccguggaaaagggcaucuaccagaccagcaacuuccgggugcagcccaccgaauccaucgugcgguuccccaauaucaccaaucugugccccuucggcgagguguucaaugccaccagauucgccucuguguacgccuggaaccggaagcggaucagcaauugcguggccgacuacuccgugcuguacaacuccgccagcuucagcaccuucaagugcuacggcguguccccuaccaagcugaacgaccugugcuucacaaacguguacgccgacagcuucgugauccggggagaugaagugcggcagauugccccuggacagacaggcaagaucgccgacuacaacuacaagcugcccgacgacuucaccggcugugugauugccuggaacagcaacaaccuggacuccaaagucggcggcaacuacaauuaccuguaccggcuguuccggaaguccaaucugaagcccuucgagcgggacaucuccaccgagaucuaucaggccggcagcaccccuuguaacggcguggaaggcuucaacugcuacuucccacugcaguccuacggcuuucagcccacaaauggcgugggcuaucagcccuacagagugguggugcugagcuucgaacugcugcaugccccugccacagugugcggcccuaagaaaagcaccaaucucgugaagaacaaaugcgugaacuucaacuucaacggccugaccggcaccggcgugcugacagagagcaacaagaaguuccugccauuccagcaguuuggccgggauaucgccgauaccacagacgccguuagagauccccagacacuggaaauccuggacaucaccccuugcagcuucggcggagugucugugaucaccccuggcaccaacaccagcaaucagguggcagugcuguaccagggcgugaacuguaccgaagugcccguggccauucacgccgaucagcugacaccuacauggcggguguacuccaccggcagcaauguguuucagaccagagccggcugucugaucggagccgagcacgugaacaauagcuacgagugcgacauccccaucggcgcuggaaucugcgccagcuaccagacacagacaaacagcccucggagagccagaagcguggccagccagagcaucauugccuacacaaugucucugggcgccgagaacagcguggccuacuccaacaacucuaucgcuauccccaccaacuucaccaucagcgugaccacagagauccugccuguguccaugaccaagaccagcguggacugcaccauguacaucugcggcgauuccaccgagugcuccaaccugcugcugcaguacggcagcuucugcacccagcugaauagagcccugacagggaucgccguggaacaggacaagaacacccaagagguguucgcccaagugaagcagaucuacaagaccccuccuaucaaggacuucggcggcuucaauuucagccagauucugcccgauccuagcaagcccagcaagcggagcuucaucgaggaccugcuguucaacaaagugacacuggccgacgccggcuucaucaagcaguauggcgauugucugggcgacauugccgccagggaucugauuugcgcccagaaguuuaacggacugacagugcugccuccucugcugaccgaugagaugaucgcccaguacacaucugcccugcuggccggcacaaucacaagcggcuggacauuuggagcaggcgccgcucugcagauccccuuugcuaugcagauggccuaccgguucaacggcaucggagugacccagaaugugcuguacgagaaccagaagcugaucgccaaccaguucaacagcgccaucggcaagauccaggacagccugagcagcacagcaagcgcccugggaaagcugcaggacguggucaaccagaaugcccaggcacugaacacccuggucaagcagcuguccuccaacuucggcgccaucagcucugugcugaacgauauccugagcagacuggacaaggucgaggccgaggugcagaucgacagacugaucacaggcagacugcagagccuccagacauacgugacccagcagcugaucagagccgccgagauuagagccucugccaaucuggccgccaccaagaugucugagugugugcugggccagagcaagagaguggacuuuugcggcaagggcuaccaccugaugagcuucccucagucugccccucacggcgugguguuucugcacgugacauaugugcccgcucaagagaagaauuucaccaccgcuccagccaucugccacgacggcaaagcccacuuuccuagagaaggcguguucguguccaacggcacccauugguucgugacacagcggaacuucuacgagccccagaucaucaccaccgacaacaccuucgugucuggcaacugcgacgucgugaucggcauugugaacaauaccguguacgacccucugcagcccgagcuggacagcuucaaagaggaacuggacaaguacuuuaagaaccacacaagccccgacguggaccugggcgauaucagcggaaucaaugccagcgucgugaacauccagaaagagaucgaccggcugaacgagguggccaagaaucugaacgagagccugaucgaccugcaagaacuggggaaguacgagcaguacaucaaguggcccugguacaucuggcugggcuuuaucgccggacugauugccaucgugaucgucacaaucaugcuguguugcaugaccagcugcuguagcugccugaagggcuguuguagcuguggcagcugcugcaaguucgacgaggacgauucugagcccgugcugaagggcgugaaacugcacuacacaugauaauaggcuggagccucgguggccuagcuucuugccccuugggccuccccccagccccuccuccccuuccugcacccguacccccguggucuuugaauaaagucugagugggcggcaaaaaaaaaaaaaaaaaaaaaaaaaaaaaaaaaaaaaaaaaaaaaaaaaaaaaaaaaaaaaaaaaaaaaaaaaaaaaaaaaaaaaaaaaaaaaaaaaaaaucuag

SEQ ID NO: 26589 - RNA, 4094 nt, Artificial Sequence
  SARS-CoV-2/Wuhan/WIV05/2019__EPI_ISL_402128 spike protein mRNA gc mod (1-1273)(H69del_V70del_A222V_Y453F_S477N_D614G_I692V)
gggaaauaagagagaaaagaagaguaagaagaaauauaagaccccggcgccgccaccauguucguguuccuggugcugcugccucugguguccagccagugugugaaccugaccaccagaacacagcugccuccagccuacaccaacagcuuuaccagaggcguguacuaccccgacaagguguucagauccagcgugcugcacucuacccaggaccuguuccugccuuucuucagcaacgugaccugguuccacgccaucuccggcaccaauggcaccaagagauucgacaaccccgugcugcccuucaacgacgggguguacuuugccagcaccgagaaguccaacaucaucagaggcuggaucuucggcaccacacuggacagcaagacccagagccugcugaucgugaacaacgccaccaacguggucaucaaagugugcgaguuccaguucugcaacgaccccuuccugggcgucuacuaccacaagaacaacaagagcuggauggaaagcgaguuccggguguacagcagcgccaacaacugcaccuucgaguacgugucccagccuuuccugauggaccuggaaggcaagcagggcaacuucaagaaccugcgcgaguucguguuuaagaacaucgacggcuacuucaagaucuacagcaagcacaccccuaucaaccucgugcgggaucugccucagggcuucucugugcuggaaccccugguggaucugcccaucggcaucaacaucacccgguuucagacacugcuggcccugcacagaagcuaccugacaccuggcgauagcagcagcggauggacagcuggugccgccgcuuacuaugugggcuaccugcagccuagaaccuuccugcugaaguacaacgagaacggcaccaucaccgacgccguggauugugcucuggauccucugagcgagacaaagugcacccugaaguccuucaccguggaaaagggcaucuaccagaccagcaacuuccgggugcagcccaccgaauccaucgugcgguuccccaauaucaccaaucugugccccuucggcgagguguucaaugccaccagauucgccucuguguacgccuggaaccggaagcggaucagcaauugcguggccgacuacuccgugcuguacaacuccgccagcuucagcaccuucaagugcuacggcguguccccuaccaagcugaacgaccugugcuucacaaacguguacgccgacagcuucgugauccggggagaugaagugcggcagauugccccuggacagacaggcaagaucgccgacuacaacuacaagcugcccgacgacuucaccggcugugugauugccuggaacagcaacaaccuggacuccaaagucggcggcaacuacaauuaccuguuccggcuguuccggaaguccaaucugaagcccuucgagcgggacaucuccaccgagaucuaucaggccggcaacaccccuuguaacggcguggaaggcuucaacugcuacuucccacugcaguccuacggcuuucagcccacaaauggcgugggcuaucagcccuacagagugguggugcugagcuucgaacugcugcaugccccugccacagugugcggcccuaagaaaagcaccaaucucgugaagaacaaaugcgugaacuucaacuucaacggccugaccggcaccggcgugcugacagagagcaacaagaaguuccugccauuccagcaguuuggccgggauaucgccgauaccacagacgccguuagagauccccagacacuggaaauccuggacaucaccccuugcagcuucggcggagugucugugaucaccccuggcaccaacaccagcaaucagguggcagugcuguaccagggcgugaacuguaccgaagugcccguggccauucacgccgaucagcugacaccuacauggcggguguacuccaccggcagcaauguguuucagaccagagccggcugucugaucggagccgagcacgugaacaauagcuacgagugcgacauccccaucggcgcuggaaucugcgccagcuaccagacacagacaaacagcccucggagagccagaagcguggccagccagagcgugauugccuacacaaugucucugggcgccgagaacagcguggccuacuccaacaacucuaucgcuauccccaccaacuucaccaucagcgugaccacagagauccugccuguguccaugaccaagaccagcguggacugcaccauguacaucugcggcgauuccaccgagugcuccaaccugcugcugcaguacggcagcuucugcacccagcugaauagagcccugacagggaucgccguggaacaggacaagaacacccaagagguguucgcccaagugaagcagaucuacaagaccccuccuaucaaggacuucggcggcuucaauuucagccagauucugcccgauccuagcaagcccagcaagcggagcuucaucgaggaccugcuguucaacaaagugacacuggccgacgccggcuucaucaagcaguauggcgauugucugggcgacauugccgccagggaucugauuugcgcccagaaguuuaacggacugacagugcugccuccucugcugaccgaugagaugaucgcccaguacacaucugcccugcuggccggcacaaucacaagcggcuggacauuuggagcaggcgccgcucugcagauccccuuugcuaugcagauggccuaccgguucaacggcaucggagugacccagaaugugcuguacgagaaccagaagcugaucgccaaccaguucaacagcgccaucggcaagauccaggacagccugagcagcacagcaagcgcccugggaaagcugcaggacguggucaaccagaaugcccaggcacugaacacccuggucaagcagcuguccuccaacuucggcgccaucagcucugugcugaacgauauccugagcagacuggacaaggucgaggccgaggugcagaucgacagacugaucacaggcagacugcagagccuccagacauacgugacccagcagcugaucagagccgccgagauuagagccucugccaaucuggccgccaccaagaugucugagugugugcugggccagagcaagagaguggacuuuugcggcaagggcuaccaccugaugagcuucccucagucugccccucacggcgugguguuucugcacgugacauaugugcccgcucaagagaagaauuucaccaccgcuccagccaucugccacgacggcaaagcccacuuuccuagagaaggcguguucguguccaacggcacccauugguucgugacacagcggaacuucuacgagccccagaucaucaccaccgacaacaccuucgugucuggcaacugcgacgucgugaucggcauugugaacaauaccguguacgacccucugcagcccgagcuggacagcuucaaagaggaacuggacaaguacuuuaagaaccacacaagccccgacguggaccugggcgauaucagcggaaucaaugccagcgucgugaacauccagaaagagaucgaccggcugaacgagguggccaagaaucugaacgagagccugaucgaccugcaagaacuggggaaguacgagcaguacaucaaguggcccugguacaucuggcugggcuuuaucgccggacugauugccaucgugauggucacaaucaugcuguguugcaugaccagcugcuguagcugccugaagggcuguuguagcuguggcagcugcugcaaguucgacgaggacgauucugagcccgugcugaagggcgugaaacugcacuacacaugauaauaggcuggagccucgguggccuagcuucuugccccuugggccuccccccagccccuccuccccuuccugcacccguacccccguggucuuugaauaaagucugagugggcggcaaaaaaaaaaaaaaaaaaaaaaaaaaaaaaaaaaaaaaaaaaaaaaaaaaaaaaaaaaaaaaaaaaaaaaaaaaaaaaaaaaaaaaaaaaaaaaaaaaaaucuag

SEQ ID NO: 26590 - RNA, 4094 nt, Artificial Sequence
  SARS-CoV-2/Wuhan/WIV05/2019__EPI_ISL_402128 spike protein mRNA gc mod (1-1273)(H69del_V70del_Y453F_D614G_I692V_M1229I)
gggaaauaagagagaaaagaagaguaagaagaaauauaagaccccggcgccgccaccauguucguguuccuggugcugcugccucugguguccagccagugugugaaccugaccaccagaacacagcugccuccagccuacaccaacagcuuuaccagaggcguguacuaccccgacaagguguucagauccagcgugcugcacucuacccaggaccuguuccugccuuucuucagcaacgugaccugguuccacgccaucuccggcaccaauggcaccaagagauucgacaaccccgugcugcccuucaacgacgggguguacuuugccagcaccgagaaguccaacaucaucagaggcuggaucuucggcaccacacuggacagcaagacccagagccugcugaucgugaacaacgccaccaacguggucaucaaagugugcgaguuccaguucugcaacgaccccuuccugggcgucuacuaccacaagaacaacaagagcuggauggaaagcgaguuccggguguacagcagcgccaacaacugcaccuucgaguacgugucccagccuuuccugauggaccuggaaggcaagcagggcaacuucaagaaccugcgcgaguucguguuuaagaacaucgacggcuacuucaagaucuacagcaagcacaccccuaucaaccucgugcgggaucugccucagggcuucucugcucuggaaccccugguggaucugcccaucggcaucaacaucacccgguuucagacacugcuggcccugcacagaagcuaccugacaccuggcgauagcagcagcggauggacagcuggugccgccgcuuacuaugugggcuaccugcagccuagaaccuuccugcugaaguacaacgagaacggcaccaucaccgacgccguggauugugcucuggauccucugagcgagacaaagugcacccugaaguccuucaccguggaaaagggcaucuaccagaccagcaacuuccgggugcagcccaccgaauccaucgugcgguuccccaauaucaccaaucugugccccuucggcgagguguucaaugccaccagauucgccucuguguacgccuggaaccggaagcggaucagcaauugcguggccgacuacuccgugcuguacaacuccgccagcuucagcaccuucaagugcuacggcguguccccuaccaagcugaacgaccugugcuucacaaacguguacgccgacagcuucgugauccggggagaugaagugcggcagauugccccuggacagacaggcaagaucgccgacuacaacuacaagcugcccgacgacuucaccggcugugugauugccuggaacagcaacaaccuggacuccaaagucggcggcaacuacaauuaccuguuccggcuguuccggaaguccaaucugaagcccuucgagcgggacaucuccaccgagaucuaucaggccggcagcaccccuuguaacggcguggaaggcuucaacugcuacuucccacugcaguccuacggcuuucagcccacaaauggcgugggcuaucagcccuacagagugguggugcugagcuucgaacugcugcaugccccugccacagugugcggcccuaagaaaagcaccaaucucgugaagaacaaaugcgugaacuucaacuucaacggccugaccggcaccggcgugcugacagagagcaacaagaaguuccugccauuccagcaguuuggccgggauaucgccgauaccacagacgccguuagagauccccagacacuggaaauccuggacaucaccccuugcagcuucggcggagugucugugaucaccccuggcaccaacaccagcaaucagguggcagugcuguaccagggcgugaacuguaccgaagugcccguggccauucacgccgaucagcugacaccuacauggcggguguacuccaccggcagcaauguguuucagaccagagccggcugucugaucggagccgagcacgugaacaauagcuacgagugcgacauccccaucggcgcuggaaucugcgccagcuaccagacacagacaaacagcccucggagagccagaagcguggccagccagagcgugauugccuacacaaugucucugggcgccgagaacagcguggccuacuccaacaacucuaucgcuauccccaccaacuucaccaucagcgugaccacagagauccugccuguguccaugaccaagaccagcguggacugcaccauguacaucugcggcgauuccaccgagugcuccaaccugcugcugcaguacggcagcuucugcacccagcugaauagagcccugacagggaucgccguggaacaggacaagaacacccaagagguguucgcccaagugaagcagaucuacaagaccccuccuaucaaggacuucggcggcuucaauuucagccagauucugcccgauccuagcaagcccagcaagcggagcuucaucgaggaccugcuguucaacaaagugacacuggccgacgccggcuucaucaagcaguauggcgauugucugggcgacauugccgccagggaucugauuugcgcccagaaguuuaacggacugacagugcugccuccucugcugaccgaugagaugaucgcccaguacacaucugcccugcuggccggcacaaucacaagcggcuggacauuuggagcaggcgccgcucugcagauccccuuugcuaugcagauggccuaccgguucaacggcaucggagugacccagaaugugcuguacgagaaccagaagcugaucgccaaccaguucaacagcgccaucggcaagauccaggacagccugagcagcacagcaagcgcccugggaaagcugcaggacguggucaaccagaaugcccaggcacugaacacccuggucaagcagcuguccuccaacuucggcgccaucagcucugugcugaacgauauccugagcagacuggacaaggucgaggccgaggugcagaucgacagacugaucacaggcagacugcagagccuccagacauacgugacccagcagcugaucagagccgccgagauuagagccucugccaaucuggccgccaccaagaugucugagugugugcugggccagagcaagagaguggacuuuugcggcaagggcuaccaccugaugagcuucccucagucugccccucacggcgugguguuucugcacgugacauaugugcccgcucaagagaagaauuucaccaccgcuccagccaucugccacgacggcaaagcccacuuuccuagagaaggcguguucguguccaacggcacccauugguucgugacacagcggaacuucuacgagccccagaucaucaccaccgacaacaccuucgugucuggcaacugcgacgucgugaucggcauugugaacaauaccguguacgacccucugcagcccgagcuggacagcuucaaagaggaacuggacaaguacuuuaagaaccacacaagccccgacguggaccugggcgauaucagcggaaucaaugccagcgucgugaacauccagaaagagaucgaccggcugaacgagguggccaagaaucugaacgagagccugaucgaccugcaagaacuggggaaguacgagcaguacaucaaguggcccugguacaucuggcugggcuuuaucgccggacugauugccaucgugaucgucacaaucaugcuguguugcaugaccagcugcuguagcugccugaagggcuguuguagcuguggcagcugcugcaaguucgacgaggacgauucugagcccgugcugaagggcgugaaacugcacuacacaugauaauaggcuggagccucgguggccuagcuucuugccccuugggccuccccccagccccuccuccccuuccugcacccguacccccguggucuuugaauaaagucugagugggcggcaaaaaaaaaaaaaaaaaaaaaaaaaaaaaaaaaaaaaaaaaaaaaaaaaaaaaaaaaaaaaaaaaaaaaaaaaaaaaaaaaaaaaaaaaaaaaaaaaaaaucuag

SEQ ID NO: 26591 - RNA, 4091 nt, Artificial Sequence
  SARS-CoV-2/Wuhan/WIV05/2019__EPI_ISL_402128 spike protein mRNA gc mod (1-1273)(H69del_V70del_Y144del_N501Y_A570D_D614G_P681H_T716I_S982 A_D1118H)
gggaaauaagagagaaaagaagaguaagaagaaauauaagaccccggcgccgccaccauguucguguuccuggugcugcugccucugguguccagccagugugugaaccugaccaccagaacacagcugccuccagccuacaccaacagcuuuaccagaggcguguacuaccccgacaagguguucagauccagcgugcugcacucuacccaggaccuguuccugccuuucuucagcaacgugaccugguuccacgccaucuccggcaccaauggcaccaagagauucgacaaccccgugcugcccuucaacgacgggguguacuuugccagcaccgagaaguccaacaucaucagaggcuggaucuucggcaccacacuggacagcaagacccagagccugcugaucgugaacaacgccaccaacguggucaucaaagugugcgaguuccaguucugcaacgaccccuuccugggcgucuaccacaagaacaacaagagcuggauggaaagcgaguuccggguguacagcagcgccaacaacugcaccuucgaguacgugucccagccuuuccugauggaccuggaaggcaagcagggcaacuucaagaaccugcgcgaguucguguuuaagaacaucgacggcuacuucaagaucuacagcaagcacaccccuaucaaccucgugcgggaucugccucagggcuucucugcucuggaaccccugguggaucugcccaucggcaucaacaucacccgguuucagacacugcuggcccugcacagaagcuaccugacaccuggcgauagcagcagcggauggacagcuggugccgccgcuuacuaugugggcuaccugcagccuagaaccuuccugcugaaguacaacgagaacggcaccaucaccgacgccguggauugugcucuggauccucugagcgagacaaagugcacccugaaguccuucaccguggaaaagggcaucuaccagaccagcaacuuccgggugcagcccaccgaauccaucgugcgguuccccaauaucaccaaucugugccccuucggcgagguguucaaugccaccagauucgccucuguguacgccuggaaccggaagcggaucagcaauugcguggccgacuacuccgugcuguacaacuccgccagcuucagcaccuucaagugcuacggcguguccccuaccaagcugaacgaccugugcuucacaaacguguacgccgacagcuucgugauccggggagaugaagugcggcagauugccccuggacagacaggcaagaucgccgacuacaacuacaagcugcccgacgacuucaccggcugugugauugccuggaacagcaacaaccuggacuccaaagucggcggcaacuacaauuaccuguaccggcuguuccggaaguccaaucugaagcccuucgagcgggacaucuccaccgagaucuaucaggccggcagcaccccuuguaacggcguggaaggcuucaacugcuacuucccacugcaguccuacggcuuucagcccacauacggcgugggcuaucagcccuacagagugguggugcugagcuucgaacugcugcaugccccugccacagugugcggcccuaagaaaagcaccaaucucgugaagaacaaaugcgugaacuucaacuucaacggccugaccggcaccggcgugcugacagagagcaacaagaaguuccugccauuccagcaguuuggccgggauaucgacgauaccacagacgccguuagagauccccagacacuggaaauccuggacaucaccccuugcagcuucggcggagugucugugaucaccccuggcaccaacaccagcaaucagguggcagugcuguaccagggcgugaacuguaccgaagugcccguggccauucacgccgaucagcugacaccuacauggcggguguacuccaccggcagcaauguguuucagaccagagccggcugucugaucggagccgagcacgugaacaauagcuacgagugcgacauccccaucggcgcuggaaucugcgccagcuaccagacacagacaaacagccaccggagagccagaagcguggccagccagagcaucauugccuacacaaugucucugggcgccgagaacagcguggccuacuccaacaacucuaucgcuauccccaucaacuucaccaucagcgugaccacagagauccugccuguguccaugaccaagaccagcguggacugcaccauguacaucugcggcgauuccaccgagugcuccaaccugcugcugcaguacggcagcuucugcacccagcugaauagagcccugacagggaucgccguggaacaggacaagaacacccaagagguguucgcccaagugaagcagaucuacaagaccccuccuaucaaggacuucggcggcuucaauuucagccagauucugcccgauccuagcaagcccagcaagcggagcuucaucgaggaccugcuguucaacaaagugacacuggccgacgccggcuucaucaagcaguauggcgauugucugggcgacauugccgccagggaucugauuugcgcccagaaguuuaacggacugacagugcugccuccucugcugaccgaugagaugaucgcccaguacacaucugcccugcuggccggcacaaucacaagcggcuggacauuuggagcaggcgccgcucugcagauccccuuugcuaugcagauggccuaccgguucaacggcaucggagugacccagaaugugcuguacgagaaccagaagcugaucgccaaccaguucaacagcgccaucggcaagauccaggacagccugagcagcacagcaagcgcccugggaaagcugcaggacguggucaaccagaaugcccaggcacugaacacccuggucaagcagcuguccuccaacuucggcgccaucagcucugugcugaacgauauccuggccagacuggacaaggucgaggccgaggugcagaucgacagacugaucacaggcagacugcagagccuccagacauacgugacccagcagcugaucagagccgccgagauuagagccucugccaaucuggccgccaccaagaugucugagugugugcugggccagagcaagagaguggacuuuugcggcaagggcuaccaccugaugagcuucccucagucugccccucacggcgugguguuucugcacgugacauaugugcccgcucaagagaagaauuucaccaccgcuccagccaucugccacgacggcaaagcccacuuuccuagagaaggcguguucguguccaacggcacccauugguucgugacacagcggaacuucuacgagccccagaucaucaccacccacaacaccuucgugucuggcaacugcgacgucgugaucggcauugugaacaauaccguguacgacccucugcagcccgagcuggacagcuucaaagaggaacuggacaaguacuuuaagaaccacacaagccccgacguggaccugggcgauaucagcggaaucaaugccagcgucgugaacauccagaaagagaucgaccggcugaacgagguggccaagaaucugaacgagagccugaucgaccugcaagaacuggggaaguacgagcaguacaucaaguggcccugguacaucuggcugggcuuuaucgccggacugauugccaucgugauggucacaaucaugcuguguugcaugaccagcugcuguagcugccugaagggcuguuguagcuguggcagcugcugcaaguucgacgaggacgauucugagcccgugcugaagggcgugaaacugcacuacacaugauaauaggcuggagccucgguggccuagcuucuugccccuugggccuccccccagccccuccuccccuuccugcacccguacccccguggucuuugaauaaagucugagugggcggcaaaaaaaaaaaaaaaaaaaaaaaaaaaaaaaaaaaaaaaaaaaaaaaaaaaaaaaaaaaaaaaaaaaaaaaaaaaaaaaaaaaaaaaaaaaaaaaaaaaaucuag

SEQ ID NO: 26592 - RNA, 4100 nt, Artificial Sequence
  SARS-CoV-2/Wuhan/WIV05/2019__EPI_ISL_402128 spike protein mRNA gc mod (1-1273)(K417N_E484K_N501Y_D614G)
gggaaauaagagagaaaagaagaguaagaagaaauauaagaccccggcgccgccaccauguucguguuccuggugcugcugccucugguguccagccagugugugaaccugaccaccagaacacagcugccuccagccuacaccaacagcuuuaccagaggcguguacuaccccgacaagguguucagauccagcgugcugcacucuacccaggaccuguuccugccuuucuucagcaacgugaccugguuccacgccauccacguguccggcaccaauggcaccaagagauucgacaaccccgugcugcccuucaacgacgggguguacuuugccagcaccgagaaguccaacaucaucagaggcuggaucuucggcaccacacuggacagcaagacccagagccugcugaucgugaacaacgccaccaacguggucaucaaagugugcgaguuccaguucugcaacgaccccuuccugggcgucuacuaccacaagaacaacaagagcuggauggaaagcgaguuccggguguacagcagcgccaacaacugcaccuucgaguacgugucccagccuuuccugauggaccuggaaggcaagcagggcaacuucaagaaccugcgcgaguucguguuuaagaacaucgacggcuacuucaagaucuacagcaagcacaccccuaucaaccucgugcgggaucugccucagggcuucucugcucuggaaccccugguggaucugcccaucggcaucaacaucacccgguuucagacacugcuggcccugcacagaagcuaccugacaccuggcgauagcagcagcggauggacagcuggugccgccgcuuacuaugugggcuaccugcagccuagaaccuuccugcugaaguacaacgagaacggcaccaucaccgacgccguggauugugcucuggauccucugagcgagacaaagugcacccugaaguccuucaccguggaaaagggcaucuaccagaccagcaacuuccgggugcagcccaccgaauccaucgugcgguuccccaauaucaccaaucugugccccuucggcgagguguucaaugccaccagauucgccucuguguacgccuggaaccggaagcggaucagcaauugcguggccgacuacuccgugcuguacaacuccgccagcuucagcaccuucaagugcuacggcguguccccuaccaagcugaacgaccugugcuucacaaacguguacgccgacagcuucgugauccggggagaugaagugcggcagauugccccuggacagacaggcaacaucgccgacuacaacuacaagcugcccgacgacuucaccggcugugugauugccuggaacagcaacaaccuggacuccaaagucggcggcaacuacaauuaccuguaccggcuguuccggaaguccaaucugaagcccuucgagcgggacaucuccaccgagaucuaucaggccggcagcaccccuuguaacggcgugaagggcuucaacugcuacuucccacugcaguccuacggcuuucagcccacauacggcgugggcuaucagcccuacagagugguggugcugagcuucgaacugcugcaugccccugccacagugugcggcccuaagaaaagcaccaaucucgugaagaacaaaugcgugaacuucaacuucaacggccugaccggcaccggcgugcugacagagagcaacaagaaguuccugccauuccagcaguuuggccgggauaucgccgauaccacagacgccguuagagauccccagacacuggaaauccuggacaucaccccuugcagcuucggcggagugucugugaucaccccuggcaccaacaccagcaaucagguggcagugcuguaccagggcgugaacuguaccgaagugcccguggccauucacgccgaucagcugacaccuacauggcggguguacuccaccggcagcaauguguuucagaccagagccggcugucugaucggagccgagcacgugaacaauagcuacgagugcgacauccccaucggcgcuggaaucugcgccagcuaccagacacagacaaacagcccucggagagccagaagcguggccagccagagcaucauugccuacacaaugucucugggcgccgagaacagcguggccuacuccaacaacucuaucgcuauccccaccaacuucaccaucagcgugaccacagagauccugccuguguccaugaccaagaccagcguggacugcaccauguacaucugcggcgauuccaccgagugcuccaaccugcugcugcaguacggcagcuucugcacccagcugaauagagcccugacagggaucgccguggaacaggacaagaacacccaagagguguucgcccaagugaagcagaucuacaagaccccuccuaucaaggacuucggcggcuucaauuucagccagauucugcccgauccuagcaagcccagcaagcggagcuucaucgaggaccugcuguucaacaaagugacacuggccgacgccggcuucaucaagcaguauggcgauugucugggcgacauugccgccagggaucugauuugcgcccagaaguuuaacggacugacagugcugccuccucugcugaccgaugagaugaucgcccaguacacaucugcccugcuggccggcacaaucacaagcggcuggacauuuggagcaggcgccgcucugcagauccccuuugcuaugcagauggccuaccgguucaacggcaucggagugacccagaaugugcuguacgagaaccagaagcugaucgccaaccaguucaacagcgccaucggcaagauccaggacagccugagcagcacagcaagcgcccugggaaagcugcaggacguggucaaccagaaugcccaggcacugaacacccuggucaagcagcuguccuccaacuucggcgccaucagcucugugcugaacgauauccugagcagacuggacaaggucgaggccgaggugcagaucgacagacugaucacaggcagacugcagagccuccagacauacgugacccagcagcugaucagagccgccgagauuagagccucugccaaucuggccgccaccaagaugucugagugugugcugggccagagcaagagaguggacuuuugcggcaagggcuaccaccugaugagcuucccucagucugccccucacggcgugguguuucugcacgugacauaugugcccgcucaagagaagaauuucaccaccgcuccagccaucugccacgacggcaaagcccacuuuccuagagaaggcguguucguguccaacggcacccauugguucgugacacagcggaacuucuacgagccccagaucaucaccaccgacaacaccuucgugucuggcaacugcgacgucgugaucggcauugugaacaauaccguguacgacccucugcagcccgagcuggacagcuucaaagaggaacuggacaaguacuuuaagaaccacacaagccccgacguggaccugggcgauaucagcggaaucaaugccagcgucgugaacauccagaaagagaucgaccggcugaacgagguggccaagaaucugaacgagagccugaucgaccugcaagaacuggggaaguacgagcaguacaucaaguggcccugguacaucuggcugggcuuuaucgccggacugauugccaucgugauggucacaaucaugcuguguugcaugaccagcugcuguagcugccugaagggcuguuguagcuguggcagcugcugcaaguucgacgaggacgauucugagcccgugcugaagggcgugaaacugcacuacacaugauaauaggcuggagccucgguggccuagcuucuugccccuugggccuccccccagccccuccuccccuuccugcacccguacccccguggucuuugaauaaagucugagugggcggcaaaaaaaaaaaaaaaaaaaaaaaaaaaaaaaaaaaaaaaaaaaaaaaaaaaaaaaaaaaaaaaaaaaaaaaaaaaaaaaaaaaaaaaaaaaaaaaaaaaaucuag

SEQ ID NO: 26593 - RNA, 4091 nt, Artificial Sequence
  SARS-CoV-2/Wuhan/WIV05/2019__EPI_ISL_402128 spike protein mRNA gc mod (1-1273)(L18F_D80A_D215G_L242del_A243del_L244del_R246I_K417N_E484 K_N501Y_D614G_A701V)
gggaaauaagagagaaaagaagaguaagaagaaauauaagaccccggcgccgccaccauguucguguuccuggugcugcugccucugguguccagccagugugugaacuucaccaccagaacacagcugccuccagccuacaccaacagcuuuaccagaggcguguacuaccccgacaagguguucagauccagcgugcugcacucuacccaggaccuguuccugccuuucuucagcaacgugaccugguuccacgccauccacguguccggcaccaauggcaccaagagauucgccaaccccgugcugcccuucaacgacgggguguacuuugccagcaccgagaaguccaacaucaucagaggcuggaucuucggcaccacacuggacagcaagacccagagccugcugaucgugaacaacgccaccaacguggucaucaaagugugcgaguuccaguucugcaacgaccccuuccugggcgucuacuaccacaagaacaacaagagcuggauggaaagcgaguuccggguguacagcagcgccaacaacugcaccuucgaguacgugucccagccuuuccugauggaccuggaaggcaagcagggcaacuucaagaaccugcgcgaguucguguuuaagaacaucgacggcuacuucaagaucuacagcaagcacaccccuaucaaccucgugcggggccugccucagggcuucucugcucuggaaccccugguggaucugcccaucggcaucaacaucacccgguuucagacacugcacaucagcuaccugacaccuggcgauagcagcagcggauggacagcuggugccgccgcuuacuaugugggcuaccugcagccuagaaccuuccugcugaaguacaacgagaacggcaccaucaccgacgccguggauugugcucuggauccucugagcgagacaaagugcacccugaaguccuucaccguggaaaagggcaucuaccagaccagcaacuuccgggugcagcccaccgaauccaucgugcgguuccccaauaucaccaaucugugccccuucggcgagguguucaaugccaccagauucgccucuguguacgccuggaaccggaagcggaucagcaauugcguggccgacuacuccgugcuguacaacuccgccagcuucagcaccuucaagugcuacggcguguccccuaccaagcugaacgaccugugcuucacaaacguguacgccgacagcuucgugauccggggagaugaagugcggcagauugccccuggacagacaggcaacaucgccgacuacaacuacaagcugcccgacgacuucaccggcugugugauugccuggaacagcaacaaccuggacuccaaagucggcggcaacuacaauuaccuguaccggcuguuccggaaguccaaucugaagcccuucgagcgggacaucuccaccgagaucuaucaggccggcagcaccccuuguaacggcgugaagggcuucaacugcuacuucccacugcaguccuacggcuuucagcccacauacggcgugggcuaucagcccuacagagugguggugcugagcuucgaacugcugcaugccccugccacagugugcggcccuaagaaaagcaccaaucucgugaagaacaaaugcgugaacuucaacuucaacggccugaccggcaccggcgugcugacagagagcaacaagaaguuccugccauuccagcaguuuggccgggauaucgccgauaccacagacgccguuagagauccccagacacuggaaauccuggacaucaccccuugcagcuucggcggagugucugugaucaccccuggcaccaacaccagcaaucagguggcagugcuguaccagggcgugaacuguaccgaagugcccguggccauucacgccgaucagcugacaccuacauggcggguguacuccaccggcagcaauguguuucagaccagagccggcugucugaucggagccgagcacgugaacaauagcuacgagugcgacauccccaucggcgcuggaaucugcgccagcuaccagacacagacaaacagcccucggagagccagaagcguggccagccagagcaucauugccuacacaaugucucugggcguggagaacagcguggccuacuccaacaacucuaucgcuauccccaccaacuucaccaucagcgugaccacagagauccugccuguguccaugaccaagaccagcguggacugcaccauguacaucugcggcgauuccaccgagugcuccaaccugcugcugcaguacggcagcuucugcacccagcugaauagagcccugacagggaucgccguggaacaggacaagaacacccaagagguguucgcccaagugaagcagaucuacaagaccccuccuaucaaggacuucggcggcuucaauuucagccagauucugcccgauccuagcaagcccagcaagcggagcuucaucgaggaccugcuguucaacaaagugacacuggccgacgccggcuucaucaagcaguauggcgauugucugggcgacauugccgccagggaucugauuugcgcccagaaguuuaacggacugacagugcugccuccucugcugaccgaugagaugaucgcccaguacacaucugcccugcuggccggcacaaucacaagcggcuggacauuuggagcaggcgccgcucugcagauccccuuugcuaugcagauggccuaccgguucaacggcaucggagugacccagaaugugcuguacgagaaccagaagcugaucgccaaccaguucaacagcgccaucggcaagauccaggacagccugagcagcacagcaagcgcccugggaaagcugcaggacguggucaaccagaaugcccaggcacugaacacccuggucaagcagcuguccuccaacuucggcgccaucagcucugugcugaacgauauccugagcagacuggacaaggucgaggccgaggugcagaucgacagacugaucacaggcagacugcagagccuccagacauacgugacccagcagcugaucagagccgccgagauuagagccucugccaaucuggccgccaccaagaugucugagugugugcugggccagagcaagagaguggacuuuugcggcaagggcuaccaccugaugagcuucccucagucugccccucacggcgugguguuucugcacgugacauaugugcccgcucaagagaagaauuucaccaccgcuccagccaucugccacgacggcaaagcccacuuuccuagagaaggcguguucguguccaacggcacccauugguucgugacacagcggaacuucuacgagccccagaucaucaccaccgacaacaccuucgugucuggcaacugcgacgucgugaucggcauugugaacaauaccguguacgacccucugcagcccgagcuggacagcuucaaagaggaacuggacaaguacuuuaagaaccacacaagccccgacguggaccugggcgauaucagcggaaucaaugccagcgucgugaacauccagaaagagaucgaccggcugaacgagguggccaagaaucugaacgagagccugaucgaccugcaagaacuggggaaguacgagcaguacaucaaguggcccugguacaucuggcugggcuuuaucgccggacugauugccaucgugauggucacaaucaugcuguguugcaugaccagcugcuguagcugccugaagggcuguuguagcuguggcagcugcugcaaguucgacgaggacgauucugagcccgugcugaagggcgugaaacugcacuacacaugauaauaggcuggagccucgguggccuagcuucuugccccuugggccuccccccagccccuccuccccuuccugcacccguacccccguggucuuugaauaaagucugagugggcggcaaaaaaaaaaaaaaaaaaaaaaaaaaaaaaaaaaaaaaaaaaaaaaaaaaaaaaaaaaaaaaaaaaaaaaaaaaaaaaaaaaaaaaaaaaaaaaaaaaaaucuag

SEQ ID NO: 26594 - RNA, 4100 nt, Artificial Sequence
  SARS-CoV-2/Wuhan/WIV05/2019__EPI_ISL_402128 spike protein mRNA gc mod (1-1273)(E484K_D614G)
gggaaauaagagagaaaagaagaguaagaagaaauauaagaccccggcgccgccaccauguucguguuccuggugcugcugccucugguguccagccagugugugaaccugaccaccagaacacagcugccuccagccuacaccaacagcuuuaccagaggcguguacuaccccgacaagguguucagauccagcgugcugcacucuacccaggaccuguuccugccuuucuucagcaacgugaccugguuccacgccauccacguguccggcaccaauggcaccaagagauucgacaaccccgugcugcccuucaacgacgggguguacuuugccagcaccgagaaguccaacaucaucagaggcuggaucuucggcaccacacuggacagcaagacccagagccugcugaucgugaacaacgccaccaacguggucaucaaagugugcgaguuccaguucugcaacgaccccuuccugggcgucuacuaccacaagaacaacaagagcuggauggaaagcgaguuccggguguacagcagcgccaacaacugcaccuucgaguacgugucccagccuuuccugauggaccuggaaggcaagcagggcaacuucaagaaccugcgcgaguucguguuuaagaacaucgacggcuacuucaagaucuacagcaagcacaccccuaucaaccucgugcgggaucugccucagggcuucucugcucuggaaccccugguggaucugcccaucggcaucaacaucacccgguuucagacacugcuggcccugcacagaagcuaccugacaccuggcgauagcagcagcggauggacagcuggugccgccgcuuacuaugugggcuaccugcagccuagaaccuuccugcugaaguacaacgagaacggcaccaucaccgacgccguggauugugcucuggauccucugagcgagacaaagugcacccugaaguccuucaccguggaaaagggcaucuaccagaccagcaacuuccgggugcagcccaccgaauccaucgugcgguuccccaauaucaccaaucugugccccuucggcgagguguucaaugccaccagauucgccucuguguacgccuggaaccggaagcggaucagcaauugcguggccgacuacuccgugcuguacaacuccgccagcuucagcaccuucaagugcuacggcguguccccuaccaagcugaacgaccugugcuucacaaacguguacgccgacagcuucgugauccggggagaugaagugcggcagauugccccuggacagacaggcaagaucgccgacuacaacuacaagcugcccgacgacuucaccggcugugugauugccuggaacagcaacaaccuggacuccaaagucggcggcaacuacaauuaccuguaccggcuguuccggaaguccaaucugaagcccuucgagcgggacaucuccaccgagaucuaucaggccggcagcaccccuuguaacggcgugaagggcuucaacugcuacuucccacugcaguccuacggcuuucagcccacaaauggcgugggcuaucagcccuacagagugguggugcugagcuucgaacugcugcaugccccugccacagugugcggcccuaagaaaagcaccaaucucgugaagaacaaaugcgugaacuucaacuucaacggccugaccggcaccggcgugcugacagagagcaacaagaaguuccugccauuccagcaguuuggccgggauaucgccgauaccacagacgccguuagagauccccagacacuggaaauccuggacaucaccccuugcagcuucggcggagugucugugaucaccccuggcaccaacaccagcaaucagguggcagugcuguaccagggcgugaacuguaccgaagugcccguggccauucacgccgaucagcugacaccuacauggcggguguacuccaccggcagcaauguguuucagaccagagccggcugucugaucggagccgagcacgugaacaauagcuacgagugcgacauccccaucggcgcuggaaucugcgccagcuaccagacacagacaaacagcccucggagagccagaagcguggccagccagagcaucauugccuacacaaugucucugggcgccgagaacagcguggccuacuccaacaacucuaucgcuauccccaccaacuucaccaucagcgugaccacagagauccugccuguguccaugaccaagaccagcguggacugcaccauguacaucugcggcgauuccaccgagugcuccaaccugcugcugcaguacggcagcuucugcacccagcugaauagagcccugacagggaucgccguggaacaggacaagaacacccaagagguguucgcccaagugaagcagaucuacaagaccccuccuaucaaggacuucggcggcuucaauuucagccagauucugcccgauccuagcaagcccagcaagcggagcuucaucgaggaccugcuguucaacaaagugacacuggccgacgccggcuucaucaagcaguauggcgauugucugggcgacauugccgccagggaucugauuugcgcccagaaguuuaacggacugacagugcugccuccucugcugaccgaugagaugaucgcccaguacacaucugcccugcuggccggcacaaucacaagcggcuggacauuuggagcaggcgccgcucugcagauccccuuugcuaugcagauggccuaccgguucaacggcaucggagugacccagaaugugcuguacgagaaccagaagcugaucgccaaccaguucaacagcgccaucggcaagauccaggacagccugagcagcacagcaagcgcccugggaaagcugcaggacguggucaaccagaaugcccaggcacugaacacccuggucaagcagcuguccuccaacuucggcgccaucagcucugugcugaacgauauccugagcagacuggacaaggucgaggccgaggugcagaucgacagacugaucacaggcagacugcagagccuccagacauacgugacccagcagcugaucagagccgccgagauuagagccucugccaaucuggccgccaccaagaugucugagugugugcugggccagagcaagagaguggacuuuugcggcaagggcuaccaccugaugagcuucccucagucugccccucacggcgugguguuucugcacgugacauaugugcccgcucaagagaagaauuucaccaccgcuccagccaucugccacgacggcaaagcccacuuuccuagagaaggcguguucguguccaacggcacccauugguucgugacacagcggaacuucuacgagccccagaucaucaccaccgacaacaccuucgugucuggcaacugcgacgucgugaucggcauugugaacaauaccguguacgacccucugcagcccgagcuggacagcuucaaagaggaacuggacaaguacuuuaagaaccacacaagccccgacguggaccugggcgauaucagcggaaucaaugccagcgucgugaacauccagaaagagaucgaccggcugaacgagguggccaagaaucugaacgagagccugaucgaccugcaagaacuggggaaguacgagcaguacaucaaguggcccugguacaucuggcugggcuuuaucgccggacugauugccaucgugauggucacaaucaugcuguguugcaugaccagcugcuguagcugccugaagggcuguuguagcuguggcagcugcugcaaguucgacgaggacgauucugagcccgugcugaagggcgugaaacugcacuacacaugauaauaggcuggagccucgguggccuagcuucuugccccuugggccuccccccagccccuccuccccuuccugcacccguacccccguggucuuugaauaaagucugagugggcggcaaaaaaaaaaaaaaaaaaaaaaaaaaaaaaaaaaaaaaaaaaaaaaaaaaaaaaaaaaaaaaaaaaaaaaaaaaaaaaaaaaaaaaaaaaaaaaaaaaaaucuag

SEQ ID NO: 26595 - RNA, 4100 nt, Artificial Sequence
  SARS-CoV-2/Wuhan/WIV05/2019__EPI_ISL_402128 spike protein mRNA gc mod (1-1273)(L18F_T20N_P26S_D138Y_R190S_K417T_E484K_N501Y_D614G_H655Y _T1027I)
gggaaauaagagagaaaagaagaguaagaagaaauauaagaccccggcgccgccaccauguucguguuccuggugcugcugccucugguguccagccagugugugaacuucaccaacagaacacagcugccuagcgccuacaccaacagcuuuaccagaggcguguacuaccccgacaagguguucagauccagcgugcugcacucuacccaggaccuguuccugccuuucuucagcaacgugaccugguuccacgccauccacguguccggcaccaauggcaccaagagauucgacaaccccgugcugcccuucaacgacgggguguacuuugccagcaccgagaaguccaacaucaucagaggcuggaucuucggcaccacacuggacagcaagacccagagccugcugaucgugaacaacgccaccaacguggucaucaaagugugcgaguuccaguucugcaacuaccccuuccugggcgucuacuaccacaagaacaacaagagcuggauggaaagcgaguuccggguguacagcagcgccaacaacugcaccuucgaguacgugucccagccuuuccugauggaccuggaaggcaagcagggcaacuucaagaaccugagcgaguucguguuuaagaacaucgacggcuacuucaagaucuacagcaagcacaccccuaucaaccucgugcgggaucugccucagggcuucucugcucuggaaccccugguggaucugcccaucggcaucaacaucacccgguuucagacacugcuggcccugcacagaagcuaccugacaccuggcgauagcagcagcggauggacagcuggugccgccgcuuacuaugugggcuaccugcagccuagaaccuuccugcugaaguacaacgagaacggcaccaucaccgacgccguggauugugcucuggauccucugagcgagacaaagugcacccugaaguccuucaccguggaaaagggcaucuaccagaccagcaacuuccgggugcagcccaccgaauccaucgugcgguuccccaauaucaccaaucugugccccuucggcgagguguucaaugccaccagauucgccucuguguacgccuggaaccggaagcggaucagcaauugcguggccgacuacuccgugcuguacaacuccgccagcuucagcaccuucaagugcuacggcguguccccuaccaagcugaacgaccugugcuucacaaacguguacgccgacagcuucgugauccggggagaugaagugcggcagauugccccuggacagacaggcaccaucgccgacuacaacuacaagcugcccgacgacuucaccggcugugugauugccuggaacagcaacaaccuggacuccaaagucggcggcaacuacaauuaccuguaccggcuguuccggaaguccaaucugaagcccuucgagcgggacaucuccaccgagaucuaucaggccggcagcaccccuuguaacggcgugaagggcuucaacugcuacuucccacugcaguccuacggcuuucagcccacauacggcgugggcuaucagcccuacagagugguggugcugagcuucgaacugcugcaugccccugccacagugugcggcccuaagaaaagcaccaaucucgugaagaacaaaugcgugaacuucaacuucaacggccugaccggcaccggcgugcugacagagagcaacaagaaguuccugccauuccagcaguuuggccgggauaucgccgauaccacagacgccguuagagauccccagacacuggaaauccuggacaucaccccuugcagcuucggcggagugucugugaucaccccuggcaccaacaccagcaaucagguggcagugcuguaccagggcgugaacuguaccgaagugcccguggccauucacgccgaucagcugacaccuacauggcggguguacuccaccggcagcaauguguuucagaccagagccggcugucugaucggagccgaguacgugaacaauagcuacgagugcgacauccccaucggcgcuggaaucugcgccagcuaccagacacagacaaacagcccucggagagccagaagcguggccagccagagcaucauugccuacacaaugucucugggcgccgagaacagcguggccuacuccaacaacucuaucgcuauccccaccaacuucaccaucagcgugaccacagagauccugccuguguccaugaccaagaccagcguggacugcaccauguacaucugcggcgauuccaccgagugcuccaaccugcugcugcaguacggcagcuucugcacccagcugaauagagcccugacagggaucgccguggaacaggacaagaacacccaagagguguucgcccaagugaagcagaucuacaagaccccuccuaucaaggacuucggcggcuucaauuucagccagauucugcccgauccuagcaagcccagcaagcggagcuucaucgaggaccugcuguucaacaaagugacacuggccgacgccggcuucaucaagcaguauggcgauugucugggcgacauugccgccagggaucugauuugcgcccagaaguuuaacggacugacagugcugccuccucugcugaccgaugagaugaucgcccaguacacaucugcccugcuggccggcacaaucacaagcggcuggacauuuggagcaggcgccgcucugcagauccccuuugcuaugcagauggccuaccgguucaacggcaucggagugacccagaaugugcuguacgagaaccagaagcugaucgccaaccaguucaacagcgccaucggcaagauccaggacagccugagcagcacagcaagcgcccugggaaagcugcaggacguggucaaccagaaugcccaggcacugaacacccuggucaagcagcuguccuccaacuucggcgccaucagcucugugcugaacgauauccugagcagacuggacaaggucgaggccgaggugcagaucgacagacugaucacaggcagacugcagagccuccagacauacgugacccagcagcugaucagagccgccgagauuagagccucugccaaucuggccgccaucaagaugucugagugugugcugggccagagcaagagaguggacuuuugcggcaagggcuaccaccugaugagcuucccucagucugccccucacggcgugguguuucugcacgugacauaugugcccgcucaagagaagaauuucaccaccgcuccagccaucugccacgacggcaaagcccacuuuccuagagaaggcguguucguguccaacggcacccauugguucgugacacagcggaacuucuacgagccccagaucaucaccaccgacaacaccuucgugucuggcaacugcgacgucgugaucggcauugugaacaauaccguguacgacccucugcagcccgagcuggacagcuucaaagaggaacuggacaaguacuuuaagaaccacacaagccccgacguggaccugggcgauaucagcggaaucaaugccagcgucgugaacauccagaaagagaucgaccggcugaacgagguggccaagaaucugaacgagagccugaucgaccugcaagaacuggggaaguacgagcaguacaucaaguggcccugguacaucuggcugggcuuuaucgccggacugauugccaucgugauggucacaaucaugcuguguugcaugaccagcugcuguagcugccugaagggcuguuguagcuguggcagcugcugcaaguucgacgaggacgauucugagcccgugcugaagggcgugaaacugcacuacacaugauaauaggcuggagccucgguggccuagcuucuugccccuugggccuccccccagccccuccuccccuuccugcacccguacccccguggucuuugaauaaagucugagugggcggcaaaaaaaaaaaaaaaaaaaaaaaaaaaaaaaaaaaaaaaaaaaaaaaaaaaaaaaaaaaaaaaaaaaaaaaaaaaaaaaaaaaaaaaaaaaaaaaaaaaaucuag

SEQ ID NO: 26596 - RNA, 4100 nt, Artificial Sequence
  SARS-CoV-2/Wuhan/WIV05/2019__EPI_ISL_402128 spike protein mRNA gc mod (1-1273)(S13I_W152C_L452R_D614G)
gggaaauaagagagaaaagaagaguaagaagaaauauaagaccccggcgccgccaccauguucguguuccuggugcugcugccucugguguccauccagugugugaaccugaccaccagaacacagcugccuccagccuacaccaacagcuuuaccagaggcguguacuaccccgacaagguguucagauccagcgugcugcacucuacccaggaccuguuccugccuuucuucagcaacgugaccugguuccacgccauccacguguccggcaccaauggcaccaagagauucgacaaccccgugcugcccuucaacgacgggguguacuuugccagcaccgagaaguccaacaucaucagaggcuggaucuucggcaccacacuggacagcaagacccagagccugcugaucgugaacaacgccaccaacguggucaucaaagugugcgaguuccaguucugcaacgaccccuuccugggcgucuacuaccacaagaacaacaagagcugcauggaaagcgaguuccggguguacagcagcgccaacaacugcaccuucgaguacgugucccagccuuuccugauggaccuggaaggcaagcagggcaacuucaagaaccugcgcgaguucguguuuaagaacaucgacggcuacuucaagaucuacagcaagcacaccccuaucaaccucgugcgggaucugccucagggcuucucugcucuggaaccccugguggaucugcccaucggcaucaacaucacccgguuucagacacugcuggcccugcacagaagcuaccugacaccuggcgauagcagcagcggauggacagcuggugccgccgcuuacuaugugggcuaccugcagccuagaaccuuccugcugaaguacaacgagaacggcaccaucaccgacgccguggauugugcucuggauccucugagcgagacaaagugcacccugaaguccuucaccguggaaaagggcaucuaccagaccagcaacuuccgggugcagcccaccgaauccaucgugcgguuccccaauaucaccaaucugugccccuucggcgagguguucaaugccaccagauucgccucuguguacgccuggaaccggaagcggaucagcaauugcguggccgacuacuccgugcuguacaacuccgccagcuucagcaccuucaagugcuacggcguguccccuaccaagcugaacgaccugugcuucacaaacguguacgccgacagcuucgugauccggggagaugaagugcggcagauugccccuggacagacaggcaagaucgccgacuacaacuacaagcugcccgacgacuucaccggcugugugauugccuggaacagcaacaaccuggacuccaaagucggcggcaacuacaauuaccgcuaccggcuguuccggaaguccaaucugaagcccuucgagcgggacaucuccaccgagaucuaucaggccggcagcaccccuuguaacggcguggaaggcuucaacugcuacuucccacugcaguccuacggcuuucagcccacaaauggcgugggcuaucagcccuacagagugguggugcugagcuucgaacugcugcaugccccugccacagugugcggcccuaagaaaagcaccaaucucgugaagaacaaaugcgugaacuucaacuucaacggccugaccggcaccggcgugcugacagagagcaacaagaaguuccugccauuccagcaguuuggccgggauaucgccgauaccacagacgccguuagagauccccagacacuggaaauccuggacaucaccccuugcagcuucggcggagugucugugaucaccccuggcaccaacaccagcaaucagguggcagugcuguaccagggcgugaacuguaccgaagugcccguggccauucacgccgaucagcugacaccuacauggcggguguacuccaccggcagcaauguguuucagaccagagccggcugucugaucggagccgagcacgugaacaauagcuacgagugcgacauccccaucggcgcuggaaucugcgccagcuaccagacacagacaaacagcccucggagagccagaagcguggccagccagagcaucauugccuacacaaugucucugggcgccgagaacagcguggccuacuccaacaacucuaucgcuauccccaccaacuucaccaucagcgugaccacagagauccugccuguguccaugaccaagaccagcguggacugcaccauguacaucugcggcgauuccaccgagugcuccaaccugcugcugcaguacggcagcuucugcacccagcugaauagagcccugacagggaucgccguggaacaggacaagaacacccaagagguguucgcccaagugaagcagaucuacaagaccccuccuaucaaggacuucggcggcuucaauuucagccagauucugcccgauccuagcaagcccagcaagcggagcuucaucgaggaccugcuguucaacaaagugacacuggccgacgccggcuucaucaagcaguauggcgauugucugggcgacauugccgccagggaucugauuugcgcccagaaguuuaacggacugacagugcugccuccucugcugaccgaugagaugaucgcccaguacacaucugcccugcuggccggcacaaucacaagcggcuggacauuuggagcaggcgccgcucugcagauccccuuugcuaugcagauggccuaccgguucaacggcaucggagugacccagaaugugcuguacgagaaccagaagcugaucgccaaccaguucaacagcgccaucggcaagauccaggacagccugagcagcacagcaagcgcccugggaaagcugcaggacguggucaaccagaaugcccaggcacugaacacccuggucaagcagcuguccuccaacuucggcgccaucagcucugugcugaacgauauccugagcagacuggacaaggucgaggccgaggugcagaucgacagacugaucacaggcagacugcagagccuccagacauacgugacccagcagcugaucagagccgccgagauuagagccucugccaaucuggccgccaccaagaugucugagugugugcugggccagagcaagagaguggacuuuugcggcaagggcuaccaccugaugagcuucccucagucugccccucacggcgugguguuucugcacgugacauaugugcccgcucaagagaagaauuucaccaccgcuccagccaucugccacgacggcaaagcccacuuuccuagagaaggcguguucguguccaacggcacccauugguucgugacacagcggaacuucuacgagccccagaucaucaccaccgacaacaccuucgugucuggcaacugcgacgucgugaucggcauugugaacaauaccguguacgacccucugcagcccgagcuggacagcuucaaagaggaacuggacaaguacuuuaagaaccacacaagccccgacguggaccugggcgauaucagcggaaucaaugccagcgucgugaacauccagaaagagaucgaccggcugaacgagguggccaagaaucugaacgagagccugaucgaccugcaagaacuggggaaguacgagcaguacaucaaguggcccugguacaucuggcugggcuuuaucgccggacugauugccaucgugauggucacaaucaugcuguguugcaugaccagcugcuguagcugccugaagggcuguuguagcuguggcagcugcugcaaguucgacgaggacgauucugagcccgugcugaagggcgugaaacugcacuacacaugauaauaggcuggagccucgguggccuagcuucuugccccuugggccuccccccagccccuccuccccuuccugcacccguacccccguggucuuugaauaaagucugagugggcggcaaaaaaaaaaaaaaaaaaaaaaaaaaaaaaaaaaaaaaaaaaaaaaaaaaaaaaaaaaaaaaaaaaaaaaaaaaaaaaaaaaaaaaaaaaaaaaaaaaaaucuag

SEQ ID NO: 26597 - RNA, 4100 nt, Artificial Sequence
  SARS-CoV-2/Wuhan/WIV05/2019__EPI_ISL_402128 spike protein mRNA gc (1-1273)(K986P_V987P)
gggaaauaagagagaaaagaagaguaagaagaaauauaagaccccggcgccgccaccauguucguguuccugguccuccugccccuggugagcucccagugcgugaaccucaccacccgcacgcagcugccgcccgccuacaccaacagcuucacccggggcgucuacuaccccgacaagguguuccgcuccagcgugcugcacuccacccaggaccucuuccugcccuucuucagcaacgucacgugguuccacgccauccacguguccgggaccaacggcaccaagcgguucgacaacccggugcugcccuucaacgacggggucuacuucgcgagcaccgagaaguccaacaucauccgcggcuggaucuucgggacgacccucgacagcaagacccagucccugcugaucgugaacaacgccaccaacguggucaucaaggugugcgaguuccaguucugcaacgaccccuuccucggcguguacuaccacaagaacaacaagagcuggauggaguccgaguuccgggucuacagcuccgccaacaacugcacguucgaguacgugagccagcccuuccugauggaccuggagggcaagcaggggaacuucaagaaccuccgcgaguucguguucaagaacaucgacggcuacuucaagaucuacuccaagcacaccccgaucaaccugguccgggaccugccccagggguucagcgcccucgagccccugguggaccugcccaucggcaucaacaucacccgcuuccagacccuccuggcccugcaccgguccuaccucacgccgggggacagcagcuccggcuggaccgcgggcgccgccgccuacuacgugggguaccugcagccccgcaccuuccugcucaaguacaacgagaacggcaccaucacggacgcggucgacugcgcccuggacccccugagcgagaccaagugcacccucaaguccuucaccguggagaaggggaucuaccagacgagcaacuuccgggugcagcccaccgaguccaucguccgcuucccgaacaucaccaaccugugccccuucggcgagguguucaacgccacccgguucgccagcgucuacgccuggaaccgcaagcggaucuccaacugcguggcggacuacagcgugcuguacaacuccgccagcuucuccacguucaagugcuacggcgucagccccaccaagcucaacgaccugugcuucaccaacguguacgccgacuccuucgugauccgcggggacgagguccggcagaucgcccccggccagaccgggaagaucgccgacuacaacuacaagcugccggacgacuucacgggcugcgugaucgcguggaacagcaacaaccucgacuccaaggucgggggcaacuacaacuaccuguaccgccuguuccgcaagagcaaccucaagcccuucgagcgggacaucuccaccgagaucuaccaggccggcagcacccccugcaacgggguggagggcuucaacugcuacuucccccugcaguccuacggguuccagccgaccaacggcgugggguaccagcccuaccggguggucgugcugagcuucgagcuccugcacgcccccgccacggugugcggccccaagaaguccaccaaccuggucaagaacaagugcgugaacuucaacuucaacggccucaccgggaccggcgugcugaccgagagcaacaagaaguuccugccguuccagcaguucgggcgcgacaucgccgacacgaccgacgcgguccgcgacccccagacccuggagauccucgacaucacccccugcagcuucggcgggguguccgugaucacgccgggcaccaacaccagcaaccaggucgccgugcuguaccaggacgugaacugcaccgagguccccguggccauccacgccgaccagcugacgcccaccuggcggguguacuccaccggcagcaacgucuuccagacccgcgccgggugccucaucggcgcggagcacgugaacaacuccuacgagugcgacauccccaucggggccggcaucugcgccagcuaccagacgcagaccaacuccccgcggcgcgcccggagcguggcgucccagagcaucaucgccuacaccaugucccugggcgccgagaacagcgucgccuacuccaacaacagcaucgccauccccaccaacuucacgaucuccgugaccaccgagauccugcccgugagcaugaccaagacgagcgucgacugcaccauguacaucugcggggacuccaccgagugcagcaaccuccugcugcaguacggcuccuucugcacccagcucaaccgcgcgcugacggggaucgccguggagcaggacaagaacacccaggagguguucgcccaggucaagcagaucuacaagacgcccccgaucaaggacuucggcggguucaacuucagccagauccugcccgaccccuccaagcccagcaagcgguccuucaucgaggaccuccuguucaacaaggugacccuggccgacgccggcuucaucaagcaguacggcgacugccucggggacaucgcggcccgcgaccugaucugcgcccagaaguucaacggccugaccgugcucccgccccugcugaccgacgagaugaucgcccaguacaccagcgcccuccuggcggggaccaucacguccggcuggaccuucggggccggcgccgcccugcagauccccuucgcgaugcagauggccuaccgguucaacggcaucggggucacccagaacgugcucuacgagaaccagaagcugaucgccaaccaguucaacagcgccaucggcaagauccaggacucccugagcuccaccgccagcgcgcucgggaagcugcaggacguggucaaccagaacgcccaggcccugaacacgcucgugaagcagcuguccagcaacuucggcgccaucuccagcgugcugaacgacauccucucccgccuggacccgcccgaggccgaggugcagaucgaccggcugaucaccgggcgccuccagagccugcagaccuacgugacccagcagcugauccgggcggccgagauccgcgccagcgccaaccucgccgcgaccaagauguccgagugcguccugggccagagcaagcggguggacuucugcggcaagggguaccaccugauguccuucccccagagcgccccgcacggcguggucuuccuccacgugacguacguccccgcccaggagaagaacuucaccaccgcccccgcgaucugccacgacgggaaggcccacuucccccgcgagggcguguucguguccaacgggacccacugguucgucacgcagcggaacuucuacgagccgcagaucaucaccaccgacaacaccuucgugagcggcaacugcgacguggucaucggcaucgugaacaacacgguguacgacccccugcagcccgagcuggacuccuucaaggaggagcucgacaaguacuucaagaaccacaccagccccgacgucgaccugggggacaucuccggcaucaacgccagcguggugaacauccagaaggagaucgaccgccugaacgaggucgccaagaaccucaacgagucccugaucgaccugcaggagcucgggaaguacgagcaguacaucaaguggccgugguacaucuggcugggcuucaucgccggccugaucgcgaucgugauggugaccaucaugcucugcugcaugaccagcugcugcuccugccugaaggggugcugcagcugcggcuccugcugcaaguucgacgaggacgacagcgagcccguccugaagggggugaagcuccacuacacgugauaauaggcuggagccucgguggccuagcuucuugccccuugggccuccccccagccccuccuccccuuccugcacccguacccccguggucuuugaauaaagucugagugggcggcaaaaaaaaaaaaaaaaaaaaaaaaaaaaaaaaaaaaaaaaaaaaaaaaaaaaaaaaaaaaaaaaaaaaaaaaaaaaaaaaaaaaaaaaaaaaaaaaaaaaucuag

SEQ ID NO: 26598 - RNA, 4100 nt, Artificial Sequence
  SARS-CoV-2/Wuhan/WIV05/2019__EPI_ISL_402128 spike protein mRNA gc (1-1273)(K986P_V987P_ D614G)
gggaaauaagagagaaaagaagaguaagaagaaauauaagaccccggcgccgccaccauguucguguuccugguccuccugccccuggugagcucccagugcgugaaccucaccacccgcacgcagcugccgcccgccuacaccaacagcuucacccggggcgucuacuaccccgacaagguguuccgcuccagcgugcugcacuccacccaggaccucuuccugcccuucuucagcaacgucacgugguuccacgccauccacguguccgggaccaacggcaccaagcgguucgacaacccggugcugcccuucaacgacggggucuacuucgcgagcaccgagaaguccaacaucauccgcggcuggaucuucgggacgacccucgacagcaagacccagucccugcugaucgugaacaacgccaccaacguggucaucaaggugugcgaguuccaguucugcaacgaccccuuccucggcguguacuaccacaagaacaacaagagcuggauggaguccgaguuccgggucuacagcuccgccaacaacugcacguucgaguacgugagccagcccuuccugauggaccuggagggcaagcaggggaacuucaagaaccuccgcgaguucguguucaagaacaucgacggcuacuucaagaucuacuccaagcacaccccgaucaaccugguccgggaccugccccagggguucagcgcccucgagccccugguggaccugcccaucggcaucaacaucacccgcuuccagacccuccuggcccugcaccgguccuaccucacgccgggggacagcagcuccggcuggaccgcgggcgccgccgccuacuacgugggguaccugcagccccgcaccuuccugcucaaguacaacgagaacggcaccaucacggacgcggucgacugcgcccuggacccccugagcgagaccaagugcacccucaaguccuucaccguggagaaggggaucuaccagacgagcaacuuccgggugcagcccaccgaguccaucguccgcuucccgaacaucaccaaccugugccccuucggcgagguguucaacgccacccgguucgccagcgucuacgccuggaaccgcaagcggaucuccaacugcguggcggacuacagcgugcuguacaacuccgccagcuucuccacguucaagugcuacggcgucagccccaccaagcucaacgaccugugcuucaccaacguguacgccgacuccuucgugauccgcggggacgagguccggcagaucgcccccggccagaccgggaagaucgccgacuacaacuacaagcugccggacgacuucacgggcugcgugaucgcguggaacagcaacaaccucgacuccaaggucgggggcaacuacaacuaccuguaccgccuguuccgcaagagcaaccucaagcccuucgagcgggacaucuccaccgagaucuaccaggccggcagcacccccugcaacgggguggagggcuucaacugcuacuucccccugcaguccuacggguuccagccgaccaacggcgugggguaccagcccuaccggguggucgugcugagcuucgagcuccugcacgcccccgccacggugugcggccccaagaaguccaccaaccuggucaagaacaagugcgugaacuucaacuucaacggccucaccgggaccggcgugcugaccgagagcaacaagaaguuccugccguuccagcaguucgggcgcgacaucgccgacacgaccgacgcgguccgcgacccccagacccuggagauccucgacaucacccccugcagcuucggcgggguguccgugaucacgccgggcaccaacaccagcaaccaggucgccgugcuguaccagggcgugaacugcaccgagguccccguggccauccacgccgaccagcugacgcccaccuggcggguguacuccaccggcagcaacgucuuccagacccgcgccgggugccucaucggcgcggagcacgugaacaacuccuacgagugcgacauccccaucggggccggcaucugcgccagcuaccagacgcagaccaacuccccgcggcgcgcccggagcguggcgucccagagcaucaucgccuacaccaugucccugggcgccgagaacagcgucgccuacuccaacaacagcaucgccauccccaccaacuucacgaucuccgugaccaccgagauccugcccgugagcaugaccaagacgagcgucgacugcaccauguacaucugcggggacuccaccgagugcagcaaccuccugcugcaguacggcuccuucugcacccagcucaaccgcgcgcugacggggaucgccguggagcaggacaagaacacccaggagguguucgcccaggucaagcagaucuacaagacgcccccgaucaaggacuucggcggguucaacuucagccagauccugcccgaccccuccaagcccagcaagcgguccuucaucgaggaccuccuguucaacaaggugacccuggccgacgccggcuucaucaagcaguacggcgacugccucggggacaucgcggcccgcgaccugaucugcgcccagaaguucaacggccugaccgugcucccgccccugcugaccgacgagaugaucgcccaguacaccagcgcccuccuggcggggaccaucacguccggcuggaccuucggggccggcgccgcccugcagauccccuucgcgaugcagauggccuaccgguucaacggcaucggggucacccagaacgugcucuacgagaaccagaagcugaucgccaaccaguucaacagcgccaucggcaagauccaggacucccugagcuccaccgccagcgcgcucgggaagcugcaggacguggucaaccagaacgcccaggcccugaacacgcucgugaagcagcuguccagcaacuucggcgccaucuccagcgugcugaacgacauccucucccgccuggacccgcccgaggccgaggugcagaucgaccggcugaucaccgggcgccuccagagccugcagaccuacgugacccagcagcugauccgggcggccgagauccgcgccagcgccaaccucgccgcgaccaagauguccgagugcguccugggccagagcaagcggguggacuucugcggcaagggguaccaccugauguccuucccccagagcgccccgcacggcguggucuuccuccacgugacguacguccccgcccaggagaagaacuucaccaccgcccccgcgaucugccacgacgggaaggcccacuucccccgcgagggcguguucguguccaacgggacccacugguucgucacgcagcggaacuucuacgagccgcagaucaucaccaccgacaacaccuucgugagcggcaacugcgacguggucaucggcaucgugaacaacacgguguacgacccccugcagcccgagcuggacuccuucaaggaggagcucgacaaguacuucaagaaccacaccagccccgacgucgaccugggggacaucuccggcaucaacgccagcguggugaacauccagaaggagaucgaccgccugaacgaggucgccaagaaccucaacgagucccugaucgaccugcaggagcucgggaaguacgagcaguacaucaaguggccgugguacaucuggcugggcuucaucgccggccugaucgcgaucgugauggugaccaucaugcucugcugcaugaccagcugcugcuccugccugaaggggugcugcagcugcggcuccugcugcaaguucgacgaggacgacagcgagcccguccugaagggggugaagcuccacuacacgugauaauaggcuggagccucgguggccuagcuucuugccccuugggccuccccccagccccuccuccccuuccugcacccguacccccguggucuuugaauaaagucugagugggcggcaaaaaaaaaaaaaaaaaaaaaaaaaaaaaaaaaaaaaaaaaaaaaaaaaaaaaaaaaaaaaaaaaaaaaaaaaaaaaaaaaaaaaaaaaaaaaaaaaaaaucuag

SEQ ID NO: 26599 - RNA, 4100 nt, Artificial Sequence
  SARS-CoV-2/Wuhan/WIV05/2019__EPI_ISL_402128 spike protein mRNA gc (1-1273)(K986P_V987P_A222V_D614G)
gggaaauaagagagaaaagaagaguaagaagaaauauaagaccccggcgccgccaccauguucguguuccugguccuccugccccuggugagcucccagugcgugaaccucaccacccgcacgcagcugccgcccgccuacaccaacagcuucacccggggcgucuacuaccccgacaagguguuccgcuccagcgugcugcacuccacccaggaccucuuccugcccuucuucagcaacgucacgugguuccacgccauccacguguccgggaccaacggcaccaagcgguucgacaacccggugcugcccuucaacgacggggucuacuucgcgagcaccgagaaguccaacaucauccgcggcuggaucuucgggacgacccucgacagcaagacccagucccugcugaucgugaacaacgccaccaacguggucaucaaggugugcgaguuccaguucugcaacgaccccuuccucggcguguacuaccacaagaacaacaagagcuggauggaguccgaguuccgggucuacagcuccgccaacaacugcacguucgaguacgugagccagcccuuccugauggaccuggagggcaagcaggggaacuucaagaaccuccgcgaguucguguucaagaacaucgacggcuacuucaagaucuacuccaagcacaccccgaucaaccugguccgggaccugccccagggguucagcguccucgagccccugguggaccugcccaucggcaucaacaucacccgcuuccagacccuccuggcccugcaccgguccuaccucacgccgggggacagcagcuccggcuggaccgcgggcgccgccgccuacuacgugggguaccugcagccccgcaccuuccugcucaaguacaacgagaacggcaccaucacggacgcggucgacugcgcccuggacccccugagcgagaccaagugcacccucaaguccuucaccguggagaaggggaucuaccagacgagcaacuuccgggugcagcccaccgaguccaucguccgcuucccgaacaucaccaaccugugccccuucggcgagguguucaacgccacccgguucgccagcgucuacgccuggaaccgcaagcggaucuccaacugcguggcggacuacagcgugcuguacaacuccgccagcuucuccacguucaagugcuacggcgucagccccaccaagcucaacgaccugugcuucaccaacguguacgccgacuccuucgugauccgcggggacgagguccggcagaucgcccccggccagaccgggaagaucgccgacuacaacuacaagcugccggacgacuucacgggcugcgugaucgcguggaacagcaacaaccucgacuccaaggucgggggcaacuacaacuaccuguaccgccuguuccgcaagagcaaccucaagcccuucgagcgggacaucuccaccgagaucuaccaggccggcagcacccccugcaacgggguggagggcuucaacugcuacuucccccugcaguccuacggguuccagccgaccaacggcgugggguaccagcccuaccggguggucgugcugagcuucgagcuccugcacgcccccgccacggugugcggccccaagaaguccaccaaccuggucaagaacaagugcgugaacuucaacuucaacggccucaccgggaccggcgugcugaccgagagcaacaagaaguuccugccguuccagcaguucgggcgcgacaucgccgacacgaccgacgcgguccgcgacccccagacccuggagauccucgacaucacccccugcagcuucggcgggguguccgugaucacgccgggcaccaacaccagcaaccaggucgccgugcuguaccagggcgugaacugcaccgagguccccguggccauccacgccgaccagcugacgcccaccuggcggguguacuccaccggcagcaacgucuuccagacccgcgccgggugccucaucggcgcggagcacgugaacaacuccuacgagugcgacauccccaucggggccggcaucugcgccagcuaccagacgcagaccaacuccccgcggcgcgcccggagcguggcgucccagagcaucaucgccuacaccaugucccugggcgccgagaacagcgucgccuacuccaacaacagcaucgccauccccaccaacuucacgaucuccgugaccaccgagauccugcccgugagcaugaccaagacgagcgucgacugcaccauguacaucugcggggacuccaccgagugcagcaaccuccugcugcaguacggcuccuucugcacccagcucaaccgcgcgcugacggggaucgccguggagcaggacaagaacacccaggagguguucgcccaggucaagcagaucuacaagacgcccccgaucaaggacuucggcggguucaacuucagccagauccugcccgaccccuccaagcccagcaagcgguccuucaucgaggaccuccuguucaacaaggugacccuggccgacgccggcuucaucaagcaguacggcgacugccucggggacaucgcggcccgcgaccugaucugcgcccagaaguucaacggccugaccgugcucccgccccugcugaccgacgagaugaucgcccaguacaccagcgcccuccuggcggggaccaucacguccggcuggaccuucggggccggcgccgcccugcagauccccuucgcgaugcagauggccuaccgguucaacggcaucggggucacccagaacgugcucuacgagaaccagaagcugaucgccaaccaguucaacagcgccaucggcaagauccaggacucccugagcuccaccgccagcgcgcucgggaagcugcaggacguggucaaccagaacgcccaggcccugaacacgcucgugaagcagcuguccagcaacuucggcgccaucuccagcgugcugaacgacauccucucccgccuggacccgcccgaggccgaggugcagaucgaccggcugaucaccgggcgccuccagagccugcagaccuacgugacccagcagcugauccgggcggccgagauccgcgccagcgccaaccucgccgcgaccaagauguccgagugcguccugggccagagcaagcggguggacuucugcggcaagggguaccaccugauguccuucccccagagcgccccgcacggcguggucuuccuccacgugacguacguccccgcccaggagaagaacuucaccaccgcccccgcgaucugccacgacgggaaggcccacuucccccgcgagggcguguucguguccaacgggacccacugguucgucacgcagcggaacuucuacgagccgcagaucaucaccaccgacaacaccuucgugagcggcaacugcgacguggucaucggcaucgugaacaacacgguguacgacccccugcagcccgagcuggacuccuucaaggaggagcucgacaaguacuucaagaaccacaccagccccgacgucgaccugggggacaucuccggcaucaacgccagcguggugaacauccagaaggagaucgaccgccugaacgaggucgccaagaaccucaacgagucccugaucgaccugcaggagcucgggaaguacgagcaguacaucaaguggccgugguacaucuggcugggcuucaucgccggccugaucgcgaucgugauggugaccaucaugcucugcugcaugaccagcugcugcuccugccugaaggggugcugcagcugcggcuccugcugcaaguucgacgaggacgacagcgagcccguccugaagggggugaagcuccacuacacgugauaauaggcuggagccucgguggccuagcuucuugccccuugggccuccccccagccccuccuccccuuccugcacccguacccccguggucuuugaauaaagucugagugggcggcaaaaaaaaaaaaaaaaaaaaaaaaaaaaaaaaaaaaaaaaaaaaaaaaaaaaaaaaaaaaaaaaaaaaaaaaaaaaaaaaaaaaaaaaaaaaaaaaaaaaucuag

SEQ ID NO: 26600 - RNA, 4100 nt, Artificial Sequence
  SARS-CoV-2/Wuhan/WIV05/2019__EPI_ISL_402128 spike protein mRNA gc (1-1273)(K986P_V987P_N439K_D614G)
gggaaauaagagagaaaagaagaguaagaagaaauauaagaccccggcgccgccaccauguucguguuccugguccuccugccccuggugagcucccagugcgugaaccucaccacccgcacgcagcugccgcccgccuacaccaacagcuucacccggggcgucuacuaccccgacaagguguuccgcuccagcgugcugcacuccacccaggaccucuuccugcccuucuucagcaacgucacgugguuccacgccauccacguguccgggaccaacggcaccaagcgguucgacaacccggugcugcccuucaacgacggggucuacuucgcgagcaccgagaaguccaacaucauccgcggcuggaucuucgggacgacccucgacagcaagacccagucccugcugaucgugaacaacgccaccaacguggucaucaaggugugcgaguuccaguucugcaacgaccccuuccucggcguguacuaccacaagaacaacaagagcuggauggaguccgaguuccgggucuacagcuccgccaacaacugcacguucgaguacgugagccagcccuuccugauggaccuggagggcaagcaggggaacuucaagaaccuccgcgaguucguguucaagaacaucgacggcuacuucaagaucuacuccaagcacaccccgaucaaccugguccgggaccugccccagggguucagcgcccucgagccccugguggaccugcccaucggcaucaacaucacccgcuuccagacccuccuggcccugcaccgguccuaccucacgccgggggacagcagcuccggcuggaccgcgggcgccgccgccuacuacgugggguaccugcagccccgcaccuuccugcucaaguacaacgagaacggcaccaucacggacgcggucgacugcgcccuggacccccugagcgagaccaagugcacccucaaguccuucaccguggagaaggggaucuaccagacgagcaacuuccgggugcagcccaccgaguccaucguccgcuucccgaacaucaccaaccugugccccuucggcgagguguucaacgccacccgguucgccagcgucuacgccuggaaccgcaagcggaucuccaacugcguggcggacuacagcgugcuguacaacuccgccagcuucuccacguucaagugcuacggcgucagccccaccaagcucaacgaccugugcuucaccaacguguacgccgacuccuucgugauccgcggggacgagguccggcagaucgcccccggccagaccgggaagaucgccgacuacaacuacaagcugccggacgacuucacgggcugcgugaucgcguggaacagcaagaaccucgacuccaaggucgggggcaacuacaacuaccuguaccgccuguuccgcaagagcaaccucaagcccuucgagcgggacaucuccaccgagaucuaccaggccggcagcacccccugcaacgggguggagggcuucaacugcuacuucccccugcaguccuacggguuccagccgaccaacggcgugggguaccagcccuaccggguggucgugcugagcuucgagcuccugcacgcccccgccacggugugcggccccaagaaguccaccaaccuggucaagaacaagugcgugaacuucaacuucaacggccucaccgggaccggcgugcugaccgagagcaacaagaaguuccugccguuccagcaguucgggcgcgacaucgccgacacgaccgacgcgguccgcgacccccagacccuggagauccucgacaucacccccugcagcuucggcgggguguccgugaucacgccgggcaccaacaccagcaaccaggucgccgugcuguaccagggcgugaacugcaccgagguccccguggccauccacgccgaccagcugacgcccaccuggcggguguacuccaccggcagcaacgucuuccagacccgcgccgggugccucaucggcgcggagcacgugaacaacuccuacgagugcgacauccccaucggggccggcaucugcgccagcuaccagacgcagaccaacuccccgcggcgcgcccggagcguggcgucccagagcaucaucgccuacaccaugucccugggcgccgagaacagcgucgccuacuccaacaacagcaucgccauccccaccaacuucacgaucuccgugaccaccgagauccugcccgugagcaugaccaagacgagcgucgacugcaccauguacaucugcggggacuccaccgagugcagcaaccuccugcugcaguacggcuccuucugcacccagcucaaccgcgcgcugacggggaucgccguggagcaggacaagaacacccaggagguguucgcccaggucaagcagaucuacaagacgcccccgaucaaggacuucggcggguucaacuucagccagauccugcccgaccccuccaagcccagcaagcgguccuucaucgaggaccuccuguucaacaaggugacccuggccgacgccggcuucaucaagcaguacggcgacugccucggggacaucgcggcccgcgaccugaucugcgcccagaaguucaacggccugaccgugcucccgccccugcugaccgacgagaugaucgcccaguacaccagcgcccuccuggcggggaccaucacguccggcuggaccuucggggccggcgccgcccugcagauccccuucgcgaugcagauggccuaccgguucaacggcaucggggucacccagaacgugcucuacgagaaccagaagcugaucgccaaccaguucaacagcgccaucggcaagauccaggacucccugagcuccaccgccagcgcgcucgggaagcugcaggacguggucaaccagaacgcccaggcccugaacacgcucgugaagcagcuguccagcaacuucggcgccaucuccagcgugcugaacgacauccucucccgccuggacccgcccgaggccgaggugcagaucgaccggcugaucaccgggcgccuccagagccugcagaccuacgugacccagcagcugauccgggcggccgagauccgcgccagcgccaaccucgccgcgaccaagauguccgagugcguccugggccagagcaagcggguggacuucugcggcaagggguaccaccugauguccuucccccagagcgccccgcacggcguggucuuccuccacgugacguacguccccgcccaggagaagaacuucaccaccgcccccgcgaucugccacgacgggaaggcccacuucccccgcgagggcguguucguguccaacgggacccacugguucgucacgcagcggaacuucuacgagccgcagaucaucaccaccgacaacaccuucgugagcggcaacugcgacguggucaucggcaucgugaacaacacgguguacgacccccugcagcccgagcuggacuccuucaaggaggagcucgacaaguacuucaagaaccacaccagccccgacgucgaccugggggacaucuccggcaucaacgccagcguggugaacauccagaaggagaucgaccgccugaacgaggucgccaagaaccucaacgagucccugaucgaccugcaggagcucgggaaguacgagcaguacaucaaguggccgugguacaucuggcugggcuucaucgccggccugaucgcgaucgugauggugaccaucaugcucugcugcaugaccagcugcugcuccugccugaaggggugcugcagcugcggcuccugcugcaaguucgacgaggacgacagcgagcccguccugaagggggugaagcuccacuacacgugauaauaggcuggagccucgguggccuagcuucuugccccuugggccuccccccagccccuccuccccuuccugcacccguacccccguggucuuugaauaaagucugagugggcggcaaaaaaaaaaaaaaaaaaaaaaaaaaaaaaaaaaaaaaaaaaaaaaaaaaaaaaaaaaaaaaaaaaaaaaaaaaaaaaaaaaaaaaaaaaaaaaaaaaaaucuag

SEQ ID NO: 26601 - RNA, 4100 nt, Artificial Sequence
  SARS-CoV-2/Wuhan/WIV05/2019__EPI_ISL_402128 spike protein mRNA gc (1-1273)(K986P_V987P_S477N_D614G)
gggaaauaagagagaaaagaagaguaagaagaaauauaagaccccggcgccgccaccauguucguguuccugguccuccugccccuggugagcucccagugcgugaaccucaccacccgcacgcagcugccgcccgccuacaccaacagcuucacccggggcgucuacuaccccgacaagguguuccgcuccagcgugcugcacuccacccaggaccucuuccugcccuucuucagcaacgucacgugguuccacgccauccacguguccgggaccaacggcaccaagcgguucgacaacccggugcugcccuucaacgacggggucuacuucgcgagcaccgagaaguccaacaucauccgcggcuggaucuucgggacgacccucgacagcaagacccagucccugcugaucgugaacaacgccaccaacguggucaucaaggugugcgaguuccaguucugcaacgaccccuuccucggcguguacuaccacaagaacaacaagagcuggauggaguccgaguuccgggucuacagcuccgccaacaacugcacguucgaguacgugagccagcccuuccugauggaccuggagggcaagcaggggaacuucaagaaccuccgcgaguucguguucaagaacaucgacggcuacuucaagaucuacuccaagcacaccccgaucaaccugguccgggaccugccccagggguucagcgcccucgagccccugguggaccugcccaucggcaucaacaucacccgcuuccagacccuccuggcccugcaccgguccuaccucacgccgggggacagcagcuccggcuggaccgcgggcgccgccgccuacuacgugggguaccugcagccccgcaccuuccugcucaaguacaacgagaacggcaccaucacggacgcggucgacugcgcccuggacccccugagcgagaccaagugcacccucaaguccuucaccguggagaaggggaucuaccagacgagcaacuuccgggugcagcccaccgaguccaucguccgcuucccgaacaucaccaaccugugccccuucggcgagguguucaacgccacccgguucgccagcgucuacgccuggaaccgcaagcggaucuccaacugcguggcggacuacagcgugcuguacaacuccgccagcuucuccacguucaagugcuacggcgucagccccaccaagcucaacgaccugugcuucaccaacguguacgccgacuccuucgugauccgcggggacgagguccggcagaucgcccccggccagaccgggaagaucgccgacuacaacuacaagcugccggacgacuucacgggcugcgugaucgcguggaacagcaacaaccucgacuccaaggucgggggcaacuacaacuaccuguaccgccuguuccgcaagagcaaccucaagcccuucgagcgggacaucuccaccgagaucuaccaggccggcaacacccccugcaacgggguggagggcuucaacugcuacuucccccugcaguccuacggguuccagccgaccaacggcgugggguaccagcccuaccggguggucgugcugagcuucgagcuccugcacgcccccgccacggugugcggccccaagaaguccaccaaccuggucaagaacaagugcgugaacuucaacuucaacggccucaccgggaccggcgugcugaccgagagcaacaagaaguuccugccguuccagcaguucgggcgcgacaucgccgacacgaccgacgcgguccgcgacccccagacccuggagauccucgacaucacccccugcagcuucggcgggguguccgugaucacgccgggcaccaacaccagcaaccaggucgccgugcuguaccagggcgugaacugcaccgagguccccguggccauccacgccgaccagcugacgcccaccuggcggguguacuccaccggcagcaacgucuuccagacccgcgccgggugccucaucggcgcggagcacgugaacaacuccuacgagugcgacauccccaucggggccggcaucugcgccagcuaccagacgcagaccaacuccccgcggcgcgcccggagcguggcgucccagagcaucaucgccuacaccaugucccugggcgccgagaacagcgucgccuacuccaacaacagcaucgccauccccaccaacuucacgaucuccgugaccaccgagauccugcccgugagcaugaccaagacgagcgucgacugcaccauguacaucugcggggacuccaccgagugcagcaaccuccugcugcaguacggcuccuucugcacccagcucaaccgcgcgcugacggggaucgccguggagcaggacaagaacacccaggagguguucgcccaggucaagcagaucuacaagacgcccccgaucaaggacuucggcggguucaacuucagccagauccugcccgaccccuccaagcccagcaagcgguccuucaucgaggaccuccuguucaacaaggugacccuggccgacgccggcuucaucaagcaguacggcgacugccucggggacaucgcggcccgcgaccugaucugcgcccagaaguucaacggccugaccgugcucccgccccugcugaccgacgagaugaucgcccaguacaccagcgcccuccuggcggggaccaucacguccggcuggaccuucggggccggcgccgcccugcagauccccuucgcgaugcagauggccuaccgguucaacggcaucggggucacccagaacgugcucuacgagaaccagaagcugaucgccaaccaguucaacagcgccaucggcaagauccaggacucccugagcuccaccgccagcgcgcucgggaagcugcaggacguggucaaccagaacgcccaggcccugaacacgcucgugaagcagcuguccagcaacuucggcgccaucuccagcgugcugaacgacauccucucccgccuggacccgcccgaggccgaggugcagaucgaccggcugaucaccgggcgccuccagagccugcagaccuacgugacccagcagcugauccgggcggccgagauccgcgccagcgccaaccucgccgcgaccaagauguccgagugcguccugggccagagcaagcggguggacuucugcggcaagggguaccaccugauguccuucccccagagcgccccgcacggcguggucuuccuccacgugacguacguccccgcccaggagaagaacuucaccaccgcccccgcgaucugccacgacgggaaggcccacuucccccgcgagggcguguucguguccaacgggacccacugguucgucacgcagcggaacuucuacgagccgcagaucaucaccaccgacaacaccuucgugagcggcaacugcgacguggucaucggcaucgugaacaacacgguguacgacccccugcagcccgagcuggacuccuucaaggaggagcucgacaaguacuucaagaaccacaccagccccgacgucgaccugggggacaucuccggcaucaacgccagcguggugaacauccagaaggagaucgaccgccugaacgaggucgccaagaaccucaacgagucccugaucgaccugcaggagcucgggaaguacgagcaguacaucaaguggccgugguacaucuggcugggcuucaucgccggccugaucgcgaucgugauggugaccaucaugcucugcugcaugaccagcugcugcuccugccugaaggggugcugcagcugcggcuccugcugcaaguucgacgaggacgacagcgagcccguccugaagggggugaagcuccacuacacgugauaauaggcuggagccucgguggccuagcuucuugccccuugggccuccccccagccccuccuccccuuccugcacccguacccccguggucuuugaauaaagucugagugggcggcaaaaaaaaaaaaaaaaaaaaaaaaaaaaaaaaaaaaaaaaaaaaaaaaaaaaaaaaaaaaaaaaaaaaaaaaaaaaaaaaaaaaaaaaaaaaaaaaaaaaucuag

SEQ ID NO: 26602 - RNA, 4100 nt, Artificial Sequence
  SARS-CoV-2/Wuhan/WIV05/2019__EPI_ISL_402128 spike protein mRNA gc (1-1273)(K986P_V987P_N501Y_D614G)
gggaaauaagagagaaaagaagaguaagaagaaauauaagaccccggcgccgccaccauguucguguuccugguccuccugccccuggugagcucccagugcgugaaccucaccacccgcacgcagcugccgcccgccuacaccaacagcuucacccggggcgucuacuaccccgacaagguguuccgcuccagcgugcugcacuccacccaggaccucuuccugcccuucuucagcaacgucacgugguuccacgccauccacguguccgggaccaacggcaccaagcgguucgacaacccggugcugcccuucaacgacggggucuacuucgcgagcaccgagaaguccaacaucauccgcggcuggaucuucgggacgacccucgacagcaagacccagucccugcugaucgugaacaacgccaccaacguggucaucaaggugugcgaguuccaguucugcaacgaccccuuccucggcguguacuaccacaagaacaacaagagcuggauggaguccgaguuccgggucuacagcuccgccaacaacugcacguucgaguacgugagccagcccuuccugauggaccuggagggcaagcaggggaacuucaagaaccuccgcgaguucguguucaagaacaucgacggcuacuucaagaucuacuccaagcacaccccgaucaaccugguccgggaccugccccagggguucagcgcccucgagccccugguggaccugcccaucggcaucaacaucacccgcuuccagacccuccuggcccugcaccgguccuaccucacgccgggggacagcagcuccggcuggaccgcgggcgccgccgccuacuacgugggguaccugcagccccgcaccuuccugcucaaguacaacgagaacggcaccaucacggacgcggucgacugcgcccuggacccccugagcgagaccaagugcacccucaaguccuucaccguggagaaggggaucuaccagacgagcaacuuccgggugcagcccaccgaguccaucguccgcuucccgaacaucaccaaccugugccccuucggcgagguguucaacgccacccgguucgccagcgucuacgccuggaaccgcaagcggaucuccaacugcguggcggacuacagcgugcuguacaacuccgccagcuucuccacguucaagugcuacggcgucagccccaccaagcucaacgaccugugcuucaccaacguguacgccgacuccuucgugauccgcggggacgagguccggcagaucgcccccggccagaccgggaagaucgccgacuacaacuacaagcugccggacgacuucacgggcugcgugaucgcguggaacagcaacaaccucgacuccaaggucgggggcaacuacaacuaccuguaccgccuguuccgcaagagcaaccucaagcccuucgagcgggacaucuccaccgagaucuaccaggccggcagcacccccugcaacgggguggagggcuucaacugcuacuucccccugcaguccuacggguuccagccgaccuacggcgugggguaccagcccuaccggguggucgugcugagcuucgagcuccugcacgcccccgccacggugugcggccccaagaaguccaccaaccuggucaagaacaagugcgugaacuucaacuucaacggccucaccgggaccggcgugcugaccgagagcaacaagaaguuccugccguuccagcaguucgggcgcgacaucgccgacacgaccgacgcgguccgcgacccccagacccuggagauccucgacaucacccccugcagcuucggcgggguguccgugaucacgccgggcaccaacaccagcaaccaggucgccgugcuguaccagggcgugaacugcaccgagguccccguggccauccacgccgaccagcugacgcccaccuggcggguguacuccaccggcagcaacgucuuccagacccgcgccgggugccucaucggcgcggagcacgugaacaacuccuacgagugcgacauccccaucggggccggcaucugcgccagcuaccagacgcagaccaacuccccgcggcgcgcccggagcguggcgucccagagcaucaucgccuacaccaugucccugggcgccgagaacagcgucgccuacuccaacaacagcaucgccauccccaccaacuucacgaucuccgugaccaccgagauccugcccgugagcaugaccaagacgagcgucgacugcaccauguacaucugcggggacuccaccgagugcagcaaccuccugcugcaguacggcuccuucugcacccagcucaaccgcgcgcugacggggaucgccguggagcaggacaagaacacccaggagguguucgcccaggucaagcagaucuacaagacgcccccgaucaaggacuucggcggguucaacuucagccagauccugcccgaccccuccaagcccagcaagcgguccuucaucgaggaccuccuguucaacaaggugacccuggccgacgccggcuucaucaagcaguacggcgacugccucggggacaucgcggcccgcgaccugaucugcgcccagaaguucaacggccugaccgugcucccgccccugcugaccgacgagaugaucgcccaguacaccagcgcccuccuggcggggaccaucacguccggcuggaccuucggggccggcgccgcccugcagauccccuucgcgaugcagauggccuaccgguucaacggcaucggggucacccagaacgugcucuacgagaaccagaagcugaucgccaaccaguucaacagcgccaucggcaagauccaggacucccugagcuccaccgccagcgcgcucgggaagcugcaggacguggucaaccagaacgcccaggcccugaacacgcucgugaagcagcuguccagcaacuucggcgccaucuccagcgugcugaacgacauccucucccgccuggacccgcccgaggccgaggugcagaucgaccggcugaucaccgggcgccuccagagccugcagaccuacgugacccagcagcugauccgggcggccgagauccgcgccagcgccaaccucgccgcgaccaagauguccgagugcguccugggccagagcaagcggguggacuucugcggcaagggguaccaccugauguccuucccccagagcgccccgcacggcguggucuuccuccacgugacguacguccccgcccaggagaagaacuucaccaccgcccccgcgaucugccacgacgggaaggcccacuucccccgcgagggcguguucguguccaacgggacccacugguucgucacgcagcggaacuucuacgagccgcagaucaucaccaccgacaacaccuucgugagcggcaacugcgacguggucaucggcaucgugaacaacacgguguacgacccccugcagcccgagcuggacuccuucaaggaggagcucgacaaguacuucaagaaccacaccagccccgacgucgaccugggggacaucuccggcaucaacgccagcguggugaacauccagaaggagaucgaccgccugaacgaggucgccaagaaccucaacgagucccugaucgaccugcaggagcucgggaaguacgagcaguacaucaaguggccgugguacaucuggcugggcuucaucgccggccugaucgcgaucgugauggugaccaucaugcucugcugcaugaccagcugcugcuccugccugaaggggugcugcagcugcggcuccugcugcaaguucgacgaggacgacagcgagcccguccugaagggggugaagcuccacuacacgugauaauaggcuggagccucgguggccuagcuucuugccccuugggccuccccccagccccuccuccccuuccugcacccguacccccguggucuuugaauaaagucugagugggcggcaaaaaaaaaaaaaaaaaaaaaaaaaaaaaaaaaaaaaaaaaaaaaaaaaaaaaaaaaaaaaaaaaaaaaaaaaaaaaaaaaaaaaaaaaaaaaaaaaaaaucuag

SEQ ID NO: 26603 - RNA, 4094 nt, Artificial Sequence
  SARS-CoV-2/Wuhan/WIV05/2019__EPI_ISL_402128 spike protein mRNA gc (1-1273)(K986P_V987P_H69del_V70del_D614G)
gggaaauaagagagaaaagaagaguaagaagaaauauaagaccccggcgccgccaccauguucguguuccugguccuccugccccuggugagcucccagugcgugaaccucaccacccgcacgcagcugccgcccgccuacaccaacagcuucacccggggcgucuacuaccccgacaagguguuccgcuccagcgugcugcacuccacccaggaccucuuccugcccuucuucagcaacgucacgugguuccacgccaucuccgggaccaacggcaccaagcgguucgacaacccggugcugcccuucaacgacggggucuacuucgcgagcaccgagaaguccaacaucauccgcggcuggaucuucgggacgacccucgacagcaagacccagucccugcugaucgugaacaacgccaccaacguggucaucaaggugugcgaguuccaguucugcaacgaccccuuccucggcguguacuaccacaagaacaacaagagcuggauggaguccgaguuccgggucuacagcuccgccaacaacugcacguucgaguacgugagccagcccuuccugauggaccuggagggcaagcaggggaacuucaagaaccuccgcgaguucguguucaagaacaucgacggcuacuucaagaucuacuccaagcacaccccgaucaaccugguccgggaccugccccagggguucagcgcccucgagccccugguggaccugcccaucggcaucaacaucacccgcuuccagacccuccuggcccugcaccgguccuaccucacgccgggggacagcagcuccggcuggaccgcgggcgccgccgccuacuacgugggguaccugcagccccgcaccuuccugcucaaguacaacgagaacggcaccaucacggacgcggucgacugcgcccuggacccccugagcgagaccaagugcacccucaaguccuucaccguggagaaggggaucuaccagacgagcaacuuccgggugcagcccaccgaguccaucguccgcuucccgaacaucaccaaccugugccccuucggcgagguguucaacgccacccgguucgccagcgucuacgccuggaaccgcaagcggaucuccaacugcguggcggacuacagcgugcuguacaacuccgccagcuucuccacguucaagugcuacggcgucagccccaccaagcucaacgaccugugcuucaccaacguguacgccgacuccuucgugauccgcggggacgagguccggcagaucgcccccggccagaccgggaagaucgccgacuacaacuacaagcugccggacgacuucacgggcugcgugaucgcguggaacagcaacaaccucgacuccaaggucgggggcaacuacaacuaccuguaccgccuguuccgcaagagcaaccucaagcccuucgagcgggacaucuccaccgagaucuaccaggccggcagcacccccugcaacgggguggagggcuucaacugcuacuucccccugcaguccuacggguuccagccgaccaacggcgugggguaccagcccuaccggguggucgugcugagcuucgagcuccugcacgcccccgccacggugugcggccccaagaaguccaccaaccuggucaagaacaagugcgugaacuucaacuucaacggccucaccgggaccggcgugcugaccgagagcaacaagaaguuccugccguuccagcaguucgggcgcgacaucgccgacacgaccgacgcgguccgcgacccccagacccuggagauccucgacaucacccccugcagcuucggcgggguguccgugaucacgccgggcaccaacaccagcaaccaggucgccgugcuguaccagggcgugaacugcaccgagguccccguggccauccacgccgaccagcugacgcccaccuggcggguguacuccaccggcagcaacgucuuccagacccgcgccgggugccucaucggcgcggagcacgugaacaacuccuacgagugcgacauccccaucggggccggcaucugcgccagcuaccagacgcagaccaacuccccgcggcgcgcccggagcguggcgucccagagcaucaucgccuacaccaugucccugggcgccgagaacagcgucgccuacuccaacaacagcaucgccauccccaccaacuucacgaucuccgugaccaccgagauccugcccgugagcaugaccaagacgagcgucgacugcaccauguacaucugcggggacuccaccgagugcagcaaccuccugcugcaguacggcuccuucugcacccagcucaaccgcgcgcugacggggaucgccguggagcaggacaagaacacccaggagguguucgcccaggucaagcagaucuacaagacgcccccgaucaaggacuucggcggguucaacuucagccagauccugcccgaccccuccaagcccagcaagcgguccuucaucgaggaccuccuguucaacaaggugacccuggccgacgccggcuucaucaagcaguacggcgacugccucggggacaucgcggcccgcgaccugaucugcgcccagaaguucaacggccugaccgugcucccgccccugcugaccgacgagaugaucgcccaguacaccagcgcccuccuggcggggaccaucacguccggcuggaccuucggggccggcgccgcccugcagauccccuucgcgaugcagauggccuaccgguucaacggcaucggggucacccagaacgugcucuacgagaaccagaagcugaucgccaaccaguucaacagcgccaucggcaagauccaggacucccugagcuccaccgccagcgcgcucgggaagcugcaggacguggucaaccagaacgcccaggcccugaacacgcucgugaagcagcuguccagcaacuucggcgccaucuccagcgugcugaacgacauccucucccgccuggacccgcccgaggccgaggugcagaucgaccggcugaucaccgggcgccuccagagccugcagaccuacgugacccagcagcugauccgggcggccgagauccgcgccagcgccaaccucgccgcgaccaagauguccgagugcguccugggccagagcaagcggguggacuucugcggcaagggguaccaccugauguccuucccccagagcgccccgcacggcguggucuuccuccacgugacguacguccccgcccaggagaagaacuucaccaccgcccccgcgaucugccacgacgggaaggcccacuucccccgcgagggcguguucguguccaacgggacccacugguucgucacgcagcggaacuucuacgagccgcagaucaucaccaccgacaacaccuucgugagcggcaacugcgacguggucaucggcaucgugaacaacacgguguacgacccccugcagcccgagcuggacuccuucaaggaggagcucgacaaguacuucaagaaccacaccagccccgacgucgaccugggggacaucuccggcaucaacgccagcguggugaacauccagaaggagaucgaccgccugaacgaggucgccaagaaccucaacgagucccugaucgaccugcaggagcucgggaaguacgagcaguacaucaaguggccgugguacaucuggcugggcuucaucgccggccugaucgcgaucgugauggugaccaucaugcucugcugcaugaccagcugcugcuccugccugaaggggugcugcagcugcggcuccugcugcaaguucgacgaggacgacagcgagcccguccugaagggggugaagcuccacuacacgugauaauaggcuggagccucgguggccuagcuucuugccccuugggccuccccccagccccuccuccccuuccugcacccguacccccguggucuuugaauaaagucugagugggcggcaaaaaaaaaaaaaaaaaaaaaaaaaaaaaaaaaaaaaaaaaaaaaaaaaaaaaaaaaaaaaaaaaaaaaaaaaaaaaaaaaaaaaaaaaaaaaaaaaaaaucuag

SEQ ID NO: 26604 - RNA, 4100 nt, Artificial Sequence
  SARS-CoV-2/Wuhan/WIV05/2019__EPI_ISL_402128 spike protein mRNA gc (1-1273)(K986P_V987P_Y453F_D614G)
gggaaauaagagagaaaagaagaguaagaagaaauauaagaccccggcgccgccaccauguucguguuccugguccuccugccccuggugagcucccagugcgugaaccucaccacccgcacgcagcugccgcccgccuacaccaacagcuucacccggggcgucuacuaccccgacaagguguuccgcuccagcgugcugcacuccacccaggaccucuuccugcccuucuucagcaacgucacgugguuccacgccauccacguguccgggaccaacggcaccaagcgguucgacaacccggugcugcccuucaacgacggggucuacuucgcgagcaccgagaaguccaacaucauccgcggcuggaucuucgggacgacccucgacagcaagacccagucccugcugaucgugaacaacgccaccaacguggucaucaaggugugcgaguuccaguucugcaacgaccccuuccucggcguguacuaccacaagaacaacaagagcuggauggaguccgaguuccgggucuacagcuccgccaacaacugcacguucgaguacgugagccagcccuuccugauggaccuggagggcaagcaggggaacuucaagaaccuccgcgaguucguguucaagaacaucgacggcuacuucaagaucuacuccaagcacaccccgaucaaccugguccgggaccugccccagggguucagcgcccucgagccccugguggaccugcccaucggcaucaacaucacccgcuuccagacccuccuggcccugcaccgguccuaccucacgccgggggacagcagcuccggcuggaccgcgggcgccgccgccuacuacgugggguaccugcagccccgcaccuuccugcucaaguacaacgagaacggcaccaucacggacgcggucgacugcgcccuggacccccugagcgagaccaagugcacccucaaguccuucaccguggagaaggggaucuaccagacgagcaacuuccgggugcagcccaccgaguccaucguccgcuucccgaacaucaccaaccugugccccuucggcgagguguucaacgccacccgguucgccagcgucuacgccuggaaccgcaagcggaucuccaacugcguggcggacuacagcgugcuguacaacuccgccagcuucuccacguucaagugcuacggcgucagccccaccaagcucaacgaccugugcuucaccaacguguacgccgacuccuucgugauccgcggggacgagguccggcagaucgcccccggccagaccgggaagaucgccgacuacaacuacaagcugccggacgacuucacgggcugcgugaucgcguggaacagcaacaaccucgacuccaaggucgggggcaacuacaacuaccuguuccgccuguuccgcaagagcaaccucaagcccuucgagcgggacaucuccaccgagaucuaccaggccggcagcacccccugcaacgggguggagggcuucaacugcuacuucccccugcaguccuacggguuccagccgaccaacggcgugggguaccagcccuaccggguggucgugcugagcuucgagcuccugcacgcccccgccacggugugcggccccaagaaguccaccaaccuggucaagaacaagugcgugaacuucaacuucaacggccucaccgggaccggcgugcugaccgagagcaacaagaaguuccugccguuccagcaguucgggcgcgacaucgccgacacgaccgacgcgguccgcgacccccagacccuggagauccucgacaucacccccugcagcuucggcgggguguccgugaucacgccgggcaccaacaccagcaaccaggucgccgugcuguaccagggcgugaacugcaccgagguccccguggccauccacgccgaccagcugacgcccaccuggcggguguacuccaccggcagcaacgucuuccagacccgcgccgggugccucaucggcgcggagcacgugaacaacuccuacgagugcgacauccccaucggggccggcaucugcgccagcuaccagacgcagaccaacuccccgcggcgcgcccggagcguggcgucccagagcaucaucgccuacaccaugucccugggcgccgagaacagcgucgccuacuccaacaacagcaucgccauccccaccaacuucacgaucuccgugaccaccgagauccugcccgugagcaugaccaagacgagcgucgacugcaccauguacaucugcggggacuccaccgagugcagcaaccuccugcugcaguacggcuccuucugcacccagcucaaccgcgcgcugacggggaucgccguggagcaggacaagaacacccaggagguguucgcccaggucaagcagaucuacaagacgcccccgaucaaggacuucggcggguucaacuucagccagauccugcccgaccccuccaagcccagcaagcgguccuucaucgaggaccuccuguucaacaaggugacccuggccgacgccggcuucaucaagcaguacggcgacugccucggggacaucgcggcccgcgaccugaucugcgcccagaaguucaacggccugaccgugcucccgccccugcugaccgacgagaugaucgcccaguacaccagcgcccuccuggcggggaccaucacguccggcuggaccuucggggccggcgccgcccugcagauccccuucgcgaugcagauggccuaccgguucaacggcaucggggucacccagaacgugcucuacgagaaccagaagcugaucgccaaccaguucaacagcgccaucggcaagauccaggacucccugagcuccaccgccagcgcgcucgggaagcugcaggacguggucaaccagaacgcccaggcccugaacacgcucgugaagcagcuguccagcaacuucggcgccaucuccagcgugcugaacgacauccucucccgccuggacccgcccgaggccgaggugcagaucgaccggcugaucaccgggcgccuccagagccugcagaccuacgugacccagcagcugauccgggcggccgagauccgcgccagcgccaaccucgccgcgaccaagauguccgagugcguccugggccagagcaagcggguggacuucugcggcaagggguaccaccugauguccuucccccagagcgccccgcacggcguggucuuccuccacgugacguacguccccgcccaggagaagaacuucaccaccgcccccgcgaucugccacgacgggaaggcccacuucccccgcgagggcguguucguguccaacgggacccacugguucgucacgcagcggaacuucuacgagccgcagaucaucaccaccgacaacaccuucgugagcggcaacugcgacguggucaucggcaucgugaacaacacgguguacgacccccugcagcccgagcuggacuccuucaaggaggagcucgacaaguacuucaagaaccacaccagccccgacgucgaccugggggacaucuccggcaucaacgccagcguggugaacauccagaaggagaucgaccgccugaacgaggucgccaagaaccucaacgagucccugaucgaccugcaggagcucgggaaguacgagcaguacaucaaguggccgugguacaucuggcugggcuucaucgccggccugaucgcgaucgugauggugaccaucaugcucugcugcaugaccagcugcugcuccugccugaaggggugcugcagcugcggcuccugcugcaaguucgacgaggacgacagcgagcccguccugaagggggugaagcuccacuacacgugauaauaggcuggagccucgguggccuagcuucuugccccuugggccuccccccagccccuccuccccuuccugcacccguacccccguggucuuugaauaaagucugagugggcggcaaaaaaaaaaaaaaaaaaaaaaaaaaaaaaaaaaaaaaaaaaaaaaaaaaaaaaaaaaaaaaaaaaaaaaaaaaaaaaaaaaaaaaaaaaaaaaaaaaaaucuag

SEQ ID NO: 26605 - RNA, 4100 nt, Artificial Sequence
  SARS-CoV-2/Wuhan/WIV05/2019__EPI_ISL_402128 spike protein mRNA gc (1-1273)(K986P_V987P_D614G_I692V)
gggaaauaagagagaaaagaagaguaagaagaaauauaagaccccggcgccgccaccauguucguguuccugguccuccugccccuggugagcucccagugcgugaaccucaccacccgcacgcagcugccgcccgccuacaccaacagcuucacccggggcgucuacuaccccgacaagguguuccgcuccagcgugcugcacuccacccaggaccucuuccugcccuucuucagcaacgucacgugguuccacgccauccacguguccgggaccaacggcaccaagcgguucgacaacccggugcugcccuucaacgacggggucuacuucgcgagcaccgagaaguccaacaucauccgcggcuggaucuucgggacgacccucgacagcaagacccagucccugcugaucgugaacaacgccaccaacguggucaucaaggugugcgaguuccaguucugcaacgaccccuuccucggcguguacuaccacaagaacaacaagagcuggauggaguccgaguuccgggucuacagcuccgccaacaacugcacguucgaguacgugagccagcccuuccugauggaccuggagggcaagcaggggaacuucaagaaccuccgcgaguucguguucaagaacaucgacggcuacuucaagaucuacuccaagcacaccccgaucaaccugguccgggaccugccccagggguucagcgcccucgagccccugguggaccugcccaucggcaucaacaucacccgcuuccagacccuccuggcccugcaccgguccuaccucacgccgggggacagcagcuccggcuggaccgcgggcgccgccgccuacuacgugggguaccugcagccccgcaccuuccugcucaaguacaacgagaacggcaccaucacggacgcggucgacugcgcccuggacccccugagcgagaccaagugcacccucaaguccuucaccguggagaaggggaucuaccagacgagcaacuuccgggugcagcccaccgaguccaucguccgcuucccgaacaucaccaaccugugccccuucggcgagguguucaacgccacccgguucgccagcgucuacgccuggaaccgcaagcggaucuccaacugcguggcggacuacagcgugcuguacaacuccgccagcuucuccacguucaagugcuacggcgucagccccaccaagcucaacgaccugugcuucaccaacguguacgccgacuccuucgugauccgcggggacgagguccggcagaucgcccccggccagaccgggaagaucgccgacuacaacuacaagcugccggacgacuucacgggcugcgugaucgcguggaacagcaacaaccucgacuccaaggucgggggcaacuacaacuaccuguaccgccuguuccgcaagagcaaccucaagcccuucgagcgggacaucuccaccgagaucuaccaggccggcagcacccccugcaacgggguggagggcuucaacugcuacuucccccugcaguccuacggguuccagccgaccaacggcgugggguaccagcccuaccggguggucgugcugagcuucgagcuccugcacgcccccgccacggugugcggccccaagaaguccaccaaccuggucaagaacaagugcgugaacuucaacuucaacggccucaccgggaccggcgugcugaccgagagcaacaagaaguuccugccguuccagcaguucgggcgcgacaucgccgacacgaccgacgcgguccgcgacccccagacccuggagauccucgacaucacccccugcagcuucggcgggguguccgugaucacgccgggcaccaacaccagcaaccaggucgccgugcuguaccagggcgugaacugcaccgagguccccguggccauccacgccgaccagcugacgcccaccuggcggguguacuccaccggcagcaacgucuuccagacccgcgccgggugccucaucggcgcggagcacgugaacaacuccuacgagugcgacauccccaucggggccggcaucugcgccagcuaccagacgcagaccaacuccccgcggcgcgcccggagcguggcgucccagagcgucaucgccuacaccaugucccugggcgccgagaacagcgucgccuacuccaacaacagcaucgccauccccaccaacuucacgaucuccgugaccaccgagauccugcccgugagcaugaccaagacgagcgucgacugcaccauguacaucugcggggacuccaccgagugcagcaaccuccugcugcaguacggcuccuucugcacccagcucaaccgcgcgcugacggggaucgccguggagcaggacaagaacacccaggagguguucgcccaggucaagcagaucuacaagacgcccccgaucaaggacuucggcggguucaacuucagccagauccugcccgaccccuccaagcccagcaagcgguccuucaucgaggaccuccuguucaacaaggugacccuggccgacgccggcuucaucaagcaguacggcgacugccucggggacaucgcggcccgcgaccugaucugcgcccagaaguucaacggccugaccgugcucccgccccugcugaccgacgagaugaucgcccaguacaccagcgcccuccuggcggggaccaucacguccggcuggaccuucggggccggcgccgcccugcagauccccuucgcgaugcagauggccuaccgguucaacggcaucggggucacccagaacgugcucuacgagaaccagaagcugaucgccaaccaguucaacagcgccaucggcaagauccaggacucccugagcuccaccgccagcgcgcucgggaagcugcaggacguggucaaccagaacgcccaggcccugaacacgcucgugaagcagcuguccagcaacuucggcgccaucuccagcgugcugaacgacauccucucccgccuggacccgcccgaggccgaggugcagaucgaccggcugaucaccgggcgccuccagagccugcagaccuacgugacccagcagcugauccgggcggccgagauccgcgccagcgccaaccucgccgcgaccaagauguccgagugcguccugggccagagcaagcggguggacuucugcggcaagggguaccaccugauguccuucccccagagcgccccgcacggcguggucuuccuccacgugacguacguccccgcccaggagaagaacuucaccaccgcccccgcgaucugccacgacgggaaggcccacuucccccgcgagggcguguucguguccaacgggacccacugguucgucacgcagcggaacuucuacgagccgcagaucaucaccaccgacaacaccuucgugagcggcaacugcgacguggucaucggcaucgugaacaacacgguguacgacccccugcagcccgagcuggacuccuucaaggaggagcucgacaaguacuucaagaaccacaccagccccgacgucgaccugggggacaucuccggcaucaacgccagcguggugaacauccagaaggagaucgaccgccugaacgaggucgccaagaaccucaacgagucccugaucgaccugcaggagcucgggaaguacgagcaguacaucaaguggccgugguacaucuggcugggcuucaucgccggccugaucgcgaucgugauggugaccaucaugcucugcugcaugaccagcugcugcuccugccugaaggggugcugcagcugcggcuccugcugcaaguucgacgaggacgacagcgagcccguccugaagggggugaagcuccacuacacgugauaauaggcuggagccucgguggccuagcuucuugccccuugggccuccccccagccccuccuccccuuccugcacccguacccccguggucuuugaauaaagucugagugggcggcaaaaaaaaaaaaaaaaaaaaaaaaaaaaaaaaaaaaaaaaaaaaaaaaaaaaaaaaaaaaaaaaaaaaaaaaaaaaaaaaaaaaaaaaaaaaaaaaaaaaucuag

SEQ ID NO: 26606 - RNA, 4100 nt, Artificial Sequence
  SARS-CoV-2/Wuhan/WIV05/2019__EPI_ISL_402128 spike protein mRNA gc (1-1273)(K986P_V987P_D614G_M1229I)
gggaaauaagagagaaaagaagaguaagaagaaauauaagaccccggcgccgccaccauguucguguuccugguccuccugccccuggugagcucccagugcgugaaccucaccacccgcacgcagcugccgcccgccuacaccaacagcuucacccggggcgucuacuaccccgacaagguguuccgcuccagcgugcugcacuccacccaggaccucuuccugcccuucuucagcaacgucacgugguuccacgccauccacguguccgggaccaacggcaccaagcgguucgacaacccggugcugcccuucaacgacggggucuacuucgcgagcaccgagaaguccaacaucauccgcggcuggaucuucgggacgacccucgacagcaagacccagucccugcugaucgugaacaacgccaccaacguggucaucaaggugugcgaguuccaguucugcaacgaccccuuccucggcguguacuaccacaagaacaacaagagcuggauggaguccgaguuccgggucuacagcuccgccaacaacugcacguucgaguacgugagccagcccuuccugauggaccuggagggcaagcaggggaacuucaagaaccuccgcgaguucguguucaagaacaucgacggcuacuucaagaucuacuccaagcacaccccgaucaaccugguccgggaccugccccagggguucagcgcccucgagccccugguggaccugcccaucggcaucaacaucacccgcuuccagacccuccuggcccugcaccgguccuaccucacgccgggggacagcagcuccggcuggaccgcgggcgccgccgccuacuacgugggguaccugcagccccgcaccuuccugcucaaguacaacgagaacggcaccaucacggacgcggucgacugcgcccuggacccccugagcgagaccaagugcacccucaaguccuucaccguggagaaggggaucuaccagacgagcaacuuccgggugcagcccaccgaguccaucguccgcuucccgaacaucaccaaccugugccccuucggcgagguguucaacgccacccgguucgccagcgucuacgccuggaaccgcaagcggaucuccaacugcguggcggacuacagcgugcuguacaacuccgccagcuucuccacguucaagugcuacggcgucagccccaccaagcucaacgaccugugcuucaccaacguguacgccgacuccuucgugauccgcggggacgagguccggcagaucgcccccggccagaccgggaagaucgccgacuacaacuacaagcugccggacgacuucacgggcugcgugaucgcguggaacagcaacaaccucgacuccaaggucgggggcaacuacaacuaccuguaccgccuguuccgcaagagcaaccucaagcccuucgagcgggacaucuccaccgagaucuaccaggccggcagcacccccugcaacgggguggagggcuucaacugcuacuucccccugcaguccuacggguuccagccgaccaacggcgugggguaccagcccuaccggguggucgugcugagcuucgagcuccugcacgcccccgccacggugugcggccccaagaaguccaccaaccuggucaagaacaagugcgugaacuucaacuucaacggccucaccgggaccggcgugcugaccgagagcaacaagaaguuccugccguuccagcaguucgggcgcgacaucgccgacacgaccgacgcgguccgcgacccccagacccuggagauccucgacaucacccccugcagcuucggcgggguguccgugaucacgccgggcaccaacaccagcaaccaggucgccgugcuguaccagggcgugaacugcaccgagguccccguggccauccacgccgaccagcugacgcccaccuggcggguguacuccaccggcagcaacgucuuccagacccgcgccgggugccucaucggcgcggagcacgugaacaacuccuacgagugcgacauccccaucggggccggcaucugcgccagcuaccagacgcagaccaacuccccgcggcgcgcccggagcguggcgucccagagcaucaucgccuacaccaugucccugggcgccgagaacagcgucgccuacuccaacaacagcaucgccauccccaccaacuucacgaucuccgugaccaccgagauccugcccgugagcaugaccaagacgagcgucgacugcaccauguacaucugcggggacuccaccgagugcagcaaccuccugcugcaguacggcuccuucugcacccagcucaaccgcgcgcugacggggaucgccguggagcaggacaagaacacccaggagguguucgcccaggucaagcagaucuacaagacgcccccgaucaaggacuucggcggguucaacuucagccagauccugcccgaccccuccaagcccagcaagcgguccuucaucgaggaccuccuguucaacaaggugacccuggccgacgccggcuucaucaagcaguacggcgacugccucggggacaucgcggcccgcgaccugaucugcgcccagaaguucaacggccugaccgugcucccgccccugcugaccgacgagaugaucgcccaguacaccagcgcccuccuggcggggaccaucacguccggcuggaccuucggggccggcgccgcccugcagauccccuucgcgaugcagauggccuaccgguucaacggcaucggggucacccagaacgugcucuacgagaaccagaagcugaucgccaaccaguucaacagcgccaucggcaagauccaggacucccugagcuccaccgccagcgcgcucgggaagcugcaggacguggucaaccagaacgcccaggcccugaacacgcucgugaagcagcuguccagcaacuucggcgccaucuccagcgugcugaacgacauccucucccgccuggacccgcccgaggccgaggugcagaucgaccggcugaucaccgggcgccuccagagccugcagaccuacgugacccagcagcugauccgggcggccgagauccgcgccagcgccaaccucgccgcgaccaagauguccgagugcguccugggccagagcaagcggguggacuucugcggcaagggguaccaccugauguccuucccccagagcgccccgcacggcguggucuuccuccacgugacguacguccccgcccaggagaagaacuucaccaccgcccccgcgaucugccacgacgggaaggcccacuucccccgcgagggcguguucguguccaacgggacccacugguucgucacgcagcggaacuucuacgagccgcagaucaucaccaccgacaacaccuucgugagcggcaacugcgacguggucaucggcaucgugaacaacacgguguacgacccccugcagcccgagcuggacuccuucaaggaggagcucgacaaguacuucaagaaccacaccagccccgacgucgaccugggggacaucuccggcaucaacgccagcguggugaacauccagaaggagaucgaccgccugaacgaggucgccaagaaccucaacgagucccugaucgaccugcaggagcucgggaaguacgagcaguacaucaaguggccgugguacaucuggcugggcuucaucgccggccugaucgcgaucgugaucgugaccaucaugcucugcugcaugaccagcugcugcuccugccugaaggggugcugcagcugcggcuccugcugcaaguucgacgaggacgacagcgagcccguccugaagggggugaagcuccacuacacgugauaauaggcuggagccucgguggccuagcuucuugccccuugggccuccccccagccccuccuccccuuccugcacccguacccccguggucuuugaauaaagucugagugggcggcaaaaaaaaaaaaaaaaaaaaaaaaaaaaaaaaaaaaaaaaaaaaaaaaaaaaaaaaaaaaaaaaaaaaaaaaaaaaaaaaaaaaaaaaaaaaaaaaaaaaucuag

SEQ ID NO: 26607 - RNA, 4094 nt, Artificial Sequence
  SARS-CoV-2/Wuhan/WIV05/2019__EPI_ISL_402128 spike protein mRNA gc (1-1273)(K986P_V987P_H69del_V70del_A222V_Y453F_S477N_D614G_I692V)
gggaaauaagagagaaaagaagaguaagaagaaauauaagaccccggcgccgccaccauguucguguuccugguccuccugccccuggugagcucccagugcgugaaccucaccacccgcacgcagcugccgcccgccuacaccaacagcuucacccggggcgucuacuaccccgacaagguguuccgcuccagcgugcugcacuccacccaggaccucuuccugcccuucuucagcaacgucacgugguuccacgccaucuccgggaccaacggcaccaagcgguucgacaacccggugcugcccuucaacgacggggucuacuucgcgagcaccgagaaguccaacaucauccgcggcuggaucuucgggacgacccucgacagcaagacccagucccugcugaucgugaacaacgccaccaacguggucaucaaggugugcgaguuccaguucugcaacgaccccuuccucggcguguacuaccacaagaacaacaagagcuggauggaguccgaguuccgggucuacagcuccgccaacaacugcacguucgaguacgugagccagcccuuccugauggaccuggagggcaagcaggggaacuucaagaaccuccgcgaguucguguucaagaacaucgacggcuacuucaagaucuacuccaagcacaccccgaucaaccugguccgggaccugccccagggguucagcguccucgagccccugguggaccugcccaucggcaucaacaucacccgcuuccagacccuccuggcccugcaccgguccuaccucacgccgggggacagcagcuccggcuggaccgcgggcgccgccgccuacuacgugggguaccugcagccccgcaccuuccugcucaaguacaacgagaacggcaccaucacggacgcggucgacugcgcccuggacccccugagcgagaccaagugcacccucaaguccuucaccguggagaaggggaucuaccagacgagcaacuuccgggugcagcccaccgaguccaucguccgcuucccgaacaucaccaaccugugccccuucggcgagguguucaacgccacccgguucgccagcgucuacgccuggaaccgcaagcggaucuccaacugcguggcggacuacagcgugcuguacaacuccgccagcuucuccacguucaagugcuacggcgucagccccaccaagcucaacgaccugugcuucaccaacguguacgccgacuccuucgugauccgcggggacgagguccggcagaucgcccccggccagaccgggaagaucgccgacuacaacuacaagcugccggacgacuucacgggcugcgugaucgcguggaacagcaacaaccucgacuccaaggucgggggcaacuacaacuaccuguuccgccuguuccgcaagagcaaccucaagcccuucgagcgggacaucuccaccgagaucuaccaggccggcaacacccccugcaacgggguggagggcuucaacugcuacuucccccugcaguccuacggguuccagccgaccaacggcgugggguaccagcccuaccggguggucgugcugagcuucgagcuccugcacgcccccgccacggugugcggccccaagaaguccaccaaccuggucaagaacaagugcgugaacuucaacuucaacggccucaccgggaccggcgugcugaccgagagcaacaagaaguuccugccguuccagcaguucgggcgcgacaucgccgacacgaccgacgcgguccgcgacccccagacccuggagauccucgacaucacccccugcagcuucggcgggguguccgugaucacgccgggcaccaacaccagcaaccaggucgccgugcuguaccagggcgugaacugcaccgagguccccguggccauccacgccgaccagcugacgcccaccuggcggguguacuccaccggcagcaacgucuuccagacccgcgccgggugccucaucggcgcggagcacgugaacaacuccuacgagugcgacauccccaucggggccggcaucugcgccagcuaccagacgcagaccaacuccccgcggcgcgcccggagcguggcgucccagagcgucaucgccuacaccaugucccugggcgccgagaacagcgucgccuacuccaacaacagcaucgccauccccaccaacuucacgaucuccgugaccaccgagauccugcccgugagcaugaccaagacgagcgucgacugcaccauguacaucugcggggacuccaccgagugcagcaaccuccugcugcaguacggcuccuucugcacccagcucaaccgcgcgcugacggggaucgccguggagcaggacaagaacacccaggagguguucgcccaggucaagcagaucuacaagacgcccccgaucaaggacuucggcggguucaacuucagccagauccugcccgaccccuccaagcccagcaagcgguccuucaucgaggaccuccuguucaacaaggugacccuggccgacgccggcuucaucaagcaguacggcgacugccucggggacaucgcggcccgcgaccugaucugcgcccagaaguucaacggccugaccgugcucccgccccugcugaccgacgagaugaucgcccaguacaccagcgcccuccuggcggggaccaucacguccggcuggaccuucggggccggcgccgcccugcagauccccuucgcgaugcagauggccuaccgguucaacggcaucggggucacccagaacgugcucuacgagaaccagaagcugaucgccaaccaguucaacagcgccaucggcaagauccaggacucccugagcuccaccgccagcgcgcucgggaagcugcaggacguggucaaccagaacgcccaggcccugaacacgcucgugaagcagcuguccagcaacuucggcgccaucuccagcgugcugaacgacauccucucccgccuggacccgcccgaggccgaggugcagaucgaccggcugaucaccgggcgccuccagagccugcagaccuacgugacccagcagcugauccgggcggccgagauccgcgccagcgccaaccucgccgcgaccaagauguccgagugcguccugggccagagcaagcggguggacuucugcggcaagggguaccaccugauguccuucccccagagcgccccgcacggcguggucuuccuccacgugacguacguccccgcccaggagaagaacuucaccaccgcccccgcgaucugccacgacgggaaggcccacuucccccgcgagggcguguucguguccaacgggacccacugguucgucacgcagcggaacuucuacgagccgcagaucaucaccaccgacaacaccuucgugagcggcaacugcgacguggucaucggcaucgugaacaacacgguguacgacccccugcagcccgagcuggacuccuucaaggaggagcucgacaaguacuucaagaaccacaccagccccgacgucgaccugggggacaucuccggcaucaacgccagcguggugaacauccagaaggagaucgaccgccugaacgaggucgccaagaaccucaacgagucccugaucgaccugcaggagcucgggaaguacgagcaguacaucaaguggccgugguacaucuggcugggcuucaucgccggccugaucgcgaucgugauggugaccaucaugcucugcugcaugaccagcugcugcuccugccugaaggggugcugcagcugcggcuccugcugcaaguucgacgaggacgacagcgagcccguccugaagggggugaagcuccacuacacgugauaauaggcuggagccucgguggccuagcuucuugccccuugggccuccccccagccccuccuccccuuccugcacccguacccccguggucuuugaauaaagucugagugggcggcaaaaaaaaaaaaaaaaaaaaaaaaaaaaaaaaaaaaaaaaaaaaaaaaaaaaaaaaaaaaaaaaaaaaaaaaaaaaaaaaaaaaaaaaaaaaaaaaaaaaucuag

SEQ ID NO: 26608 - RNA, 4094 nt, Artificial Sequence
  SARS-CoV-2/Wuhan/WIV05/2019__EPI_ISL_402128 spike protein mRNA gc (1-1273)(K986P_V987P_H69del_V70del_Y453F_D614G_I692V_M1229I)
gggaaauaagagagaaaagaagaguaagaagaaauauaagaccccggcgccgccaccauguucguguuccugguccuccugccccuggugagcucccagugcgugaaccucaccacccgcacgcagcugccgcccgccuacaccaacagcuucacccggggcgucuacuaccccgacaagguguuccgcuccagcgugcugcacuccacccaggaccucuuccugcccuucuucagcaacgucacgugguuccacgccaucuccgggaccaacggcaccaagcgguucgacaacccggugcugcccuucaacgacggggucuacuucgcgagcaccgagaaguccaacaucauccgcggcuggaucuucgggacgacccucgacagcaagacccagucccugcugaucgugaacaacgccaccaacguggucaucaaggugugcgaguuccaguucugcaacgaccccuuccucggcguguacuaccacaagaacaacaagagcuggauggaguccgaguuccgggucuacagcuccgccaacaacugcacguucgaguacgugagccagcccuuccugauggaccuggagggcaagcaggggaacuucaagaaccuccgcgaguucguguucaagaacaucgacggcuacuucaagaucuacuccaagcacaccccgaucaaccugguccgggaccugccccagggguucagcgcccucgagccccugguggaccugcccaucggcaucaacaucacccgcuuccagacccuccuggcccugcaccgguccuaccucacgccgggggacagcagcuccggcuggaccgcgggcgccgccgccuacuacgugggguaccugcagccccgcaccuuccugcucaaguacaacgagaacggcaccaucacggacgcggucgacugcgcccuggacccccugagcgagaccaagugcacccucaaguccuucaccguggagaaggggaucuaccagacgagcaacuuccgggugcagcccaccgaguccaucguccgcuucccgaacaucaccaaccugugccccuucggcgagguguucaacgccacccgguucgccagcgucuacgccuggaaccgcaagcggaucuccaacugcguggcggacuacagcgugcuguacaacuccgccagcuucuccacguucaagugcuacggcgucagccccaccaagcucaacgaccugugcuucaccaacguguacgccgacuccuucgugauccgcggggacgagguccggcagaucgcccccggccagaccgggaagaucgccgacuacaacuacaagcugccggacgacuucacgggcugcgugaucgcguggaacagcaacaaccucgacuccaaggucgggggcaacuacaacuaccuguuccgccuguuccgcaagagcaaccucaagcccuucgagcgggacaucuccaccgagaucuaccaggccggcagcacccccugcaacgggguggagggcuucaacugcuacuucccccugcaguccuacggguuccagccgaccaacggcgugggguaccagcccuaccggguggucgugcugagcuucgagcuccugcacgcccccgccacggugugcggccccaagaaguccaccaaccuggucaagaacaagugcgugaacuucaacuucaacggccucaccgggaccggcgugcugaccgagagcaacaagaaguuccugccguuccagcaguucgggcgcgacaucgccgacacgaccgacgcgguccgcgacccccagacccuggagauccucgacaucacccccugcagcuucggcgggguguccgugaucacgccgggcaccaacaccagcaaccaggucgccgugcuguaccagggcgugaacugcaccgagguccccguggccauccacgccgaccagcugacgcccaccuggcggguguacuccaccggcagcaacgucuuccagacccgcgccgggugccucaucggcgcggagcacgugaacaacuccuacgagugcgacauccccaucggggccggcaucugcgccagcuaccagacgcagaccaacuccccgcggcgcgcccggagcguggcgucccagagcgugaucgccuacaccaugucccugggcgccgagaacagcgucgccuacuccaacaacagcaucgccauccccaccaacuucacgaucuccgugaccaccgagauccugcccgugagcaugaccaagacgagcgucgacugcaccauguacaucugcggggacuccaccgagugcagcaaccuccugcugcaguacggcuccuucugcacccagcucaaccgcgcgcugacggggaucgccguggagcaggacaagaacacccaggagguguucgcccaggucaagcagaucuacaagacgcccccgaucaaggacuucggcggguucaacuucagccagauccugcccgaccccuccaagcccagcaagcgguccuucaucgaggaccuccuguucaacaaggugacccuggccgacgccggcuucaucaagcaguacggcgacugccucggggacaucgcggcccgcgaccugaucugcgcccagaaguucaacggccugaccgugcucccgccccugcugaccgacgagaugaucgcccaguacaccagcgcccuccuggcggggaccaucacguccggcuggaccuucggggccggcgccgcccugcagauccccuucgcgaugcagauggccuaccgguucaacggcaucggggucacccagaacgugcucuacgagaaccagaagcugaucgccaaccaguucaacagcgccaucggcaagauccaggacucccugagcuccaccgccagcgcgcucgggaagcugcaggacguggucaaccagaacgcccaggcccugaacacgcucgugaagcagcuguccagcaacuucggcgccaucuccagcgugcugaacgacauccucucccgccuggacccgcccgaggccgaggugcagaucgaccggcugaucaccgggcgccuccagagccugcagaccuacgugacccagcagcugauccgggcggccgagauccgcgccagcgccaaccucgccgcgaccaagauguccgagugcguccugggccagagcaagcggguggacuucugcggcaagggguaccaccugauguccuucccccagagcgccccgcacggcguggucuuccuccacgugacguacguccccgcccaggagaagaacuucaccaccgcccccgcgaucugccacgacgggaaggcccacuucccccgcgagggcguguucguguccaacgggacccacugguucgucacgcagcggaacuucuacgagccgcagaucaucaccaccgacaacaccuucgugagcggcaacugcgacguggucaucggcaucgugaacaacacgguguacgacccccugcagcccgagcuggacuccuucaaggaggagcucgacaaguacuucaagaaccacaccagccccgacgucgaccugggggacaucuccggcaucaacgccagcguggugaacauccagaaggagaucgaccgccugaacgaggucgccaagaaccucaacgagucccugaucgaccugcaggagcucgggaaguacgagcaguacaucaaguggccgugguacaucuggcugggcuucaucgccggccugaucgcgaucgugaucgugaccaucaugcucugcugcaugaccagcugcugcuccugccugaaggggugcugcagcugcggcuccugcugcaaguucgacgaggacgacagcgagcccguccugaagggggugaagcuccacuacacgugauaauaggcuggagccucgguggccuagcuucuugccccuugggccuccccccagccccuccuccccuuccugcacccguacccccguggucuuugaauaaagucugagugggcggcaaaaaaaaaaaaaaaaaaaaaaaaaaaaaaaaaaaaaaaaaaaaaaaaaaaaaaaaaaaaaaaaaaaaaaaaaaaaaaaaaaaaaaaaaaaaaaaaaaaaucuag

SEQ ID NO: 26609 - RNA, 4091 nt, Artificial Sequence
  SARS-CoV-2/Wuhan/WIV05/2019__EPI_ISL_402128 spike protein mRNA gc (1-1273)(K986P_V987P_K986P_V987P_H69del_V70del_Y144del_N501Y_A570 D_D614G_P681H_T716I_S982A_D1118H)
gggaaauaagagagaaaagaagaguaagaagaaauauaagaccccggcgccgccaccauguucguguuccugguccuccugccccuggugagcucccagugcgugaaccucaccacccgcacgcagcugccgcccgccuacaccaacagcuucacccggggcgucuacuaccccgacaagguguuccgcuccagcgugcugcacuccacccaggaccucuuccugcccuucuucagcaacgucacgugguuccacgccaucuccgggaccaacggcaccaagcgguucgacaacccggugcugcccuucaacgacggggucuacuucgcgagcaccgagaaguccaacaucauccgcggcuggaucuucgggacgacccucgacagcaagacccagucccugcugaucgugaacaacgccaccaacguggucaucaaggugugcgaguuccaguucugcaacgaccccuuccucggcguguaccacaagaacaacaagagcuggauggaguccgaguuccgggucuacagcuccgccaacaacugcacguucgaguacgugagccagcccuuccugauggaccuggagggcaagcaggggaacuucaagaaccuccgcgaguucguguucaagaacaucgacggcuacuucaagaucuacuccaagcacaccccgaucaaccugguccgggaccugccccagggguucagcgcccucgagccccugguggaccugcccaucggcaucaacaucacccgcuuccagacccuccuggcccugcaccgguccuaccucacgccgggggacagcagcuccggcuggaccgcgggcgccgccgccuacuacgugggguaccugcagccccgcaccuuccugcucaaguacaacgagaacggcaccaucacggacgcggucgacugcgcccuggacccccugagcgagaccaagugcacccucaaguccuucaccguggagaaggggaucuaccagacgagcaacuuccgggugcagcccaccgaguccaucguccgcuucccgaacaucaccaaccugugccccuucggcgagguguucaacgccacccgguucgccagcgucuacgccuggaaccgcaagcggaucuccaacugcguggcggacuacagcgugcuguacaacuccgccagcuucuccacguucaagugcuacggcgucagccccaccaagcucaacgaccugugcuucaccaacguguacgccgacuccuucgugauccgcggggacgagguccggcagaucgcccccggccagaccgggaagaucgccgacuacaacuacaagcugccggacgacuucacgggcugcgugaucgcguggaacagcaacaaccucgacuccaaggucgggggcaacuacaacuaccuguaccgccuguuccgcaagagcaaccucaagcccuucgagcgggacaucuccaccgagaucuaccaggccggcagcacccccugcaacgggguggagggcuucaacugcuacuucccccugcaguccuacggguuccagccgaccuacggcgugggguaccagcccuaccggguggucgugcugagcuucgagcuccugcacgcccccgccacggugugcggccccaagaaguccaccaaccuggucaagaacaagugcgugaacuucaacuucaacggccucaccgggaccggcgugcugaccgagagcaacaagaaguuccugccguuccagcaguucgggcgcgacaucgacgacacgaccgacgcgguccgcgacccccagacccuggagauccucgacaucacccccugcagcuucggcgggguguccgugaucacgccgggcaccaacaccagcaaccaggucgccgugcuguaccagggcgugaacugcaccgagguccccguggccauccacgccgaccagcugacgcccaccuggcggguguacuccaccggcagcaacgucuuccagacccgcgccgggugccucaucggcgcggagcacgugaacaacuccuacgagugcgacauccccaucggggccggcaucugcgccagcuaccagacgcagaccaacucccaccggcgcgcccggagcguggcgucccagagcaucaucgccuacaccaugucccugggcgccgagaacagcgucgccuacuccaacaacagcaucgccauccccaucaacuucacgaucuccgugaccaccgagauccugcccgugagcaugaccaagacgagcgucgacugcaccauguacaucugcggggacuccaccgagugcagcaaccuccugcugcaguacggcuccuucugcacccagcucaaccgcgcgcugacggggaucgccguggagcaggacaagaacacccaggagguguucgcccaggucaagcagaucuacaagacgcccccgaucaaggacuucggcggguucaacuucagccagauccugcccgaccccuccaagcccagcaagcgguccuucaucgaggaccuccuguucaacaaggugacccuggccgacgccggcuucaucaagcaguacggcgacugccucggggacaucgcggcccgcgaccugaucugcgcccagaaguucaacggccugaccgugcucccgccccugcugaccgacgagaugaucgcccaguacaccagcgcccuccuggcggggaccaucacguccggcuggaccuucggggccggcgccgcccugcagauccccuucgcgaugcagauggccuaccgguucaacggcaucggggucacccagaacgugcucuacgagaaccagaagcugaucgccaaccaguucaacagcgccaucggcaagauccaggacucccugagcuccaccgccagcgcgcucgggaagcugcaggacguggucaaccagaacgcccaggcccugaacacgcucgugaagcagcuguccagcaacuucggcgccaucuccagcgugcugaacgacauccucgcccgccuggacccgcccgaggccgaggugcagaucgaccggcugaucaccgggcgccuccagagccugcagaccuacgugacccagcagcugauccgggcggccgagauccgcgccagcgccaaccucgccgcgaccaagauguccgagugcguccugggccagagcaagcggguggacuucugcggcaagggguaccaccugauguccuucccccagagcgccccgcacggcguggucuuccuccacgugacguacguccccgcccaggagaagaacuucaccaccgcccccgcgaucugccacgacgggaaggcccacuucccccgcgagggcguguucguguccaacgggacccacugguucgucacgcagcggaacuucuacgagccgcagaucaucaccacccacaacaccuucgugagcggcaacugcgacguggucaucggcaucgugaacaacacgguguacgacccccugcagcccgagcuggacuccuucaaggaggagcucgacaaguacuucaagaaccacaccagccccgacgucgaccugggggacaucuccggcaucaacgccagcguggugaacauccagaaggagaucgaccgccugaacgaggucgccaagaaccucaacgagucccugaucgaccugcaggagcucgggaaguacgagcaguacaucaaguggccgugguacaucuggcugggcuucaucgccggccugaucgcgaucgugauggugaccaucaugcucugcugcaugaccagcugcugcuccugccugaaggggugcugcagcugcggcuccugcugcaaguucgacgaggacgacagcgagcccguccugaagggggugaagcuccacuacacgugauaauaggcuggagccucgguggccuagcuucuugccccuugggccuccccccagccccuccuccccuuccugcacccguacccccguggucuuugaauaaagucugagugggcggcaaaaaaaaaaaaaaaaaaaaaaaaaaaaaaaaaaaaaaaaaaaaaaaaaaaaaaaaaaaaaaaaaaaaaaaaaaaaaaaaaaaaaaaaaaaaaaaaaaaaucuag

SEQ ID NO: 26610 - RNA, 4100 nt, Artificial Sequence
  SARS-CoV-2/Wuhan/WIV05/2019__EPI_ISL_402128 spike protein mRNA gc (1-1273)(K986P_V987P_K986P_V987P_K417N_E484K_N501Y_D614G)
gggaaauaagagagaaaagaagaguaagaagaaauauaagaccccggcgccgccaccauguucguguuccugguccuccugccccuggugagcucccagugcgugaaccucaccacccgcacgcagcugccgcccgccuacaccaacagcuucacccggggcgucuacuaccccgacaagguguuccgcuccagcgugcugcacuccacccaggaccucuuccugcccuucuucagcaacgucacgugguuccacgccauccacguguccgggaccaacggcaccaagcgguucgacaacccggugcugcccuucaacgacggggucuacuucgcgagcaccgagaaguccaacaucauccgcggcuggaucuucgggacgacccucgacagcaagacccagucccugcugaucgugaacaacgccaccaacguggucaucaaggugugcgaguuccaguucugcaacgaccccuuccucggcguguacuaccacaagaacaacaagagcuggauggaguccgaguuccgggucuacagcuccgccaacaacugcacguucgaguacgugagccagcccuuccugauggaccuggagggcaagcaggggaacuucaagaaccuccgcgaguucguguucaagaacaucgacggcuacuucaagaucuacuccaagcacaccccgaucaaccugguccgggaccugccccagggguucagcgcccucgagccccugguggaccugcccaucggcaucaacaucacccgcuuccagacccuccuggcccugcaccgguccuaccucacgccgggggacagcagcuccggcuggaccgcgggcgccgccgccuacuacgugggguaccugcagccccgcaccuuccugcucaaguacaacgagaacggcaccaucacggacgcggucgacugcgcccuggacccccugagcgagaccaagugcacccucaaguccuucaccguggagaaggggaucuaccagacgagcaacuuccgggugcagcccaccgaguccaucguccgcuucccgaacaucaccaaccugugccccuucggcgagguguucaacgccacccgguucgccagcgucuacgccuggaaccgcaagcggaucuccaacugcguggcggacuacagcgugcuguacaacuccgccagcuucuccacguucaagugcuacggcgucagccccaccaagcucaacgaccugugcuucaccaacguguacgccgacuccuucgugauccgcggggacgagguccggcagaucgcccccggccagaccgggaacaucgccgacuacaacuacaagcugccggacgacuucacgggcugcgugaucgcguggaacagcaacaaccucgacuccaaggucgggggcaacuacaacuaccuguaccgccuguuccgcaagagcaaccucaagcccuucgagcgggacaucuccaccgagaucuaccaggccggcagcacccccugcaacggggugaagggcuucaacugcuacuucccccugcaguccuacggguuccagccgaccuacggcgugggguaccagcccuaccggguggucgugcugagcuucgagcuccugcacgcccccgccacggugugcggccccaagaaguccaccaaccuggucaagaacaagugcgugaacuucaacuucaacggccucaccgggaccggcgugcugaccgagagcaacaagaaguuccugccguuccagcaguucgggcgcgacaucgccgacacgaccgacgcgguccgcgacccccagacccuggagauccucgacaucacccccugcagcuucggcgggguguccgugaucacgccgggcaccaacaccagcaaccaggucgccgugcuguaccagggcgugaacugcaccgagguccccguggccauccacgccgaccagcugacgcccaccuggcggguguacuccaccggcagcaacgucuuccagacccgcgccgggugccucaucggcgcggagcacgugaacaacuccuacgagugcgacauccccaucggggccggcaucugcgccagcuaccagacgcagaccaacuccccgcggcgcgcccggagcguggcgucccagagcaucaucgccuacaccaugucccugggcgccgagaacagcgucgccuacuccaacaacagcaucgccauccccaccaacuucacgaucuccgugaccaccgagauccugcccgugagcaugaccaagacgagcgucgacugcaccauguacaucugcggggacuccaccgagugcagcaaccuccugcugcaguacggcuccuucugcacccagcucaaccgcgcgcugacggggaucgccguggagcaggacaagaacacccaggagguguucgcccaggucaagcagaucuacaagacgcccccgaucaaggacuucggcggguucaacuucagccagauccugcccgaccccuccaagcccagcaagcgguccuucaucgaggaccuccuguucaacaaggugacccuggccgacgccggcuucaucaagcaguacggcgacugccucggggacaucgcggcccgcgaccugaucugcgcccagaaguucaacggccugaccgugcucccgccccugcugaccgacgagaugaucgcccaguacaccagcgcccuccuggcggggaccaucacguccggcuggaccuucggggccggcgccgcccugcagauccccuucgcgaugcagauggccuaccgguucaacggcaucggggucacccagaacgugcucuacgagaaccagaagcugaucgccaaccaguucaacagcgccaucggcaagauccaggacucccugagcuccaccgccagcgcgcucgggaagcugcaggacguggucaaccagaacgcccaggcccugaacacgcucgugaagcagcuguccagcaacuucggcgccaucuccagcgugcugaacgacauccucucccgccuggacccgcccgaggccgaggugcagaucgaccggcugaucaccgggcgccuccagagccugcagaccuacgugacccagcagcugauccgggcggccgagauccgcgccagcgccaaccucgccgcgaccaagauguccgagugcguccugggccagagcaagcggguggacuucugcggcaagggguaccaccugauguccuucccccagagcgccccgcacggcguggucuuccuccacgugacguacguccccgcccaggagaagaacuucaccaccgcccccgcgaucugccacgacgggaaggcccacuucccccgcgagggcguguucguguccaacgggacccacugguucgucacgcagcggaacuucuacgagccgcagaucaucaccaccgacaacaccuucgugagcggcaacugcgacguggucaucggcaucgugaacaacacgguguacgacccccugcagcccgagcuggacuccuucaaggaggagcucgacaaguacuucaagaaccacaccagccccgacgucgaccugggggacaucuccggcaucaacgccagcguggugaacauccagaaggagaucgaccgccugaacgaggucgccaagaaccucaacgagucccugaucgaccugcaggagcucgggaaguacgagcaguacaucaaguggccgugguacaucuggcugggcuucaucgccggccugaucgcgaucgugauggugaccaucaugcucugcugcaugaccagcugcugcuccugccugaaggggugcugcagcugcggcuccugcugcaaguucgacgaggacgacagcgagcccguccugaagggggugaagcuccacuacacgugauaauaggcuggagccucgguggccuagcuucuugccccuugggccuccccccagccccuccuccccuuccugcacccguacccccguggucuuugaauaaagucugagugggcggcaaaaaaaaaaaaaaaaaaaaaaaaaaaaaaaaaaaaaaaaaaaaaaaaaaaaaaaaaaaaaaaaaaaaaaaaaaaaaaaaaaaaaaaaaaaaaaaaaaaaucuag

SEQ ID NO: 26611 - RNA, 4091 nt, Artificial Sequence
  SARS-CoV-2/Wuhan/WIV05/2019__EPI_ISL_402128 spike protein mRNA gc (1-1273)(K986P_V987P_K986P_V987P_L18F_D80A_D215G_L242del_A243del_ L244del_R246I_K417N_E484K_N501Y_D614G_A701V)
gggaaauaagagagaaaagaagaguaagaagaaauauaagaccccggcgccgccaccauguucguguuccugguccuccugccccuggugagcucccagugcgugaacuucaccacccgcacgcagcugccgcccgccuacaccaacagcuucacccggggcgucuacuaccccgacaagguguuccgcuccagcgugcugcacuccacccaggaccucuuccugcccuucuucagcaacgucacgugguuccacgccauccacguguccgggaccaacggcaccaagcgguucgccaacccggugcugcccuucaacgacggggucuacuucgcgagcaccgagaaguccaacaucauccgcggcuggaucuucgggacgacccucgacagcaagacccagucccugcugaucgugaacaacgccaccaacguggucaucaaggugugcgaguuccaguucugcaacgaccccuuccucggcguguacuaccacaagaacaacaagagcuggauggaguccgaguuccgggucuacagcuccgccaacaacugcacguucgaguacgugagccagcccuuccugauggaccuggagggcaagcaggggaacuucaagaaccuccgcgaguucguguucaagaacaucgacggcuacuucaagaucuacuccaagcacaccccgaucaaccugguccggggccugccccagggguucagcgcccucgagccccugguggaccugcccaucggcaucaacaucacccgcuuccagacccuccacaucuccuaccucacgccgggggacagcagcuccggcuggaccgcgggcgccgccgccuacuacgugggguaccugcagccccgcaccuuccugcucaaguacaacgagaacggcaccaucacggacgcggucgacugcgcccuggacccccugagcgagaccaagugcacccucaaguccuucaccguggagaaggggaucuaccagacgagcaacuuccgggugcagcccaccgaguccaucguccgcuucccgaacaucaccaaccugugccccuucggcgagguguucaacgccacccgguucgccagcgucuacgccuggaaccgcaagcggaucuccaacugcguggcggacuacagcgugcuguacaacuccgccagcuucuccacguucaagugcuacggcgucagccccaccaagcucaacgaccugugcuucaccaacguguacgccgacuccuucgugauccgcggggacgagguccggcagaucgcccccggccagaccgggaacaucgccgacuacaacuacaagcugccggacgacuucacgggcugcgugaucgcguggaacagcaacaaccucgacuccaaggucgggggcaacuacaacuaccuguaccgccuguuccgcaagagcaaccucaagcccuucgagcgggacaucuccaccgagaucuaccaggccggcagcacccccugcaacggggugaagggcuucaacugcuacuucccccugcaguccuacggguuccagccgaccuacggcgugggguaccagcccuaccggguggucgugcugagcuucgagcuccugcacgcccccgccacggugugcggccccaagaaguccaccaaccuggucaagaacaagugcgugaacuucaacuucaacggccucaccgggaccggcgugcugaccgagagcaacaagaaguuccugccguuccagcaguucgggcgcgacaucgccgacacgaccgacgcgguccgcgacccccagacccuggagauccucgacaucacccccugcagcuucggcgggguguccgugaucacgccgggcaccaacaccagcaaccaggucgccgugcuguaccagggcgugaacugcaccgagguccccguggccauccacgccgaccagcugacgcccaccuggcggguguacuccaccggcagcaacgucuuccagacccgcgccgggugccucaucggcgcggagcacgugaacaacuccuacgagugcgacauccccaucggggccggcaucugcgccagcuaccagacgcagaccaacuccccgcggcgcgcccggagcguggcgucccagagcaucaucgccuacaccaugucccugggcguggagaacagcgucgccuacuccaacaacagcaucgccauccccaccaacuucacgaucuccgugaccaccgagauccugcccgugagcaugaccaagacgagcgucgacugcaccauguacaucugcggggacuccaccgagugcagcaaccuccugcugcaguacggcuccuucugcacccagcucaaccgcgcgcugacggggaucgccguggagcaggacaagaacacccaggagguguucgcccaggucaagcagaucuacaagacgcccccgaucaaggacuucggcggguucaacuucagccagauccugcccgaccccuccaagcccagcaagcgguccuucaucgaggaccuccuguucaacaaggugacccuggccgacgccggcuucaucaagcaguacggcgacugccucggggacaucgcggcccgcgaccugaucugcgcccagaaguucaacggccugaccgugcucccgccccugcugaccgacgagaugaucgcccaguacaccagcgcccuccuggcggggaccaucacguccggcuggaccuucggggccggcgccgcccugcagauccccuucgcgaugcagauggccuaccgguucaacggcaucggggucacccagaacgugcucuacgagaaccagaagcugaucgccaaccaguucaacagcgccaucggcaagauccaggacucccugagcuccaccgccagcgcgcucgggaagcugcaggacguggucaaccagaacgcccaggcccugaacacgcucgugaagcagcuguccagcaacuucggcgccaucuccagcgugcugaacgacauccucucccgccuggacccgcccgaggccgaggugcagaucgaccggcugaucaccgggcgccuccagagccugcagaccuacgugacccagcagcugauccgggcggccgagauccgcgccagcgccaaccucgccgcgaccaagauguccgagugcguccugggccagagcaagcggguggacuucugcggcaagggguaccaccugauguccuucccccagagcgccccgcacggcguggucuuccuccacgugacguacguccccgcccaggagaagaacuucaccaccgcccccgcgaucugccacgacgggaaggcccacuucccccgcgagggcguguucguguccaacgggacccacugguucgucacgcagcggaacuucuacgagccgcagaucaucaccaccgacaacaccuucgugagcggcaacugcgacguggucaucggcaucgugaacaacacgguguacgacccccugcagcccgagcuggacuccuucaaggaggagcucgacaaguacuucaagaaccacaccagccccgacgucgaccugggggacaucuccggcaucaacgccagcguggugaacauccagaaggagaucgaccgccugaacgaggucgccaagaaccucaacgagucccugaucgaccugcaggagcucgggaaguacgagcaguacaucaaguggccgugguacaucuggcugggcuucaucgccggccugaucgcgaucgugauggugaccaucaugcucugcugcaugaccagcugcugcuccugccugaaggggugcugcagcugcggcuccugcugcaaguucgacgaggacgacagcgagcccguccugaagggggugaagcuccacuacacgugauaauaggcuggagccucgguggccuagcuucuugccccuugggccuccccccagccccuccuccccuuccugcacccguacccccguggucuuugaauaaagucugagugggcggcaaaaaaaaaaaaaaaaaaaaaaaaaaaaaaaaaaaaaaaaaaaaaaaaaaaaaaaaaaaaaaaaaaaaaaaaaaaaaaaaaaaaaaaaaaaaaaaaaaaaucuag

SEQ ID NO: 26612 - RNA, 4100 nt, Artificial Sequence
  SARS-CoV-2/Wuhan/WIV05/2019__EPI_ISL_402128 spike protein mRNA gc (1-1273)(K986P_V987P_K986P_V987P_E484K_D614G)
gggaaauaagagagaaaagaagaguaagaagaaauauaagaccccggcgccgccaccauguucguguuccugguccuccugccccuggugagcucccagugcgugaaccucaccacccgcacgcagcugccgcccgccuacaccaacagcuucacccggggcgucuacuaccccgacaagguguuccgcuccagcgugcugcacuccacccaggaccucuuccugcccuucuucagcaacgucacgugguuccacgccauccacguguccgggaccaacggcaccaagcgguucgacaacccggugcugcccuucaacgacggggucuacuucgcgagcaccgagaaguccaacaucauccgcggcuggaucuucgggacgacccucgacagcaagacccagucccugcugaucgugaacaacgccaccaacguggucaucaaggugugcgaguuccaguucugcaacgaccccuuccucggcguguacuaccacaagaacaacaagagcuggauggaguccgaguuccgggucuacagcuccgccaacaacugcacguucgaguacgugagccagcccuuccugauggaccuggagggcaagcaggggaacuucaagaaccuccgcgaguucguguucaagaacaucgacggcuacuucaagaucuacuccaagcacaccccgaucaaccugguccgggaccugccccagggguucagcgcccucgagccccugguggaccugcccaucggcaucaacaucacccgcuuccagacccuccuggcccugcaccgguccuaccucacgccgggggacagcagcuccggcuggaccgcgggcgccgccgccuacuacgugggguaccugcagccccgcaccuuccugcucaaguacaacgagaacggcaccaucacggacgcggucgacugcgcccuggacccccugagcgagaccaagugcacccucaaguccuucaccguggagaaggggaucuaccagacgagcaacuuccgggugcagcccaccgaguccaucguccgcuucccgaacaucaccaaccugugccccuucggcgagguguucaacgccacccgguucgccagcgucuacgccuggaaccgcaagcggaucuccaacugcguggcggacuacagcgugcuguacaacuccgccagcuucuccacguucaagugcuacggcgucagccccaccaagcucaacgaccugugcuucaccaacguguacgccgacuccuucgugauccgcggggacgagguccggcagaucgcccccggccagaccgggaagaucgccgacuacaacuacaagcugccggacgacuucacgggcugcgugaucgcguggaacagcaacaaccucgacuccaaggucgggggcaacuacaacuaccuguaccgccuguuccgcaagagcaaccucaagcccuucgagcgggacaucuccaccgagaucuaccaggccggcagcacccccugcaacggggugaagggcuucaacugcuacuucccccugcaguccuacggguuccagccgaccaacggcgugggguaccagcccuaccggguggucgugcugagcuucgagcuccugcacgcccccgccacggugugcggccccaagaaguccaccaaccuggucaagaacaagugcgugaacuucaacuucaacggccucaccgggaccggcgugcugaccgagagcaacaagaaguuccugccguuccagcaguucgggcgcgacaucgccgacacgaccgacgcgguccgcgacccccagacccuggagauccucgacaucacccccugcagcuucggcgggguguccgugaucacgccgggcaccaacaccagcaaccaggucgccgugcuguaccagggcgugaacugcaccgagguccccguggccauccacgccgaccagcugacgcccaccuggcggguguacuccaccggcagcaacgucuuccagacccgcgccgggugccucaucggcgcggagcacgugaacaacuccuacgagugcgacauccccaucggggccggcaucugcgccagcuaccagacgcagaccaacuccccgcggcgcgcccggagcguggcgucccagagcaucaucgccuacaccaugucccugggcgccgagaacagcgucgccuacuccaacaacagcaucgccauccccaccaacuucacgaucuccgugaccaccgagauccugcccgugagcaugaccaagacgagcgucgacugcaccauguacaucugcggggacuccaccgagugcagcaaccuccugcugcaguacggcuccuucugcacccagcucaaccgcgcgcugacggggaucgccguggagcaggacaagaacacccaggagguguucgcccaggucaagcagaucuacaagacgcccccgaucaaggacuucggcggguucaacuucagccagauccugcccgaccccuccaagcccagcaagcgguccuucaucgaggaccuccuguucaacaaggugacccuggccgacgccggcuucaucaagcaguacggcgacugccucggggacaucgcggcccgcgaccugaucugcgcccagaaguucaacggccugaccgugcucccgccccugcugaccgacgagaugaucgcccaguacaccagcgcccuccuggcggggaccaucacguccggcuggaccuucggggccggcgccgcccugcagauccccuucgcgaugcagauggccuaccgguucaacggcaucggggucacccagaacgugcucuacgagaaccagaagcugaucgccaaccaguucaacagcgccaucggcaagauccaggacucccugagcuccaccgccagcgcgcucgggaagcugcaggacguggucaaccagaacgcccaggcccugaacacgcucgugaagcagcuguccagcaacuucggcgccaucuccagcgugcugaacgacauccucucccgccuggacccgcccgaggccgaggugcagaucgaccggcugaucaccgggcgccuccagagccugcagaccuacgugacccagcagcugauccgggcggccgagauccgcgccagcgccaaccucgccgcgaccaagauguccgagugcguccugggccagagcaagcggguggacuucugcggcaagggguaccaccugauguccuucccccagagcgccccgcacggcguggucuuccuccacgugacguacguccccgcccaggagaagaacuucaccaccgcccccgcgaucugccacgacgggaaggcccacuucccccgcgagggcguguucguguccaacgggacccacugguucgucacgcagcggaacuucuacgagccgcagaucaucaccaccgacaacaccuucgugagcggcaacugcgacguggucaucggcaucgugaacaacacgguguacgacccccugcagcccgagcuggacuccuucaaggaggagcucgacaaguacuucaagaaccacaccagccccgacgucgaccugggggacaucuccggcaucaacgccagcguggugaacauccagaaggagaucgaccgccugaacgaggucgccaagaaccucaacgagucccugaucgaccugcaggagcucgggaaguacgagcaguacaucaaguggccgugguacaucuggcugggcuucaucgccggccugaucgcgaucgugauggugaccaucaugcucugcugcaugaccagcugcugcuccugccugaaggggugcugcagcugcggcuccugcugcaaguucgacgaggacgacagcgagcccguccugaagggggugaagcuccacuacacgugauaauaggcuggagccucgguggccuagcuucuugccccuugggccuccccccagccccuccuccccuuccugcacccguacccccguggucuuugaauaaagucugagugggcggcaaaaaaaaaaaaaaaaaaaaaaaaaaaaaaaaaaaaaaaaaaaaaaaaaaaaaaaaaaaaaaaaaaaaaaaaaaaaaaaaaaaaaaaaaaaaaaaaaaaaucuag

SEQ ID NO: 26613 - RNA, 4100 nt, Artificial Sequence
  SARS-CoV-2/Wuhan/WIV05/2019__EPI_ISL_402128 spike protein mRNA gc (1-1273)(K986P_V987P_K986P_V987P_L18F_T20N_P26S_D138Y_R190S_K417T _E484K_N501Y_D614G_H655Y_T1027I)
gggaaauaagagagaaaagaagaguaagaagaaauauaagaccccggcgccgccaccauguucguguuccugguccuccugccccuggugagcucccagugcgugaacuucaccaaccgcacgcagcugccgagcgccuacaccaacagcuucacccggggcgucuacuaccccgacaagguguuccgcuccagcgugcugcacuccacccaggaccucuuccugcccuucuucagcaacgucacgugguuccacgccauccacguguccgggaccaacggcaccaagcgguucgacaacccggugcugcccuucaacgacggggucuacuucgcgagcaccgagaaguccaacaucauccgcggcuggaucuucgggacgacccucgacagcaagacccagucccugcugaucgugaacaacgccaccaacguggucaucaaggugugcgaguuccaguucugcaacuaccccuuccucggcguguacuaccacaagaacaacaagagcuggauggaguccgaguuccgggucuacagcuccgccaacaacugcacguucgaguacgugagccagcccuuccugauggaccuggagggcaagcaggggaacuucaagaaccucagcgaguucguguucaagaacaucgacggcuacuucaagaucuacuccaagcacaccccgaucaaccugguccgggaccugccccagggguucagcgcccucgagccccugguggaccugcccaucggcaucaacaucacccgcuuccagacccuccuggcccugcaccgguccuaccucacgccgggggacagcagcuccggcuggaccgcgggcgccgccgccuacuacgugggguaccugcagccccgcaccuuccugcucaaguacaacgagaacggcaccaucacggacgcggucgacugcgcccuggacccccugagcgagaccaagugcacccucaaguccuucaccguggagaaggggaucuaccagacgagcaacuuccgggugcagcccaccgaguccaucguccgcuucccgaacaucaccaaccugugccccuucggcgagguguucaacgccacccgguucgccagcgucuacgccuggaaccgcaagcggaucuccaacugcguggcggacuacagcgugcuguacaacuccgccagcuucuccacguucaagugcuacggcgucagccccaccaagcucaacgaccugugcuucaccaacguguacgccgacuccuucgugauccgcggggacgagguccggcagaucgcccccggccagaccgggaccaucgccgacuacaacuacaagcugccggacgacuucacgggcugcgugaucgcguggaacagcaacaaccucgacuccaaggucgggggcaacuacaacuaccuguaccgccuguuccgcaagagcaaccucaagcccuucgagcgggacaucuccaccgagaucuaccaggccggcagcacccccugcaacggggugaagggcuucaacugcuacuucccccugcaguccuacggguuccagccgaccuacggcgugggguaccagcccuaccggguggucgugcugagcuucgagcuccugcacgcccccgccacggugugcggccccaagaaguccaccaaccuggucaagaacaagugcgugaacuucaacuucaacggccucaccgggaccggcgugcugaccgagagcaacaagaaguuccugccguuccagcaguucgggcgcgacaucgccgacacgaccgacgcgguccgcgacccccagacccuggagauccucgacaucacccccugcagcuucggcgggguguccgugaucacgccgggcaccaacaccagcaaccaggucgccgugcuguaccagggcgugaacugcaccgagguccccguggccauccacgccgaccagcugacgcccaccuggcggguguacuccaccggcagcaacgucuuccagacccgcgccgggugccucaucggcgcggaguacgugaacaacuccuacgagugcgacauccccaucggggccggcaucugcgccagcuaccagacgcagaccaacuccccgcggcgcgcccggagcguggcgucccagagcaucaucgccuacaccaugucccugggcgccgagaacagcgucgccuacuccaacaacagcaucgccauccccaccaacuucacgaucuccgugaccaccgagauccugcccgugagcaugaccaagacgagcgucgacugcaccauguacaucugcggggacuccaccgagugcagcaaccuccugcugcaguacggcuccuucugcacccagcucaaccgcgcgcugacggggaucgccguggagcaggacaagaacacccaggagguguucgcccaggucaagcagaucuacaagacgcccccgaucaaggacuucggcggguucaacuucagccagauccugcccgaccccuccaagcccagcaagcgguccuucaucgaggaccuccuguucaacaaggugacccuggccgacgccggcuucaucaagcaguacggcgacugccucggggacaucgcggcccgcgaccugaucugcgcccagaaguucaacggccugaccgugcucccgccccugcugaccgacgagaugaucgcccaguacaccagcgcccuccuggcggggaccaucacguccggcuggaccuucggggccggcgccgcccugcagauccccuucgcgaugcagauggccuaccgguucaacggcaucggggucacccagaacgugcucuacgagaaccagaagcugaucgccaaccaguucaacagcgccaucggcaagauccaggacucccugagcuccaccgccagcgcgcucgggaagcugcaggacguggucaaccagaacgcccaggcccugaacacgcucgugaagcagcuguccagcaacuucggcgccaucuccagcgugcugaacgacauccucucccgccuggacccgcccgaggccgaggugcagaucgaccggcugaucaccgggcgccuccagagccugcagaccuacgugacccagcagcugauccgggcggccgagauccgcgccagcgccaaccucgccgcgaucaagauguccgagugcguccugggccagagcaagcggguggacuucugcggcaagggguaccaccugauguccuucccccagagcgccccgcacggcguggucuuccuccacgugacguacguccccgcccaggagaagaacuucaccaccgcccccgcgaucugccacgacgggaaggcccacuucccccgcgagggcguguucguguccaacgggacccacugguucgucacgcagcggaacuucuacgagccgcagaucaucaccaccgacaacaccuucgugagcggcaacugcgacguggucaucggcaucgugaacaacacgguguacgacccccugcagcccgagcuggacuccuucaaggaggagcucgacaaguacuucaagaaccacaccagccccgacgucgaccugggggacaucuccggcaucaacgccagcguggugaacauccagaaggagaucgaccgccugaacgaggucgccaagaaccucaacgagucccugaucgaccugcaggagcucgggaaguacgagcaguacaucaaguggccgugguacaucuggcugggcuucaucgccggccugaucgcgaucgugauggugaccaucaugcucugcugcaugaccagcugcugcuccugccugaaggggugcugcagcugcggcuccugcugcaaguucgacgaggacgacagcgagcccguccugaagggggugaagcuccacuacacgugauaauaggcuggagccucgguggccuagcuucuugccccuugggccuccccccagccccuccuccccuuccugcacccguacccccguggucuuugaauaaagucugagugggcggcaaaaaaaaaaaaaaaaaaaaaaaaaaaaaaaaaaaaaaaaaaaaaaaaaaaaaaaaaaaaaaaaaaaaaaaaaaaaaaaaaaaaaaaaaaaaaaaaaaaaucuag

SEQ ID NO: 26614 - RNA, 4100 nt, Artificial Sequence
  SARS-CoV-2/Wuhan/WIV05/2019__EPI_ISL_402128 spike protein mRNA gc (1-1273)(K986P_V987P_K986P_V987P_S13I_W152C_L452R_D614G)
gggaaauaagagagaaaagaagaguaagaagaaauauaagaccccggcgccgccaccauguucguguuccugguccuccugccccuggugagcauccagugcgugaaccucaccacccgcacgcagcugccgcccgccuacaccaacagcuucacccggggcgucuacuaccccgacaagguguuccgcuccagcgugcugcacuccacccaggaccucuuccugcccuucuucagcaacgucacgugguuccacgccauccacguguccgggaccaacggcaccaagcgguucgacaacccggugcugcccuucaacgacggggucuacuucgcgagcaccgagaaguccaacaucauccgcggcuggaucuucgggacgacccucgacagcaagacccagucccugcugaucgugaacaacgccaccaacguggucaucaaggugugcgaguuccaguucugcaacgaccccuuccucggcguguacuaccacaagaacaacaagagcugcauggaguccgaguuccgggucuacagcuccgccaacaacugcacguucgaguacgugagccagcccuuccugauggaccuggagggcaagcaggggaacuucaagaaccuccgcgaguucguguucaagaacaucgacggcuacuucaagaucuacuccaagcacaccccgaucaaccugguccgggaccugccccagggguucagcgcccucgagccccugguggaccugcccaucggcaucaacaucacccgcuuccagacccuccuggcccugcaccgguccuaccucacgccgggggacagcagcuccggcuggaccgcgggcgccgccgccuacuacgugggguaccugcagccccgcaccuuccugcucaaguacaacgagaacggcaccaucacggacgcggucgacugcgcccuggacccccugagcgagaccaagugcacccucaaguccuucaccguggagaaggggaucuaccagacgagcaacuuccgggugcagcccaccgaguccaucguccgcuucccgaacaucaccaaccugugccccuucggcgagguguucaacgccacccgguucgccagcgucuacgccuggaaccgcaagcggaucuccaacugcguggcggacuacagcgugcuguacaacuccgccagcuucuccacguucaagugcuacggcgucagccccaccaagcucaacgaccugugcuucaccaacguguacgccgacuccuucgugauccgcggggacgagguccggcagaucgcccccggccagaccgggaagaucgccgacuacaacuacaagcugccggacgacuucacgggcugcgugaucgcguggaacagcaacaaccucgacuccaaggucgggggcaacuacaacuaccgcuaccgccuguuccgcaagagcaaccucaagcccuucgagcgggacaucuccaccgagaucuaccaggccggcagcacccccugcaacgggguggagggcuucaacugcuacuucccccugcaguccuacggguuccagccgaccaacggcgugggguaccagcccuaccggguggucgugcugagcuucgagcuccugcacgcccccgccacggugugcggccccaagaaguccaccaaccuggucaagaacaagugcgugaacuucaacuucaacggccucaccgggaccggcgugcugaccgagagcaacaagaaguuccugccguuccagcaguucgggcgcgacaucgccgacacgaccgacgcgguccgcgacccccagacccuggagauccucgacaucacccccugcagcuucggcgggguguccgugaucacgccgggcaccaacaccagcaaccaggucgccgugcuguaccagggcgugaacugcaccgagguccccguggccauccacgccgaccagcugacgcccaccuggcggguguacuccaccggcagcaacgucuuccagacccgcgccgggugccucaucggcgcggagcacgugaacaacuccuacgagugcgacauccccaucggggccggcaucugcgccagcuaccagacgcagaccaacuccccgcggcgcgcccggagcguggcgucccagagcaucaucgccuacaccaugucccugggcgccgagaacagcgucgccuacuccaacaacagcaucgccauccccaccaacuucacgaucuccgugaccaccgagauccugcccgugagcaugaccaagacgagcgucgacugcaccauguacaucugcggggacuccaccgagugcagcaaccuccugcugcaguacggcuccuucugcacccagcucaaccgcgcgcugacggggaucgccguggagcaggacaagaacacccaggagguguucgcccaggucaagcagaucuacaagacgcccccgaucaaggacuucggcggguucaacuucagccagauccugcccgaccccuccaagcccagcaagcgguccuucaucgaggaccuccuguucaacaaggugacccuggccgacgccggcuucaucaagcaguacggcgacugccucggggacaucgcggcccgcgaccugaucugcgcccagaaguucaacggccugaccgugcucccgccccugcugaccgacgagaugaucgcccaguacaccagcgcccuccuggcggggaccaucacguccggcuggaccuucggggccggcgccgcccugcagauccccuucgcgaugcagauggccuaccgguucaacggcaucggggucacccagaacgugcucuacgagaaccagaagcugaucgccaaccaguucaacagcgccaucggcaagauccaggacucccugagcuccaccgccagcgcgcucgggaagcugcaggacguggucaaccagaacgcccaggcccugaacacgcucgugaagcagcuguccagcaacuucggcgccaucuccagcgugcugaacgacauccucucccgccuggacccgcccgaggccgaggugcagaucgaccggcugaucaccgggcgccuccagagccugcagaccuacgugacccagcagcugauccgggcggccgagauccgcgccagcgccaaccucgccgcgaccaagauguccgagugcguccugggccagagcaagcggguggacuucugcggcaagggguaccaccugauguccuucccccagagcgccccgcacggcguggucuuccuccacgugacguacguccccgcccaggagaagaacuucaccaccgcccccgcgaucugccacgacgggaaggcccacuucccccgcgagggcguguucguguccaacgggacccacugguucgucacgcagcggaacuucuacgagccgcagaucaucaccaccgacaacaccuucgugagcggcaacugcgacguggucaucggcaucgugaacaacacgguguacgacccccugcagcccgagcuggacuccuucaaggaggagcucgacaaguacuucaagaaccacaccagccccgacgucgaccugggggacaucuccggcaucaacgccagcguggugaacauccagaaggagaucgaccgccugaacgaggucgccaagaaccucaacgagucccugaucgaccugcaggagcucgggaaguacgagcaguacaucaaguggccgugguacaucuggcugggcuucaucgccggccugaucgcgaucgugauggugaccaucaugcucugcugcaugaccagcugcugcuccugccugaaggggugcugcagcugcggcuccugcugcaaguucgacgaggacgacagcgagcccguccugaagggggugaagcuccacuacacgugauaauaggcuggagccucgguggccuagcuucuugccccuugggccuccccccagccccuccuccccuuccugcacccguacccccguggucuuugaauaaagucugagugggcggcaaaaaaaaaaaaaaaaaaaaaaaaaaaaaaaaaaaaaaaaaaaaaaaaaaaaaaaaaaaaaaaaaaaaaaaaaaaaaaaaaaaaaaaaaaaaaaaaaaaaucuag

SEQ ID NO: 26615 - RNA, 4100 nt, Artificial Sequence
  SARS-CoV-2/Wuhan/WIV05/2019__EPI_ISL_402128 spike protein mRNA gc (1-1273)(K986P_V987P)
gggaaauaagagagaaaagaagaguaagaagaaauauaagaccccggcgccgccaccauguucguguuccugguccuccugccccuggugagcucccagugcgugaaccucaccacccgcacgcagcugccgcccgccuacaccaacagcuucacccggggcgucuacuaccccgacaagguguuccgcuccagcgugcugcacuccacccaggaccucuuccugcccuucuucagcaacgucacgugguuccacgccauccacguguccgggaccaacggcaccaagcgguucgacaacccggugcugcccuucaacgacggggucuacuucgcgagcaccgagaaguccaacaucauccgcggcuggaucuucgggacgacccucgacagcaagacccagucccugcugaucgugaacaacgccaccaacguggucaucaaggugugcgaguuccaguucugcaacgaccccuuccucggcguguacuaccacaagaacaacaagagcuggauggaguccgaguuccgggucuacagcuccgccaacaacugcacguucgaguacgugagccagcccuuccugauggaccuggagggcaagcaggggaacuucaagaaccuccgcgaguucguguucaagaacaucgacggcuacuucaagaucuacuccaagcacaccccgaucaaccugguccgggaccugccccagggguucagcgcccucgagccccugguggaccugcccaucggcaucaacaucacccgcuuccagacccuccuggcccugcaccgguccuaccucacgccgggggacagcagcuccggcuggaccgcgggcgccgccgccuacuacgugggguaccugcagccccgcaccuuccugcucaaguacaacgagaacggcaccaucacggacgcggucgacugcgcccuggacccccugagcgagaccaagugcacccucaaguccuucaccguggagaaggggaucuaccagacgagcaacuuccgggugcagcccaccgaguccaucguccgcuucccgaacaucaccaaccugugccccuucggcgagguguucaacgccacccgguucgccagcgucuacgccuggaaccgcaagcggaucuccaacugcguggcggacuacagcgugcuguacaacuccgccagcuucuccacguucaagugcuacggcgucagccccaccaagcucaacgaccugugcuucaccaacguguacgccgacuccuucgugauccgcggggacgagguccggcagaucgcccccggccagaccgggaagaucgccgacuacaacuacaagcugccggacgacuucacgggcugcgugaucgcguggaacagcaacaaccucgacuccaaggucgggggcaacuacaacuaccuguaccgccuguuccgcaagagcaaccucaagcccuucgagcgggacaucuccaccgagaucuaccaggccggcagcacccccugcaacgggguggagggcuucaacugcuacuucccccugcaguccuacggguuccagccgaccaacggcgugggguaccagcccuaccggguggucgugcugagcuucgagcuccugcacgcccccgccacggugugcggccccaagaaguccaccaaccuggucaagaacaagugcgugaacuucaacuucaacggccucaccgggaccggcgugcugaccgagagcaacaagaaguuccugccguuccagcaguucgggcgcgacaucgccgacacgaccgacgcgguccgcgacccccagacccuggagauccucgacaucacccccugcagcuucggcgggguguccgugaucacgccgggcaccaacaccagcaaccaggucgccgugcuguaccaggacgugaacugcaccgagguccccguggccauccacgccgaccagcugacgcccaccuggcggguguacuccaccggcagcaacgucuuccagacccgcgccgggugccucaucggcgcggagcacgugaacaacuccuacgagugcgacauccccaucggggccggcaucugcgccagcuaccagacgcagaccaacuccccgcggcgcgcccggagcguggcgucccagagcaucaucgccuacaccaugucccugggcgccgagaacagcgucgccuacuccaacaacagcaucgccauccccaccaacuucacgaucuccgugaccaccgagauccugcccgugagcaugaccaagacgagcgucgacugcaccauguacaucugcggggacuccaccgagugcagcaaccuccugcugcaguacggcuccuucugcacccagcucaaccgcgcgcugacggggaucgccguggagcaggacaagaacacccaggagguguucgcccaggucaagcagaucuacaagacgcccccgaucaaggacuucggcggguucaacuucagccagauccugcccgaccccuccaagcccagcaagcgguccuucaucgaggaccuccuguucaacaaggugacccuggccgacgccggcuucaucaagcaguacggcgacugccucggggacaucgcggcccgcgaccugaucugcgcccagaaguucaacggccugaccgugcucccgccccugcugaccgacgagaugaucgcccaguacaccagcgcccuccuggcggggaccaucacguccggcuggaccuucggggccggcgccgcccugcagauccccuucgcgaugcagauggccuaccgguucaacggcaucggggucacccagaacgugcucuacgagaaccagaagcugaucgccaaccaguucaacagcgccaucggcaagauccaggacucccugagcuccaccgccagcgcgcucgggaagcugcaggacguggucaaccagaacgcccaggcccugaacacgcucgugaagcagcuguccagcaacuucggcgccaucuccagcgugcugaacgacauccucucccgccuggacccgcccgaggccgagguccagaucgaccggcugaucaccgggcgccuccagagccugcagaccuacgugacccagcagcugauccgggcggccgagauccgcgccagcgccaaccucgccgcgaccaagauguccgagugcgugcugggccagagcaagcgggucgacuucugcggcaagggguaccaccugauguccuucccccagagcgcgccccacggcgugguguuccuccacgucacguacgugcccgcccaggagaagaacuucaccaccgccccggccaucugccacgacgggaaggcccacuucccccgcgagggcgucuucguguccaacgggacccacugguucgugacgcagcggaacuucuacgagccccagaucaucaccaccgacaacaccuucgucagcggcaacugcgacguggugaucggcaucgucaacaacacgguguacgacccccugcagccggagcuggacuccuucaaggaggagcucgacaaguacuucaagaaccacaccagccccgacguggaccugggggacaucuccggcaucaacgccagcgucgugaacauccagaaggagaucgaccgccugaacgagguggccaagaaccucaacgagucccugaucgaccugcaggagcucgggaaguacgagcaguacaucaaguggcccugguacaucuggcugggcuucaucgccggccugaucgcgaucgucauggugaccaucaugcucugcugcaugaccagcugcugcuccugccugaaggggugcugcagcugcggcuccugcugcaaguucgacgaggacgacagcgagccggugcugaagggggucaagcuccacuacacgugauaauaggcuggagccucgguggccuagcuucuugccccuugggccuccccccagccccuccuccccuuccugcacccguacccccguggucuuugaauaaagucugagugggcggcaaaaaaaaaaaaaaaaaaaaaaaaaaaaaaaaaaaaaaaaaaaaaaaaaaaaaaaaaaaaaaaaaaaaaaaaaaaaaaaaaaaaaaaaaaaaaaaaaaaaucuag

SEQ ID NO: 26616 - RNA, 4100 nt, Artificial Sequence
  SARS-CoV-2/Wuhan/WIV05/2019__EPI_ISL_402128 spike protein mRNA gc (1-1273)(K986P_V987P_ D614G)
gggaaauaagagagaaaagaagaguaagaagaaauauaagaccccggcgccgccaccauguucguguuccugguccuccugccccuggugagcucccagugcgugaaccucaccacccgcacgcagcugccgcccgccuacaccaacagcuucacccggggcgucuacuaccccgacaagguguuccgcuccagcgugcugcacuccacccaggaccucuuccugcccuucuucagcaacgucacgugguuccacgccauccacguguccgggaccaacggcaccaagcgguucgacaacccggugcugcccuucaacgacggggucuacuucgcgagcaccgagaaguccaacaucauccgcggcuggaucuucgggacgacccucgacagcaagacccagucccugcugaucgugaacaacgccaccaacguggucaucaaggugugcgaguuccaguucugcaacgaccccuuccucggcguguacuaccacaagaacaacaagagcuggauggaguccgaguuccgggucuacagcuccgccaacaacugcacguucgaguacgugagccagcccuuccugauggaccuggagggcaagcaggggaacuucaagaaccuccgcgaguucguguucaagaacaucgacggcuacuucaagaucuacuccaagcacaccccgaucaaccugguccgggaccugccccagggguucagcgcccucgagccccugguggaccugcccaucggcaucaacaucacccgcuuccagacccuccuggcccugcaccgguccuaccucacgccgggggacagcagcuccggcuggaccgcgggcgccgccgccuacuacgugggguaccugcagccccgcaccuuccugcucaaguacaacgagaacggcaccaucacggacgcggucgacugcgcccuggacccccugagcgagaccaagugcacccucaaguccuucaccguggagaaggggaucuaccagacgagcaacuuccgggugcagcccaccgaguccaucguccgcuucccgaacaucaccaaccugugccccuucggcgagguguucaacgccacccgguucgccagcgucuacgccuggaaccgcaagcggaucuccaacugcguggcggacuacagcgugcuguacaacuccgccagcuucuccacguucaagugcuacggcgucagccccaccaagcucaacgaccugugcuucaccaacguguacgccgacuccuucgugauccgcggggacgagguccggcagaucgcccccggccagaccgggaagaucgccgacuacaacuacaagcugccggacgacuucacgggcugcgugaucgcguggaacagcaacaaccucgacuccaaggucgggggcaacuacaacuaccuguaccgccuguuccgcaagagcaaccucaagcccuucgagcgggacaucuccaccgagaucuaccaggccggcagcacccccugcaacgggguggagggcuucaacugcuacuucccccugcaguccuacggguuccagccgaccaacggcgugggguaccagcccuaccggguggucgugcugagcuucgagcuccugcacgcccccgccacggugugcggccccaagaaguccaccaaccuggucaagaacaagugcgugaacuucaacuucaacggccucaccgggaccggcgugcugaccgagagcaacaagaaguuccugccguuccagcaguucgggcgcgacaucgccgacacgaccgacgcgguccgcgacccccagacccuggagauccucgacaucacccccugcagcuucggcgggguguccgugaucacgccgggcaccaacaccagcaaccaggucgccgugcuguaccagggcgugaacugcaccgagguccccguggccauccacgccgaccagcugacgcccaccuggcggguguacuccaccgggagcaacgucuuccagacccgcgccggcugccucaucggggcggagcacgugaacaacuccuacgagugcgacauccccaucggcgccggcaucugcgccagcuaccagacgcagaccaacuccccgcggcgcgcccggagcguggcgucccagagcaucaucgccuacaccaugucccugggggccgagaacagcgucgccuacuccaacaacagcaucgccauccccaccaacuucacgaucuccgugaccaccgagauccugcccgugagcaugaccaagacgagcgucgacugcaccauguacaucugcggcgacuccaccgagugcagcaaccuccugcugcaguacggguccuucugcacccagcucaaccgcgcgcugacgggcaucgccguggagcaggacaagaacacccaggagguguucgcccaggucaagcagaucuacaagacgcccccgaucaaggacuucgggggcuucaacuucagccagauccugcccgaccccuccaagcccagcaagcgguccuucaucgaggaccuccuguucaacaaggugacccuggccgacgccggcuucaucaagcaguacggggacugccucggcgacaucgcggcccgcgaccugaucugcgcccagaaguucaacgggcugaccgugcucccgccccugcugaccgacgagaugaucgcccaguacaccagcgcccuccuggcgggcaccaucacguccggguggaccuucggcgccggcgccgcccugcagauccccuucgcgaugcagauggccuaccgguucaacgggaucggcgucacccagaacgugcucuacgagaaccagaagcugaucgccaaccaguucaacagcgccaucgggaagauccaggacucccugagcuccaccgccagcgcgcucggcaagcugcaggacguggucaaccagaacgcccaggcccugaacacgcucgugaagcagcuguccagcaacuucggggccaucuccagcgugcugaacgacauccucucccgccuggacccgcccgaggccgagguccagaucgaccggcugaucaccggccgccuccagagccugcagaccuacgugacccagcagcugauccgggcggccgagauccgcgccagcgccaaccucgccgcgaccaagauguccgagugcgugcugggccagagcaagcgggucgacuucugcgggaagggcuaccaccugauguccuucccccagagcgcgccccacggggugguguuccuccacgucacguacgugcccgcccaggagaagaacuucaccaccgccccggccaucugccacgacggcaaggcccacuucccccgcgagggggucuucguguccaacggcacccacugguucgugacgcagcggaacuucuacgagccccagaucaucaccaccgacaacaccuucgucagcggcaacugcgacguggugaucgggaucgucaacaacacgguguacgacccccugcagccggagcuggacuccuucaaggaggagcucgacaaguacuucaagaaccacaccagccccgacguggaccugggcgacaucuccgggaucaacgccagcgucgugaacauccagaaggagaucgaccgccugaacgagguggccaagaaccucaacgagucccugaucgaccugcaggagcucggcaaguacgagcaguacaucaaguggcccugguacaucuggcugggcuucaucgccgggcugaucgcgaucgucauggugaccaucaugcucugcugcaugaccagcugcugcuccugccugaagggcugcugcagcugcggguccugcugcaaguucgacgaggacgacagcgagccggugcugaagggcgucaagcuccacuacacgugauaauaggcuggagccucgguggccuagcuucuugccccuugggccuccccccagccccuccuccccuuccugcacccguacccccguggucuuugaauaaagucugagugggcggcaaaaaaaaaaaaaaaaaaaaaaaaaaaaaaaaaaaaaaaaaaaaaaaaaaaaaaaaaaaaaaaaaaaaaaaaaaaaaaaaaaaaaaaaaaaaaaaaaaaaucuag

SEQ ID NO: 26617 - RNA, 4100 nt, Artificial Sequence
  SARS-CoV-2/Wuhan/WIV05/2019__EPI_ISL_402128 spike protein mRNA gc (1-1273)(K986P_V987P_A222V_D614G)
gggaaauaagagagaaaagaagaguaagaagaaauauaagaccccggcgccgccaccauguucguguuccugguccuccugccccuggugagcucccagugcgugaaccucaccacccgcacgcagcugccgcccgccuacaccaacagcuucacccggggcgucuacuaccccgacaagguguuccgcuccagcgugcugcacuccacccaggaccucuuccugcccuucuucagcaacgucacgugguuccacgccauccacguguccgggaccaacggcaccaagcgguucgacaacccggugcugcccuucaacgacggggucuacuucgcgagcaccgagaaguccaacaucauccgcggcuggaucuucgggacgacccucgacagcaagacccagucccugcugaucgugaacaacgccaccaacguggucaucaaggugugcgaguuccaguucugcaacgaccccuuccucggcguguacuaccacaagaacaacaagagcuggauggaguccgaguuccgggucuacagcuccgccaacaacugcacguucgaguacgugagccagcccuuccugauggaccuggagggcaagcaggggaacuucaagaaccuccgcgaguucguguucaagaacaucgacggcuacuucaagaucuacuccaagcacaccccgaucaaccugguccgggaccugccccagggguucagcgugcucgagccccugguggaccugcccaucggcaucaacaucacccgcuuccagacccuccuggcccugcaccgguccuaccucacgccgggggacagcagcuccggcuggaccgccggcgcggccgccuacuacgucggguaccugcagccccgcaccuuccugcucaaguacaacgagaacggcaccaucacggacgccguggacugcgcgcuggacccccugagcgagaccaagugcacccucaaguccuucaccguggagaaggggaucuaccagacgagcaacuuccggguccagcccaccgaguccaucgugcgcuucccgaacaucaccaaccugugccccuucggcgaggucuucaacgccacccgguucgccagcguguacgccuggaaccgcaagcggaucuccaacugcguggccgacuacagcguccuguacaacuccgcgagcuucuccacguucaagugcuacggcgugagccccaccaagcucaacgaccugugcuucaccaacguguacgccgacuccuucgucauccgcggggacgaggugcggcagaucgcccccggccagaccgggaagaucgccgacuacaacuacaagcugccggacgacuucacgggcugcgugaucgccuggaacagcaacaaccucgacuccaaggucgggggcaacuacaacuaccuguaccgccuguuccgcaagagcaaccucaagcccuucgagcgggacaucuccaccgagaucuaccaggcgggcagcacccccugcaacgggguggagggcuucaacugcuacuucccccugcaguccuacggguuccagccgaccaacggcgugggguaccagcccuaccgggucguggugcugagcuucgagcuccugcacgcccccgccacggucugcggccccaagaaguccaccaaccuggugaagaacaagugcgugaacuucaacuucaacggccucaccgggaccggcguccugaccgagagcaacaagaaguuccugccguuccagcaguucgggcgcgacaucgccgacacgaccgacgccgugcgcgacccccagacccuggagauccucgacaucacccccugcagcuucggcgggguguccgucaucacgccgggcaccaacaccagcaaccagguggcggugcuguaccagggcgucaacugcaccgaggugcccguggccauccacgccgaccagcugacgcccaccuggcgggucuacuccaccgggagcaacguguuccagacccgcgccggcugccucaucggggccgagcacgugaacaacuccuacgagugcgacauccccaucggcgcgggcaucugcgccagcuaccagacgcagaccaacuccccgcggcgcgcccggagcgucgccucccagagcaucaucgcguacaccaugucccugggggccgagaacagcguggccuacuccaacaacagcaucgccauccccaccaacuucacgaucuccgugaccaccgagauccugcccgucagcaugaccaagacgagcguggacugcaccauguacaucugcggcgacuccaccgagugcagcaaccuccugcugcaguacggguccuucugcacccagcucaaccgcgcccugacgggcaucgcgguggagcaggacaagaacacccaggaggucuucgcccaggugaagcagaucuacaagacgcccccgaucaaggacuucgggggcuucaacuucagccagauccugcccgaccccuccaagcccagcaagcgguccuucaucgaggaccuccuguucaacaaggugacccuggccgacgccggcuucaucaagcaguacggggacugccucggcgacaucgccgcgcgcgaccugaucugcgcccagaaguucaacgggcugaccguccucccgccccugcugaccgacgagaugaucgcccaguacaccagcgcccuccuggccggcaccaucacguccggguggaccuucggcgcgggcgccgcccugcagauccccuucgccaugcagauggcguaccgguucaacgggaucggcgugacccagaacgugcucuacgagaaccagaagcugaucgccaaccaguucaacagcgccaucgggaagauccaggacucccugagcuccaccgccagcgcccucggcaagcugcaggacgucgugaaccagaacgcgcaggcccugaacacgcucgugaagcagcuguccagcaacuucggggccaucuccagcguccugaacgacauccucucccgccuggacccgcccgaggccgaggugcagaucgaccggcugaucaccggccgccuccagagccugcagaccuacgugacccagcagcugauccgggccgcggagauccgcgccagcgccaaccucgccgccaccaagauguccgagugcguccugggccagagcaagcggguggacuucugcgggaagggcuaccaccugauguccuucccccagagcgcgccccacgggguggucuuccuccacgugacguacguccccgcccaggagaagaacuucaccaccgccccggccaucugccacgacggcaaggcgcacuucccccgcgaggggguguucguguccaacggcacccacugguucgucacgcagcggaacuucuacgagccccagaucaucaccaccgacaacaccuucgugagcggcaacugcgacguggucaucgggaucgugaacaacacgguguacgacccccugcagccggagcuggacuccuucaaggaggagcucgacaaguacuucaagaaccacaccagccccgacgucgaccugggcgacaucuccgggaucaacgccagcguggugaacauccagaaggagaucgaccgccugaacgaggucgccaagaaccucaacgagucccugaucgaccugcaggagcucggcaaguacgagcaguacaucaaguggcccugguacaucuggcugggcuucaucgccgggcugaucgccaucgugauggugaccaucaugcucugcugcaugaccagcugcugcuccugccugaagggcugcugcagcugcggguccugcugcaaguucgacgaggacgacagcgagccgguccugaagggcgugaagcuccacuacacgugauaauaggcuggagccucgguggccuagcuucuugccccuugggccuccccccagccccuccuccccuuccugcacccguacccccguggucuuugaauaaagucugagugggcggcaaaaaaaaaaaaaaaaaaaaaaaaaaaaaaaaaaaaaaaaaaaaaaaaaaaaaaaaaaaaaaaaaaaaaaaaaaaaaaaaaaaaaaaaaaaaaaaaaaaaucuag

SEQ ID NO: 26618 - RNA, 4100 nt, Artificial Sequence
  SARS-CoV-2/Wuhan/WIV05/2019__EPI_ISL_402128 spike protein mRNA gc (1-1273)(K986P_V987P_N439K_D614G)
gggaaauaagagagaaaagaagaguaagaagaaauauaagaccccggcgccgccaccauguucguguuccugguccuccugccccuggugagcucccagugcgugaaccucaccacccgcacgcagcugccgcccgccuacaccaacagcuucacccggggcgucuacuaccccgacaagguguuccgcuccagcgugcugcacuccacccaggaccucuuccugcccuucuucagcaacgucacgugguuccacgccauccacguguccgggaccaacggcaccaagcgguucgacaacccggugcugcccuucaacgacggggucuacuucgcgagcaccgagaaguccaacaucauccgcggcuggaucuucgggacgacccucgacagcaagacccagucccugcugaucgugaacaacgccaccaacguggucaucaaggugugcgaguuccaguucugcaacgaccccuuccucggcguguacuaccacaagaacaacaagagcuggauggaguccgaguuccgggucuacagcuccgccaacaacugcacguucgaguacgugagccagcccuuccugauggaccuggagggcaagcaggggaacuucaagaaccuccgcgaguucguguucaagaacaucgacggcuacuucaagaucuacuccaagcacaccccgaucaaccugguccgggaccugccccagggguucagcgcccucgagccccugguggaccugcccaucggcaucaacaucacccgcuuccagacccuccuggcccugcaccgguccuaccucacgccgggggacagcagcuccggcuggaccgcgggcgccgccgccuacuacgugggguaccugcagccccgcaccuuccugcucaaguacaacgagaacggcaccaucacggacgcggucgacugcgcccuggacccccugagcgagaccaagugcacccucaaguccuucaccguggagaaggggaucuaccagacgagcaacuuccgggugcagcccaccgaguccaucguccgcuucccgaacaucaccaaccugugccccuucggcgagguguucaacgccacccgguucgccagcgucuacgccuggaaccgcaagcggaucuccaacugcguggcggacuacagcgugcuguacaacuccgccagcuucuccacguucaagugcuacggcgucagccccaccaagcucaacgaccugugcuucaccaacguguacgccgacuccuucgugauccgcggggacgagguccggcagaucgcccccggccagaccgggaagaucgccgacuacaacuacaagcugccggacgacuucacgggcugcgugaucgcguggaacagcaagaaccucgacuccaaggucgggggcaacuacaacuaccuguaccgccuguuccgcaagagcaaccucaagcccuucgagcgggacaucuccaccgagaucuaccaggccggcagcacccccugcaacgggguggagggcuucaacugcuacuucccccugcaguccuacggguuccagccgaccaacggcgugggguaccagcccuaccggguggucgugcugagcuucgagcuccugcacgcccccgccacggugugcggccccaagaaguccaccaaccuggucaagaacaagugcgugaacuucaacuucaacggccucaccgggaccggcgugcugaccgagagcaacaagaaguuccugccguuccagcaguucgggcgcgacaucgccgacacgaccgacgcgguccgcgacccccagacccuggagauccucgacaucacccccugcagcuucggcgggguguccgugaucacgccgggcaccaacaccagcaaccaggucgccgugcuguaccagggcgugaacugcaccgagguccccguggccauccacgccgaccagcugacgcccaccuggcggguguacuccaccgggagcaacgucuuccagacccgcgccggcugccucaucggggcggagcacgugaacaacuccuacgagugcgacauccccaucggcgccggcaucugcgccagcuaccagacgcagaccaacuccccgcggcgcgcccggagcguggcgucccagagcaucaucgccuacaccaugucccugggggccgagaacagcgucgccuacuccaacaacagcaucgccauccccaccaacuucacgaucuccgugaccaccgagauccugcccgugagcaugaccaagacgagcgucgacugcaccauguacaucugcggcgacuccaccgagugcagcaaccuccugcugcaguacggguccuucugcacccagcucaaccgcgcgcugacgggcaucgccguggagcaggacaagaacacccaggagguguucgcccaggucaagcagaucuacaagacgcccccgaucaaggacuucgggggcuucaacuucagccagauccugcccgaccccuccaagcccagcaagcgguccuucaucgaggaccuccuguucaacaaggugacccuggccgacgccggcuucaucaagcaguacggggacugccucggcgacaucgcggcccgcgaccugaucugcgcccagaaguucaacgggcugaccgugcucccgccccugcugaccgacgagaugaucgcccaguacaccagcgcccuccuggcgggcaccaucacguccggguggaccuucggcgccggcgccgcccugcagauccccuucgcgaugcagauggccuaccgguucaacgggaucggcgucacccagaacgugcucuacgagaaccagaagcugaucgccaaccaguucaacagcgccaucgggaagauccaggacucccugagcuccaccgccagcgcgcucggcaagcugcaggacguggucaaccagaacgcccaggcccugaacacgcucgugaagcagcuguccagcaacuucggggccaucuccagcgugcugaacgacauccucucccgccuggacccgcccgaggccgagguccagaucgaccggcugaucaccggccgccuccagagccugcagaccuacgugacccagcagcugauccgggcggccgagauccgcgccagcgccaaccucgccgcgaccaagauguccgagugcgugcugggccagagcaagcgggucgacuucugcgggaagggcuaccaccugauguccuucccccagagcgcgccccacggggugguguuccuccacgucacguacgugcccgcccaggagaagaacuucaccaccgccccggccaucugccacgacggcaaggcccacuucccccgcgagggggucuucguguccaacggcacccacugguucgugacgcagcggaacuucuacgagccccagaucaucaccaccgacaacaccuucgucagcggcaacugcgacguggugaucgggaucgucaacaacacgguguacgacccccugcagccggagcuggacuccuucaaggaggagcucgacaaguacuucaagaaccacaccagccccgacguggaccugggcgacaucuccgggaucaacgccagcgucgugaacauccagaaggagaucgaccgccugaacgagguggccaagaaccucaacgagucccugaucgaccugcaggagcucggcaaguacgagcaguacaucaaguggcccugguacaucuggcugggcuucaucgccgggcugaucgcgaucgucauggugaccaucaugcucugcugcaugaccagcugcugcuccugccugaagggcugcugcagcugcggguccugcugcaaguucgacgaggacgacagcgagccggugcugaagggcgucaagcuccacuacacgugauaauaggcuggagccucgguggccuagcuucuugccccuugggccuccccccagccccuccuccccuuccugcacccguacccccguggucuuugaauaaagucugagugggcggcaaaaaaaaaaaaaaaaaaaaaaaaaaaaaaaaaaaaaaaaaaaaaaaaaaaaaaaaaaaaaaaaaaaaaaaaaaaaaaaaaaaaaaaaaaaaaaaaaaaaucuag

SEQ ID NO: 26619 - RNA, 4100 nt, Artificial Sequence
  SARS-CoV-2/Wuhan/WIV05/2019__EPI_ISL_402128 spike protein mRNA gc (1-1273)(K986P_V987P_S477N_D614G)
gggaaauaagagagaaaagaagaguaagaagaaauauaagaccccggcgccgccaccauguucguguuccugguccuccugccccuggugagcucccagugcgugaaccucaccacccgcacgcagcugccgcccgccuacaccaacagcuucacccggggcgucuacuaccccgacaagguguuccgcuccagcgugcugcacuccacccaggaccucuuccugcccuucuucagcaacgucacgugguuccacgccauccacguguccgggaccaacggcaccaagcgguucgacaacccggugcugcccuucaacgacggggucuacuucgcgagcaccgagaaguccaacaucauccgcggcuggaucuucgggacgacccucgacagcaagacccagucccugcugaucgugaacaacgccaccaacguggucaucaaggugugcgaguuccaguucugcaacgaccccuuccucggcguguacuaccacaagaacaacaagagcuggauggaguccgaguuccgggucuacagcuccgccaacaacugcacguucgaguacgugagccagcccuuccugauggaccuggagggcaagcaggggaacuucaagaaccuccgcgaguucguguucaagaacaucgacggcuacuucaagaucuacuccaagcacaccccgaucaaccugguccgggaccugccccagggguucagcgcccucgagccccugguggaccugcccaucggcaucaacaucacccgcuuccagacccuccuggcccugcaccgguccuaccucacgccgggggacagcagcuccggcuggaccgcgggcgccgccgccuacuacgugggguaccugcagccccgcaccuuccugcucaaguacaacgagaacggcaccaucacggacgcggucgacugcgcccuggacccccugagcgagaccaagugcacccucaaguccuucaccguggagaaggggaucuaccagacgagcaacuuccgggugcagcccaccgaguccaucguccgcuucccgaacaucaccaaccugugccccuucggcgagguguucaacgccacccgguucgccagcgucuacgccuggaaccgcaagcggaucuccaacugcguggcggacuacagcgugcuguacaacuccgccagcuucuccacguucaagugcuacggcgucagccccaccaagcucaacgaccugugcuucaccaacguguacgccgacuccuucgugauccgcggggacgagguccggcagaucgcccccggccagaccgggaagaucgccgacuacaacuacaagcugccggacgacuucacgggcugcgugaucgcguggaacagcaacaaccucgacuccaaggucgggggcaacuacaacuaccuguaccgccuguuccgcaagagcaaccucaagcccuucgagcgggacaucuccaccgagaucuaccaggccggcaacacccccugcaacgggguggagggcuucaacugcuacuucccccugcagagcuacggguuccagccgaccaacggcgugggguaccagcccuaccggguggucgugcuguccuucgagcuccugcacgcccccgccacggugugcggccccaagaaguccaccaaccuggucaagaacaagugcgugaacuucaacuucaacggccucaccgggaccggcgugcugaccgagagcaacaagaaguuccugccguuccagcaguucgggcgcgacaucgccgacacgaccgacgcgguccgcgacccccagacccuggagauccucgacaucacccccugcagcuucggcggggugagcgugaucacgccgggcaccaacaccuccaaccaggucgccgugcuguaccagggcgugaacugcaccgagguccccguggccauccacgccgaccagcugacgcccaccuggcggguguacagcaccggguccaacgucuuccagacccgcgccggcugccucaucggggcggagcacgugaacaacagcuacgagugcgacauccccaucggcgccggcaucugcgccuccuaccagacgcagaccaacagcccgcggcgcgcccgguccguggcgagccaguccaucaucgccuacaccaugagccugggggccgagaacuccgucgccuacagcaacaacuccaucgccauccccaccaacuucacgaucagcgugaccaccgagauccugcccguguccaugaccaagacgagcgucgacugcaccauguacaucugcggcgacagcaccgagugcuccaaccuccugcugcaguacgggagcuucugcacccagcucaaccgcgcgcugacgggcaucgccguggagcaggacaagaacacccaggagguguucgcccaggucaagcagaucuacaagacgcccccgaucaaggacuucgggggcuucaacuucucccagauccugcccgaccccagcaagcccuccaagcggagcuucaucgaggaccuccuguucaacaaggugacccuggccgacgccggcuucaucaagcaguacggggacugccucggcgacaucgcggcccgcgaccugaucugcgcccagaaguucaacgggcugaccgugcucccgccccugcugaccgacgagaugaucgcccaguacaccuccgcccuccuggcgggcaccaucacgagcggguggaccuucggcgccggcgccgcccugcagauccccuucgcgaugcagauggccuaccgguucaacgggaucggcgucacccagaacgugcucuacgagaaccagaagcugaucgccaaccaguucaacuccgccaucgggaagauccaggacagccuguccagcaccgccuccgcgcucggcaagcugcaggacguggucaaccagaacgcccaggcccugaacacgcucgugaagcagcugagcuccaacuucggggccaucagcuccgugcugaacgacauccucagccgccuggacccgcccgaggccgagguccagaucgaccggcugaucaccggccgccuccagucccugcagaccuacgugacccagcagcugauccgggcggccgagauccgcgccagcgccaaccucgccgcgaccaagaugagcgagugcgugcugggccaguccaagcgggucgacuucugcgggaagggcuaccaccugaugagcuucccccaguccgcgccccacggggugguguuccuccacgucacguacgugcccgcccaggagaagaacuucaccaccgccccggccaucugccacgacggcaaggcccacuucccccgcgagggggucuucgugagcaacggcacccacugguucgugacgcagcggaacuucuacgagccccagaucaucaccaccgacaacaccuucgucuccggcaacugcgacguggugaucgggaucgucaacaacacgguguacgacccccugcagccggagcuggacagcuucaaggaggagcucgacaaguacuucaagaaccacaccucccccgacguggaccugggcgacaucagcgggaucaacgccuccgucgugaacauccagaaggagaucgaccgccugaacgagguggccaagaaccucaacgagagccugaucgaccugcaggagcucggcaaguacgagcaguacaucaaguggcccugguacaucuggcugggcuucaucgccgggcugaucgcgaucgucauggugaccaucaugcucugcugcaugaccuccugcugcagcugccugaagggcugcugcuccugcgggagcugcugcaaguucgacgaggacgacuccgagccggugcugaagggcgucaagcuccacuacacgugauaauaggcuggagccucgguggccuagcuucuugccccuugggccuccccccagccccuccuccccuuccugcacccguacccccguggucuuugaauaaagucugagugggcggcaaaaaaaaaaaaaaaaaaaaaaaaaaaaaaaaaaaaaaaaaaaaaaaaaaaaaaaaaaaaaaaaaaaaaaaaaaaaaaaaaaaaaaaaaaaaaaaaaaaaucuag

SEQ ID NO: 26620 - RNA, 4100 nt, Artificial Sequence
  SARS-CoV-2/Wuhan/WIV05/2019__EPI_ISL_402128 spike protein mRNA gc (1-1273)(K986P_V987P_N501Y_D614G)
gggaaauaagagagaaaagaagaguaagaagaaauauaagaccccggcgccgccaccauguucguguuccugguccuccugccccuggugagcucccagugcgugaaccucaccacccgcacgcagcugccgcccgccuacaccaacagcuucacccggggcgucuacuaccccgacaagguguuccgcuccagcgugcugcacuccacccaggaccucuuccugcccuucuucagcaacgucacgugguuccacgccauccacguguccgggaccaacggcaccaagcgguucgacaacccggugcugcccuucaacgacggggucuacuucgcgagcaccgagaaguccaacaucauccgcggcuggaucuucgggacgacccucgacagcaagacccagucccugcugaucgugaacaacgccaccaacguggucaucaaggugugcgaguuccaguucugcaacgaccccuuccucggcguguacuaccacaagaacaacaagagcuggauggaguccgaguuccgggucuacagcuccgccaacaacugcacguucgaguacgugagccagcccuuccugauggaccuggagggcaagcaggggaacuucaagaaccuccgcgaguucguguucaagaacaucgacggcuacuucaagaucuacuccaagcacaccccgaucaaccugguccgggaccugccccagggguucagcgcccucgagccccugguggaccugcccaucggcaucaacaucacccgcuuccagacccuccuggcccugcaccgguccuaccucacgccgggggacagcagcuccggcuggaccgcgggcgccgccgccuacuacgugggguaccugcagccccgcaccuuccugcucaaguacaacgagaacggcaccaucacggacgcggucgacugcgcccuggacccccugagcgagaccaagugcacccucaaguccuucaccguggagaaggggaucuaccagacgagcaacuuccgggugcagcccaccgaguccaucguccgcuucccgaacaucaccaaccugugccccuucggcgagguguucaacgccacccgguucgccagcgucuacgccuggaaccgcaagcggaucuccaacugcguggcggacuacagcgugcuguacaacuccgccagcuucuccacguucaagugcuacggcgucagccccaccaagcucaacgaccugugcuucaccaacguguacgccgacuccuucgugauccgcggggacgagguccggcagaucgcccccggccagaccgggaagaucgccgacuacaacuacaagcugccggacgacuucacgggcugcgugaucgcguggaacagcaacaaccucgacuccaaggucgggggcaacuacaacuaccuguaccgccuguuccgcaagagcaaccucaagcccuucgagcgggacaucuccaccgagaucuaccaggccggcagcacccccugcaacgggguggagggcuucaacugcuacuucccccugcaguccuacggguuccagccgaccuacggcgugggguaccagcccuaccggguggucgugcugagcuucgagcuccugcacgcccccgccacggugugcggccccaagaaguccaccaaccuggucaagaacaagugcgugaacuucaacuucaacggccucaccgggaccggcgugcugaccgagagcaacaagaaguuccugccguuccagcaguucgggcgcgacaucgccgacacgaccgacgcgguccgcgacccccagacccuggagauccucgacaucacccccugcagcuucggcgggguguccgugaucacgccgggcaccaacaccagcaaccaggucgccgugcuguaccagggcgugaacugcaccgagguccccguggccauccacgccgaccagcugacgcccaccuggcggguguacuccaccgggagcaacgucuuccagacccgcgccggcugccucaucggggcggagcacgugaacaacuccuacgagugcgacauccccaucggcgccggcaucugcgccagcuaccagacgcagaccaacuccccgcggcgcgcccggagcguggcgucccagagcaucaucgccuacaccaugucccugggggccgagaacagcgucgccuacuccaacaacagcaucgccauccccaccaacuucacgaucuccgugaccaccgagauccugcccgugagcaugaccaagacgagcgucgacugcaccauguacaucugcggcgacuccaccgagugcagcaaccuccugcugcaguacggguccuucugcacccagcucaaccgcgcgcugacgggcaucgccguggagcaggacaagaacacccaggagguguucgcccaggucaagcagaucuacaagacgcccccgaucaaggacuucgggggcuucaacuucagccagauccugcccgaccccuccaagcccagcaagcgguccuucaucgaggaccuccuguucaacaaggugacccuggccgacgccggcuucaucaagcaguacggggacugccucggcgacaucgcggcccgcgaccugaucugcgcccagaaguucaacgggcugaccgugcucccgccccugcugaccgacgagaugaucgcccaguacaccagcgcccuccuggcgggcaccaucacguccggguggaccuucggcgccggcgccgcccugcagauccccuucgcgaugcagauggccuaccgguucaacgggaucggcgucacccagaacgugcucuacgagaaccagaagcugaucgccaaccaguucaacagcgccaucgggaagauccaggacucccugagcuccaccgccagcgcgcucggcaagcugcaggacguggucaaccagaacgcccaggcccugaacacgcucgugaagcagcuguccagcaacuucggggccaucuccagcgugcugaacgacauccucucccgccuggacccgcccgaggccgagguccagaucgaccggcugaucaccggccgccuccagagccugcagaccuacgugacccagcagcugauccgggcggccgagauccgcgccagcgccaaccucgccgcgaccaagauguccgagugcgugcugggccagagcaagcgggucgacuucugcgggaagggcuaccaccugauguccuucccccagagcgcgccccacggggugguguuccuccacgucacguacgugcccgcccaggagaagaacuucaccaccgccccggccaucugccacgacggcaaggcccacuucccccgcgagggggucuucguguccaacggcacccacugguucgugacgcagcggaacuucuacgagccccagaucaucaccaccgacaacaccuucgucagcggcaacugcgacguggugaucgggaucgucaacaacacgguguacgacccccugcagccggagcuggacuccuucaaggaggagcucgacaaguacuucaagaaccacaccagccccgacguggaccugggcgacaucuccgggaucaacgccagcgucgugaacauccagaaggagaucgaccgccugaacgagguggccaagaaccucaacgagucccugaucgaccugcaggagcucggcaaguacgagcaguacaucaaguggcccugguacaucuggcugggcuucaucgccgggcugaucgcgaucgucauggugaccaucaugcucugcugcaugaccagcugcugcuccugccugaagggcugcugcagcugcggguccugcugcaaguucgacgaggacgacagcgagccggugcugaagggcgucaagcuccacuacacgugauaauaggcuggagccucgguggccuagcuucuugccccuugggccuccccccagccccuccuccccuuccugcacccguacccccguggucuuugaauaaagucugagugggcggcaaaaaaaaaaaaaaaaaaaaaaaaaaaaaaaaaaaaaaaaaaaaaaaaaaaaaaaaaaaaaaaaaaaaaaaaaaaaaaaaaaaaaaaaaaaaaaaaaaaaucuag

SEQ ID NO: 26621 - RNA, 4094 nt, Artificial Sequence
  SARS-CoV-2/Wuhan/WIV05/2019__EPI_ISL_402128 spike protein mRNA gc (1-1273)(K986P_V987P_H69del_V70del_D614G)
gggaaauaagagagaaaagaagaguaagaagaaauauaagaccccggcgccgccaccauguucguguuccugguccuccugccccuggugagcucccagugcgugaaccucaccacccgcacgcagcugccgcccgccuacaccaacagcuucacccggggcgucuacuaccccgacaagguguuccgcuccagcgugcugcacuccacccaggaccucuuccugcccuucuucagcaacgucacgugguuccacgccaucuccgggaccaacggcaccaagcgguucgacaacccggugcugcccuucaacgacgggguguacuucgcgagcaccgagaaguccaacaucauccgcggcuggaucuucgggacgacccucgacagcaagacccagucccugcugaucgucaacaacgccaccaacguggugaucaaggucugcgaguuccaguucugcaacgaccccuuccucggcguguacuaccacaagaacaacaagagcuggauggaguccgaguuccggguguacagcuccgccaacaacugcacguucgaguacgucagccagcccuuccugauggaccuggagggcaagcaggggaacuucaagaaccuccgcgaguucguguucaagaacaucgacggcuacuucaagaucuacuccaagcacaccccgaucaaccuggugcgggaccugccccagggguucagcgcccucgagccccuggucgaccugcccaucggcaucaacaucacccgcuuccagacccuccuggcccugcaccgguccuaccucacgccgggggacagcagcuccggcuggaccgcgggcgccgccgccuacuacgugggguaccugcagccccgcaccuuccugcucaaguacaacgagaacggcaccaucacggacgcgguggacugcgcccuggacccccugagcgagaccaagugcacccucaaguccuucaccgucgagaaggggaucuaccagacgagcaacuuccgggugcagcccaccgaguccaucgugcgcuucccgaacaucaccaaccugugccccuucggcgaggucuucaacgccacccgguucgccagcguguacgccuggaaccgcaagcggaucuccaacugcgucgcggacuacagcgugcuguacaacuccgccagcuucuccacguucaagugcuacggcgugagccccaccaagcucaacgaccugugcuucaccaacgucuacgccgacuccuucgugauccgcggggacgaggugcggcagaucgcccccggccagaccgggaagaucgccgacuacaacuacaagcugccggacgacuucacgggcugcgucaucgcguggaacagcaacaaccucgacuccaaggucgggggcaacuacaacuaccuguaccgccuguuccgcaagagcaaccucaagcccuucgagcgggacaucuccaccgagaucuaccaggccggcagcacccccugcaacgggguggagggcuucaacugcuacuucccccugcaguccuacggguuccagccgaccaacggcgugggguaccagcccuaccggguggugguccugagcuucgagcuccugcacgcccccgccacggugugcggccccaagaaguccaccaaccuggugaagaacaagugcgucaacuucaacuucaacggccucaccgggaccggcgugcugaccgagagcaacaagaaguuccugccguuccagcaguucgggcgcgacaucgccgacacgaccgacgcggugcgcgacccccagacccuggagauccucgacaucacccccugcagcuucggcggggucuccgugaucacgccgggcaccaacaccagcaaccagguggccguccuguaccagggcgugaacugcaccgaggugcccgucgccauccacgccgaccagcugacgcccaccuggcggguguacuccaccgggagcaacguguuccagacccgcgccggcugccucaucggggcggagcacgucaacaacuccuacgagugcgacauccccaucggcgccggcaucugcgccagcuaccagacgcagaccaacuccccgcggcgcgcccggagcguggcgucccagagcaucaucgccuacaccaugucccugggggccgagaacagcguggccuacuccaacaacagcaucgccauccccaccaacuucacgaucuccgucaccaccgagauccugcccgugagcaugaccaagacgagcguggacugcaccauguacaucugcggcgacuccaccgagugcagcaaccuccugcugcaguacggguccuucugcacccagcucaaccgcgcgcugacgggcaucgccgucgagcaggacaagaacacccaggagguguucgcccaggugaagcagaucuacaagacgcccccgaucaaggacuucgggggcuucaacuucagccagauccugcccgaccccuccaagcccagcaagcgguccuucaucgaggaccuccuguucaacaaggucacccuggccgacgccggcuucaucaagcaguacggggacugccucggcgacaucgcggcccgcgaccugaucugcgcccagaaguucaacgggcugaccgugcucccgccccugcugaccgacgagaugaucgcccaguacaccagcgcccuccuggcgggcaccaucacguccggguggaccuucggcgccggcgccgcccugcagauccccuucgcgaugcagauggccuaccgguucaacgggaucggcgugacccagaacguccucuacgagaaccagaagcugaucgccaaccaguucaacagcgccaucgggaagauccaggacucccugagcuccaccgccagcgcgcucggcaagcugcaggacguggugaaccagaacgcccaggcccugaacacgcucgucaagcagcuguccagcaacuucggggccaucuccagcgugcugaacgacauccucucccgccuggacccgcccgaggccgaggugcagaucgaccggcugaucaccggccgccuccagagccugcagaccuacgucacccagcagcugauccgggcggccgagauccgcgccagcgccaaccucgccgcgaccaagauguccgagugcgugcugggccagagcaagcggguggacuucugcgggaagggcuaccaccugauguccuucccccagagcgcgccccacggggucguguuccuccacgugacguacguccccgcccaggagaagaacuucaccaccgccccggccaucugccacgacggcaaggcccacuucccccgcgaggggguguucgucuccaacggcacccacugguucgugacgcagcggaacuucuacgagccccagaucaucaccaccgacaacaccuucgugagcggcaacugcgacgucgugaucgggaucgugaacaacacggucuacgacccccugcagccggagcuggacuccuucaaggaggagcucgacaaguacuucaagaaccacaccagccccgacguggaccugggcgacaucuccgggaucaacgccagcguggucaacauccagaaggagaucgaccgccugaacgagguggccaagaaccucaacgagucccugaucgaccugcaggagcucggcaaguacgagcaguacaucaaguggcccugguacaucuggcugggcuucaucgccgggcugaucgcgaucgugauggucaccaucaugcucugcugcaugaccagcugcugcuccugccugaagggcugcugcagcugcggguccugcugcaaguucgacgaggacgacagcgagccggugcugaagggcgugaagcuccacuacacgugauaauaggcuggagccucgguggccuagcuucuugccccuugggccuccccccagccccuccuccccuuccugcacccguacccccguggucuuugaauaaagucugagugggcggcaaaaaaaaaaaaaaaaaaaaaaaaaaaaaaaaaaaaaaaaaaaaaaaaaaaaaaaaaaaaaaaaaaaaaaaaaaaaaaaaaaaaaaaaaaaaaaaaaaaaucuag

SEQ ID NO: 26622 - RNA, 4100 nt, Artificial Sequence
  SARS-CoV-2/Wuhan/WIV05/2019__EPI_ISL_402128 spike protein mRNA gc (1-1273)(K986P_V987P_Y453F_D614G)
gggaaauaagagagaaaagaagaguaagaagaaauauaagaccccggcgccgccaccauguucguguuccugguccuccugccccuggugagcucccagugcgugaaccucaccacccgcacgcagcugccgcccgccuacaccaacagcuucacccggggcgucuacuaccccgacaagguguuccgcuccagcgugcugcacuccacccaggaccucuuccugcccuucuucagcaacgucacgugguuccacgccauccacguguccgggaccaacggcaccaagcgguucgacaacccggugcugcccuucaacgacggggucuacuucgcgagcaccgagaaguccaacaucauccgcggcuggaucuucgggacgacccucgacagcaagacccagucccugcugaucgugaacaacgccaccaacguggucaucaaggugugcgaguuccaguucugcaacgaccccuuccucggcguguacuaccacaagaacaacaagagcuggauggaguccgaguuccgggucuacagcuccgccaacaacugcacguucgaguacgugagccagcccuuccugauggaccuggagggcaagcaggggaacuucaagaaccuccgcgaguucguguucaagaacaucgacggcuacuucaagaucuacuccaagcacaccccgaucaaccugguccgggaccugccccagggguucagcgcccucgagccccugguggaccugcccaucggcaucaacaucacccgcuuccagacccuccuggcccugcaccgguccuaccucacgccgggggacagcagcuccggcuggaccgcgggcgccgccgccuacuacgugggguaccugcagccccgcaccuuccugcucaaguacaacgagaacggcaccaucacggacgcggucgacugcgcccuggacccccugagcgagaccaagugcacccucaaguccuucaccguggagaaggggaucuaccagacgagcaacuuccgggugcagcccaccgaguccaucguccgcuucccgaacaucaccaaccugugccccuucggcgagguguucaacgccacccgguucgccagcgucuacgccuggaaccgcaagcggaucuccaacugcguggcggacuacagcgugcuguacaacuccgccagcuucuccacguucaagugcuacggcgucagccccaccaagcucaacgaccugugcuucaccaacguguacgccgacuccuucgugauccgcggggacgagguccggcagaucgcccccggccagaccgggaagaucgccgacuacaacuacaagcugccggacgacuucacgggcugcgugaucgcguggaacagcaacaaccucgacuccaaggucgggggcaacuacaacuaccuguuccgccuguuccgcaagagcaaccucaagcccuucgagcgggacaucuccaccgagaucuaccaggccggcagcacccccugcaacgggguggagggcuucaacugcuacuucccccugcaguccuacggguuccagccgaccaacggcgugggguaccagcccuaccggguggucgugcugagcuucgagcuccugcacgcccccgccacggugugcggccccaagaaguccaccaaccuggucaagaacaagugcgugaacuucaacuucaacggccucaccgggaccggcgugcugaccgagagcaacaagaaguuccugccguuccagcaguucgggcgcgacaucgccgacacgaccgacgcgguccgcgacccccagacccuggagauccucgacaucacccccugcagcuucggcgggguguccgugaucacgccgggcaccaacaccagcaaccaggucgccgugcuguaccagggcgugaacugcaccgagguccccguggccauccacgccgaccagcugacgcccaccuggcggguguacuccaccgggagcaacgucuuccagacccgcgccggcugccucaucggggcggagcacgugaacaacuccuacgagugcgacauccccaucggcgccggcaucugcgccagcuaccagacgcagaccaacuccccgcggcgcgcccggagcguggcgucccagagcaucaucgccuacaccaugucccugggggccgagaacagcgucgccuacuccaacaacagcaucgccauccccaccaacuucacgaucuccgugaccaccgagauccugcccgugagcaugaccaagacgagcgucgacugcaccauguacaucugcggcgacuccaccgagugcagcaaccuccugcugcaguacggguccuucugcacccagcucaaccgcgcgcugacgggcaucgccguggagcaggacaagaacacccaggagguguucgcccaggucaagcagaucuacaagacgcccccgaucaaggacuucgggggcuucaacuucagccagauccugcccgaccccuccaagcccagcaagcgguccuucaucgaggaccuccuguucaacaaggugacccuggccgacgccggcuucaucaagcaguacggggacugccucggcgacaucgcggcccgcgaccugaucugcgcccagaaguucaacgggcugaccgugcucccgccccugcugaccgacgagaugaucgcccaguacaccagcgcccuccuggcgggcaccaucacguccggguggaccuucggcgccggcgccgcccugcagauccccuucgcgaugcagauggccuaccgguucaacgggaucggcgucacccagaacgugcucuacgagaaccagaagcugaucgccaaccaguucaacagcgccaucgggaagauccaggacucccugagcuccaccgccagcgcgcucggcaagcugcaggacguggucaaccagaacgcccaggcccugaacacgcucgugaagcagcuguccagcaacuucggggccaucuccagcgugcugaacgacauccucucccgccuggacccgcccgaggccgagguccagaucgaccggcugaucaccggccgccuccagagccugcagaccuacgugacccagcagcugauccgggcggccgagauccgcgccagcgccaaccucgccgcgaccaagauguccgagugcgugcugggccagagcaagcgggucgacuucugcgggaagggcuaccaccugauguccuucccccagagcgcgccccacggggugguguuccuccacgucacguacgugcccgcccaggagaagaacuucaccaccgccccggccaucugccacgacggcaaggcccacuucccccgcgagggggucuucguguccaacggcacccacugguucgugacgcagcggaacuucuacgagccccagaucaucaccaccgacaacaccuucgucagcggcaacugcgacguggugaucgggaucgucaacaacacgguguacgacccccugcagccggagcuggacuccuucaaggaggagcucgacaaguacuucaagaaccacaccagccccgacguggaccugggcgacaucuccgggaucaacgccagcgucgugaacauccagaaggagaucgaccgccugaacgagguggccaagaaccucaacgagucccugaucgaccugcaggagcucggcaaguacgagcaguacaucaaguggcccugguacaucuggcugggcuucaucgccgggcugaucgcgaucgucauggugaccaucaugcucugcugcaugaccagcugcugcuccugccugaagggcugcugcagcugcggguccugcugcaaguucgacgaggacgacagcgagccggugcugaagggcgucaagcuccacuacacgugauaauaggcuggagccucgguggccuagcuucuugccccuugggccuccccccagccccuccuccccuuccugcacccguacccccguggucuuugaauaaagucugagugggcggcaaaaaaaaaaaaaaaaaaaaaaaaaaaaaaaaaaaaaaaaaaaaaaaaaaaaaaaaaaaaaaaaaaaaaaaaaaaaaaaaaaaaaaaaaaaaaaaaaaaaucuag

SEQ ID NO: 26623 - RNA, 4100 nt, Artificial Sequence
  SARS-CoV-2/Wuhan/WIV05/2019__EPI_ISL_402128 spike protein mRNA gc (1-1273)(K986P_V987P_D614G_I692V)
gggaaauaagagagaaaagaagaguaagaagaaauauaagaccccggcgccgccaccauguucguguuccugguccuccugccccuggugagcucccagugcgugaaccucaccacccgcacgcagcugccgcccgccuacaccaacagcuucacccggggcgucuacuaccccgacaagguguuccgcuccagcgugcugcacuccacccaggaccucuuccugcccuucuucagcaacgucacgugguuccacgccauccacguguccgggaccaacggcaccaagcgguucgacaacccggugcugcccuucaacgacggggucuacuucgcgagcaccgagaaguccaacaucauccgcggcuggaucuucgggacgacccucgacagcaagacccagucccugcugaucgugaacaacgccaccaacguggucaucaaggugugcgaguuccaguucugcaacgaccccuuccucggcguguacuaccacaagaacaacaagagcuggauggaguccgaguuccgggucuacagcuccgccaacaacugcacguucgaguacgugagccagcccuuccugauggaccuggagggcaagcaggggaacuucaagaaccuccgcgaguucguguucaagaacaucgacggcuacuucaagaucuacuccaagcacaccccgaucaaccugguccgggaccugccccagggguucagcgcccucgagccccugguggaccugcccaucggcaucaacaucacccgcuuccagacccuccuggcccugcaccgguccuaccucacgccgggggacagcagcuccggcuggaccgcgggcgccgccgccuacuacgugggguaccugcagccccgcaccuuccugcucaaguacaacgagaacggcaccaucacggacgcggucgacugcgcccuggacccccugagcgagaccaagugcacccucaaguccuucaccguggagaaggggaucuaccagacgagcaacuuccgggugcagcccaccgaguccaucguccgcuucccgaacaucaccaaccugugccccuucggcgagguguucaacgccacccgguucgccagcgucuacgccuggaaccgcaagcggaucuccaacugcguggcggacuacagcgugcuguacaacuccgccagcuucuccacguucaagugcuacggcgucagccccaccaagcucaacgaccugugcuucaccaacguguacgccgacuccuucgugauccgcggggacgagguccggcagaucgcccccggccagaccgggaagaucgccgacuacaacuacaagcugccggacgacuucacgggcugcgugaucgcguggaacagcaacaaccucgacuccaaggucgggggcaacuacaacuaccuguaccgccuguuccgcaagagcaaccucaagcccuucgagcgggacaucuccaccgagaucuaccaggccggcagcacccccugcaacgggguggagggcuucaacugcuacuucccccugcaguccuacggguuccagccgaccaacggcgugggguaccagcccuaccggguggucgugcugagcuucgagcuccugcacgcccccgccacggugugcggccccaagaaguccaccaaccuggucaagaacaagugcgugaacuucaacuucaacggccucaccgggaccggcgugcugaccgagagcaacaagaaguuccugccguuccagcaguucgggcgcgacaucgccgacacgaccgacgcgguccgcgacccccagacccuggagauccucgacaucacccccugcagcuucggcgggguguccgugaucacgccgggcaccaacaccagcaaccaggucgccgugcuguaccagggcgugaacugcaccgagguccccguggccauccacgccgaccagcugacgcccaccuggcggguguacuccaccgggagcaacgucuuccagacccgcgccggcugccucaucggggcggagcacgugaacaacuccuacgagugcgacauccccaucggcgccggcaucugcgccagcuaccagacgcagaccaacuccccgcggcgcgcccggagcguggcgucccagagcgucaucgccuacaccaugucccugggggccgagaacagcguggccuacuccaacaacagcaucgccauccccaccaacuucacgaucuccgugaccaccgagauccugcccgucagcaugaccaagacgagcguggacugcaccauguacaucugcggcgacuccaccgagugcagcaaccuccugcugcaguacggguccuucugcacccagcucaaccgcgcgcugacgggcaucgccguggagcaggacaagaacacccaggaggucuucgcccaggugaagcagaucuacaagacgcccccgaucaaggacuucgggggcuucaacuucagccagauccugcccgaccccuccaagcccagcaagcgguccuucaucgaggaccuccuguucaacaaggugacccuggccgacgccggcuucaucaagcaguacggggacugccucggcgacaucgcggcccgcgaccugaucugcgcccagaaguucaacgggcugaccguccucccgccccugcugaccgacgagaugaucgcccaguacaccagcgcccuccuggcgggcaccaucacguccggguggaccuucggcgccggcgccgcccugcagauccccuucgcgaugcagauggccuaccgguucaacgggaucggcgugacccagaacgugcucuacgagaaccagaagcugaucgccaaccaguucaacagcgccaucgggaagauccaggacucccugagcuccaccgccagcgcgcucggcaagcugcaggacgucgugaaccagaacgcccaggcccugaacacgcucgugaagcagcuguccagcaacuucggggccaucuccagcguccugaacgacauccucucccgccuggacccgcccgaggccgaggugcagaucgaccggcugaucaccggccgccuccagagccugcagaccuacgugacccagcagcugauccgggcggccgagauccgcgccagcgccaaccucgccgcgaccaagauguccgagugcguccugggccagagcaagcggguggacuucugcgggaagggcuaccaccugauguccuucccccagagcgcgccccacgggguggucuuccuccacgugacguacguccccgcccaggagaagaacuucaccaccgccccggccaucugccacgacggcaaggcccacuucccccgcgaggggguguucguguccaacggcacccacugguucgucacgcagcggaacuucuacgagccccagaucaucaccaccgacaacaccuucgugagcggcaacugcgacguggucaucgggaucgugaacaacacgguguacgacccccugcagccggagcuggacuccuucaaggaggagcucgacaaguacuucaagaaccacaccagccccgacgucgaccugggcgacaucuccgggaucaacgccagcguggugaacauccagaaggagaucgaccgccugaacgaggucgccaagaaccucaacgagucccugaucgaccugcaggagcucggcaaguacgagcaguacaucaaguggcccugguacaucuggcugggcuucaucgccgggcugaucgcgaucgugauggugaccaucaugcucugcugcaugaccagcugcugcuccugccugaagggcugcugcagcugcggguccugcugcaaguucgacgaggacgacagcgagccgguccugaagggcgugaagcuccacuacacgugauaauaggcuggagccucgguggccuagcuucuugccccuugggccuccccccagccccuccuccccuuccugcacccguacccccguggucuuugaauaaagucugagugggcggcaaaaaaaaaaaaaaaaaaaaaaaaaaaaaaaaaaaaaaaaaaaaaaaaaaaaaaaaaaaaaaaaaaaaaaaaaaaaaaaaaaaaaaaaaaaaaaaaaaaaucuag

SEQ ID NO: 26624 - RNA, 4100 nt, Artificial Sequence
  SARS-CoV-2/Wuhan/WIV05/2019__EPI_ISL_402128 spike protein mRNA gc (1-1273)(K986P_V987P_D614G_M1229I)
gggaaauaagagagaaaagaagaguaagaagaaauauaagaccccggcgccgccaccauguucguguuccugguccuccugccccuggugagcucccagugcgugaaccucaccacccgcacgcagcugccgcccgccuacaccaacagcuucacccggggcgucuacuaccccgacaagguguuccgcuccagcgugcugcacuccacccaggaccucuuccugcccuucuucagcaacgucacgugguuccacgccauccacguguccgggaccaacggcaccaagcgguucgacaacccggugcugcccuucaacgacggggucuacuucgcgagcaccgagaaguccaacaucauccgcggcuggaucuucgggacgacccucgacagcaagacccagucccugcugaucgugaacaacgccaccaacguggucaucaaggugugcgaguuccaguucugcaacgaccccuuccucggcguguacuaccacaagaacaacaagagcuggauggaguccgaguuccgggucuacagcuccgccaacaacugcacguucgaguacgugagccagcccuuccugauggaccuggagggcaagcaggggaacuucaagaaccuccgcgaguucguguucaagaacaucgacggcuacuucaagaucuacuccaagcacaccccgaucaaccugguccgggaccugccccagggguucagcgcccucgagccccugguggaccugcccaucggcaucaacaucacccgcuuccagacccuccuggcccugcaccgguccuaccucacgccgggggacagcagcuccggcuggaccgcgggcgccgccgccuacuacgugggguaccugcagccccgcaccuuccugcucaaguacaacgagaacggcaccaucacggacgcggucgacugcgcccuggacccccugagcgagaccaagugcacccucaaguccuucaccguggagaaggggaucuaccagacgagcaacuuccgggugcagcccaccgaguccaucguccgcuucccgaacaucaccaaccugugccccuucggcgagguguucaacgccacccgguucgccagcgucuacgccuggaaccgcaagcggaucuccaacugcguggcggacuacagcgugcuguacaacuccgccagcuucuccacguucaagugcuacggcgucagccccaccaagcucaacgaccugugcuucaccaacguguacgccgacuccuucgugauccgcggggacgagguccggcagaucgcccccggccagaccgggaagaucgccgacuacaacuacaagcugccggacgacuucacgggcugcgugaucgcguggaacagcaacaaccucgacuccaaggucgggggcaacuacaacuaccuguaccgccuguuccgcaagagcaaccucaagcccuucgagcgggacaucuccaccgagaucuaccaggccggcagcacccccugcaacgggguggagggcuucaacugcuacuucccccugcaguccuacggguuccagccgaccaacggcgugggguaccagcccuaccggguggucgugcugagcuucgagcuccugcacgcccccgccacggugugcggccccaagaaguccaccaaccuggucaagaacaagugcgugaacuucaacuucaacggccucaccgggaccggcgugcugaccgagagcaacaagaaguuccugccguuccagcaguucgggcgcgacaucgccgacacgaccgacgcgguccgcgacccccagacccuggagauccucgacaucacccccugcagcuucggcgggguguccgugaucacgccgggcaccaacaccagcaaccaggucgccgugcuguaccagggcgugaacugcaccgagguccccguggccauccacgccgaccagcugacgcccaccuggcggguguacuccaccgggagcaacgucuuccagacccgcgccggcugccucaucggggcggagcacgugaacaacuccuacgagugcgacauccccaucggcgccggcaucugcgccagcuaccagacgcagaccaacuccccgcggcgcgcccggagcguggcgucccagagcaucaucgccuacaccaugucccugggggccgagaacagcgucgccuacuccaacaacagcaucgccauccccaccaacuucacgaucuccgugaccaccgagauccugcccgugagcaugaccaagacgagcgucgacugcaccauguacaucugcggcgacuccaccgagugcagcaaccuccugcugcaguacggguccuucugcacccagcucaaccgcgcgcugacgggcaucgccguggagcaggacaagaacacccaggagguguucgcccaggucaagcagaucuacaagacgcccccgaucaaggacuucgggggcuucaacuucagccagauccugcccgaccccuccaagcccagcaagcgguccuucaucgaggaccuccuguucaacaaggugacccuggccgacgccggcuucaucaagcaguacggggacugccucggcgacaucgcggcccgcgaccugaucugcgcccagaaguucaacgggcugaccgugcucccgccccugcugaccgacgagaugaucgcccaguacaccagcgcccuccuggcgggcaccaucacguccggguggaccuucggcgccggcgccgcccugcagauccccuucgcgaugcagauggccuaccgguucaacgggaucggcgucacccagaacgugcucuacgagaaccagaagcugaucgccaaccaguucaacagcgccaucgggaagauccaggacucccugagcuccaccgccagcgcgcucggcaagcugcaggacguggucaaccagaacgcccaggcccugaacacgcucgugaagcagcuguccagcaacuucggggccaucuccagcgugcugaacgacauccucucccgccuggacccgcccgaggccgagguccagaucgaccggcugaucaccggccgccuccagagccugcagaccuacgugacccagcagcugauccgggcggccgagauccgcgccagcgccaaccucgccgcgaccaagauguccgagugcgugcugggccagagcaagcgggucgacuucugcgggaagggcuaccaccugauguccuucccccagagcgcgccccacggggugguguuccuccacgucacguacgugcccgcccaggagaagaacuucaccaccgccccggccaucugccacgacggcaaggcccacuucccccgcgagggggucuucguguccaacggcacccacugguucgugacgcagcggaacuucuacgagccccagaucaucaccaccgacaacaccuucgucagcggcaacugcgacguggugaucgggaucgucaacaacacgguguacgacccccugcagccggagcuggacuccuucaaggaggagcucgacaaguacuucaagaaccacaccagccccgacguggaccugggcgacaucuccgggaucaacgccagcgucgugaacauccagaaggagaucgaccgccugaacgagguggccaagaaccucaacgagucccugaucgaccugcaggagcucggcaaguacgagcaguacaucaaguggcccugguacaucuggcugggcuucaucgccgggcugaucgcgaucgucaucgugaccaucaugcucugcugcaugaccagcugcugcuccugccugaagggcugcugcagcugcggguccugcugcaaguucgacgaggacgacagcgagccggugcugaagggcgucaagcuccacuacacgugauaauaggcuggagccucgguggccuagcuucuugccccuugggccuccccccagccccuccuccccuuccugcacccguacccccguggucuuugaauaaagucugagugggcggcaaaaaaaaaaaaaaaaaaaaaaaaaaaaaaaaaaaaaaaaaaaaaaaaaaaaaaaaaaaaaaaaaaaaaaaaaaaaaaaaaaaaaaaaaaaaaaaaaaaaucuag

SEQ ID NO: 26625 - RNA, 4094 nt, Artificial Sequence
  SARS-CoV-2/Wuhan/WIV05/2019__EPI_ISL_402128 spike protein mRNA gc (1-1273)(K986P_V987P_H69del_V70del_A222V_Y453F_S477N_D614G_I692V)
gggaaauaagagagaaaagaagaguaagaagaaauauaagaccccggcgccgccaccauguucguguuccugguccuccugccccuggugagcucccagugcgugaaccucaccacccgcacgcagcugccgcccgccuacaccaacagcuucacccggggcgucuacuaccccgacaagguguuccgcuccagcgugcugcacuccacccaggaccucuuccugcccuucuucagcaacgucacgugguuccacgccaucuccgggaccaacggcaccaagcgguucgacaacccggugcugcccuucaacgacgggguguacuucgcgagcaccgagaaguccaacaucauccgcggcuggaucuucgggacgacccucgacagcaagacccagucccugcugaucgucaacaacgccaccaacguggugaucaaggucugcgaguuccaguucugcaacgaccccuuccucggcguguacuaccacaagaacaacaagagcuggauggaguccgaguuccggguguacagcuccgccaacaacugcacguucgaguacgucagccagcccuuccugauggaccuggagggcaagcaggggaacuucaagaaccuccgcgaguucguguucaagaacaucgacggcuacuucaagaucuacuccaagcacaccccgaucaaccuggugcgggaccugccccagggguucagcguccucgagccccugguggaccugcccaucggcaucaacaucacccgcuuccagacccuccuggcccugcaccgguccuaccucacgccgggggacagcagcuccggcuggaccgccggcgcggccgccuacuacgugggguaccugcagccccgcaccuuccugcucaaguacaacgagaacggcaccaucacggacgccgucgacugcgcgcuggacccccugagcgagaccaagugcacccucaaguccuucaccguggagaaggggaucuaccagacgagcaacuuccgggugcagcccaccgaguccaucguccgcuucccgaacaucaccaaccugugccccuucggcgagguguucaacgccacccgguucgccagcgucuacgccuggaaccgcaagcggaucuccaacugcguggccgacuacagcgugcuguacaacuccgcgagcuucuccacguucaagugcuacggcgucagccccaccaagcucaacgaccugugcuucaccaacguguacgccgacuccuucgugauccgcggggacgagguccggcagaucgcccccggccagaccgggaagaucgccgacuacaacuacaagcugccggacgacuucacgggcugcgugaucgccuggaacagcaacaaccucgacuccaaggucgggggcaacuacaacuaccuguuccgccuguuccgcaagagcaaccucaagcccuucgagcgggacaucuccaccgagaucuaccaggcgggcaacacccccugcaacgggguggagggcuucaacugcuacuucccccugcagagcuacggguuccagccgaccaacggcgugggguaccagcccuaccggguggucgugcuguccuucgagcuccugcacgcccccgccacggugugcggccccaagaaguccaccaaccuggucaagaacaagugcgugaacuucaacuucaacggccucaccgggaccggcgugcugaccgagagcaacaagaaguuccugccguuccagcaguucgggcgcgacaucgccgacacgaccgacgccguccgcgacccccagacccuggagauccucgacaucacccccugcagcuucggcggggugagcgugaucacgccgggcaccaacaccuccaaccaggucgcggugcuguaccagggcgugaacugcaccgagguccccguggccauccacgccgaccagcugacgcccaccuggcggguguacagcaccggguccaacgucuuccagacccgcgccggcugccucaucggggccgagcacgugaacaacagcuacgagugcgacauccccaucggcgcgggcaucugcgccuccuaccagacgcagaccaacagcccgcggcgcgcccgguccguggccagccaguccgucaucgcguacaccaugagccugggggccgagaacuccguggccuacagcaacaacuccaucgccauccccaccaacuucacgaucagcgugaccaccgagauccugcccgucuccaugaccaagacgagcguggacugcaccauguacaucugcggcgacagcaccgagugcuccaaccuccugcugcaguacgggagcuucugcacccagcucaaccgcgcccugacgggcaucgcgguggagcaggacaagaacacccaggaggucuucgcccaggugaagcagaucuacaagacgcccccgaucaaggacuucgggggcuucaacuucucccagauccugcccgaccccagcaagcccuccaagcggagcuucaucgaggaccuccuguucaacaaggugacccuggccgacgccggcuucaucaagcaguacggggacugccucggcgacaucgccgcgcgcgaccugaucugcgcccagaaguucaacgggcugaccguccucccgccccugcugaccgacgagaugaucgcccaguacaccuccgcccuccuggccggcaccaucacgagcggguggaccuucggcgcgggcgccgcccugcagauccccuucgccaugcagauggcguaccgguucaacgggaucggcgugacccagaacgugcucuacgagaaccagaagcugaucgccaaccaguucaacuccgccaucgggaagauccaggacagccuguccagcaccgccuccgcccucggcaagcugcaggacgucgugaaccagaacgcgcaggcccugaacacgcucgugaagcagcugagcuccaacuucggggccaucagcuccguccugaacgacauccucagccgccuggacccgcccgaggccgaggugcagaucgaccggcugaucaccggccgccuccagucccugcagaccuacgugacccagcagcugauccgggccgcggagauccgcgccagcgccaaccucgccgccaccaagaugagcgagugcguccugggccaguccaagcggguggacuucugcgggaagggcuaccaccugaugagcuucccccaguccgcgccccacgggguggucuuccuccacgugacguacguccccgcccaggagaagaacuucaccaccgccccggccaucugccacgacggcaaggcgcacuucccccgcgaggggguguucgugagcaacggcacccacugguucgucacgcagcggaacuucuacgagccccagaucaucaccaccgacaacaccuucguguccggcaacugcgacguggucaucgggaucgugaacaacacgguguacgacccccugcagccggagcuggacagcuucaaggaggagcucgacaaguacuucaagaaccacaccucccccgacgucgaccugggcgacaucagcgggaucaacgccuccguggugaacauccagaaggagaucgaccgccugaacgaggucgccaagaaccucaacgagagccugaucgaccugcaggagcucggcaaguacgagcaguacaucaaguggcccugguacaucuggcugggcuucaucgccgggcugaucgccaucgugauggugaccaucaugcucugcugcaugaccuccugcugcagcugccugaagggcugcugcuccugcgggagcugcugcaaguucgacgaggacgacuccgagccgguccugaagggcgugaagcuccacuacacgugauaauaggcuggagccucgguggccuagcuucuugccccuugggccuccccccagccccuccuccccuuccugcacccguacccccguggucuuugaauaaagucugagugggcggcaaaaaaaaaaaaaaaaaaaaaaaaaaaaaaaaaaaaaaaaaaaaaaaaaaaaaaaaaaaaaaaaaaaaaaaaaaaaaaaaaaaaaaaaaaaaaaaaaaaaucuag

SEQ ID NO: 26626 - RNA, 4094 nt, Artificial Sequence
  SARS-CoV-2/Wuhan/WIV05/2019__EPI_ISL_402128 spike protein mRNA gc (1-1273)(K986P_V987P_H69del_V70del_Y453F_D614G_I692V_M1229I)
gggaaauaagagagaaaagaagaguaagaagaaauauaagaccccggcgccgccaccauguucguguuccugguccuccugccccuggugagcucccagugcgugaaccucaccacccgcacgcagcugccgcccgccuacaccaacagcuucacccggggcgucuacuaccccgacaagguguuccgcuccagcgugcugcacuccacccaggaccucuuccugcccuucuucagcaacgucacgugguuccacgccaucuccgggaccaacggcaccaagcgguucgacaacccggugcugcccuucaacgacgggguguacuucgcgagcaccgagaaguccaacaucauccgcggcuggaucuucgggacgacccucgacagcaagacccagucccugcugaucgucaacaacgccaccaacguggugaucaaggucugcgaguuccaguucugcaacgaccccuuccucggcguguacuaccacaagaacaacaagagcuggauggaguccgaguuccggguguacagcuccgccaacaacugcacguucgaguacgucagccagcccuuccugauggaccuggagggcaagcaggggaacuucaagaaccuccgcgaguucguguucaagaacaucgacggcuacuucaagaucuacuccaagcacaccccgaucaaccuggugcgggaccugccccagggguucagcgcccucgagccccuggucgaccugcccaucggcaucaacaucacccgcuuccagacccuccuggcccugcaccgguccuaccucacgccgggggacagcagcuccggcuggaccgcgggcgccgccgccuacuacgugggguaccugcagccccgcaccuuccugcucaaguacaacgagaacggcaccaucacggacgcgguggacugcgcccuggacccccugagcgagaccaagugcacccucaaguccuucaccgucgagaaggggaucuaccagacgagcaacuuccgggugcagcccaccgaguccaucgugcgcuucccgaacaucaccaaccugugccccuucggcgaggucuucaacgccacccgguucgccagcguguacgccuggaaccgcaagcggaucuccaacugcgucgcggacuacagcgugcuguacaacuccgccagcuucuccacguucaagugcuacggcgugagccccaccaagcucaacgaccugugcuucaccaacgucuacgccgacuccuucgugauccgcggggacgaggugcggcagaucgcccccggccagaccgggaagaucgccgacuacaacuacaagcugccggacgacuucacgggcugcgucaucgcguggaacagcaacaaccucgacuccaaggucgggggcaacuacaacuaccuguuccgccuguuccgcaagagcaaccucaagcccuucgagcgggacaucuccaccgagaucuaccaggccggcagcacccccugcaacgggguggagggcuucaacugcuacuucccccugcaguccuacggguuccagccgaccaacggcgugggguaccagcccuaccggguggugguccugagcuucgagcuccugcacgcccccgccacggugugcggccccaagaaguccaccaaccuggugaagaacaagugcgucaacuucaacuucaacggccucaccgggaccggcgugcugaccgagagcaacaagaaguuccugccguuccagcaguucgggcgcgacaucgccgacacgaccgacgcggugcgcgacccccagacccuggagauccucgacaucacccccugcagcuucggcggggucuccgugaucacgccgggcaccaacaccagcaaccagguggccguccuguaccagggcgugaacugcaccgaggugcccgucgccauccacgccgaccagcugacgcccaccuggcggguguacuccaccgggagcaacguguuccagacccgcgccggcugccucaucggggcggagcacgucaacaacuccuacgagugcgacauccccaucggcgccggcaucugcgccagcuaccagacgcagaccaacuccccgcggcgcgcccggagcguggcgucccagagcgugaucgccuacaccaugucccugggggccgagaacagcgucgccuacuccaacaacagcaucgccauccccaccaacuucacgaucuccgugaccaccgagauccugcccgugagcaugaccaagacgagcgucgacugcaccauguacaucugcggcgacuccaccgagugcagcaaccuccugcugcaguacggguccuucugcacccagcucaaccgcgcgcugacgggcaucgccguggagcaggacaagaacacccaggagguguucgcccaggucaagcagaucuacaagacgcccccgaucaaggacuucgggggcuucaacuucagccagauccugcccgaccccuccaagcccagcaagcgguccuucaucgaggaccuccuguucaacaaggugacccuggccgacgccggcuucaucaagcaguacggggacugccucggcgacaucgcggcccgcgaccugaucugcgcccagaaguucaacgggcugaccgugcucccgccccugcugaccgacgagaugaucgcccaguacaccagcgcccuccuggcgggcaccaucacguccggguggaccuucggcgccggcgccgcccugcagauccccuucgcgaugcagauggccuaccgguucaacgggaucggcgucacccagaacgugcucuacgagaaccagaagcugaucgccaaccaguucaacagcgccaucgggaagauccaggacucccugagcuccaccgccagcgcgcucggcaagcugcaggacguggucaaccagaacgcccaggcccugaacacgcucgugaagcagcuguccagcaacuucggggccaucuccagcgugcugaacgacauccucucccgccuggacccgcccgaggccgagguccagaucgaccggcugaucaccggccgccuccagagccugcagaccuacgugacccagcagcugauccgggcggccgagauccgcgccagcgccaaccucgccgcgaccaagauguccgagugcgugcugggccagagcaagcgggucgacuucugcgggaagggcuaccaccugauguccuucccccagagcgcgccccacggggugguguuccuccacgucacguacgugcccgcccaggagaagaacuucaccaccgccccggccaucugccacgacggcaaggcccacuucccccgcgagggggucuucguguccaacggcacccacugguucgugacgcagcggaacuucuacgagccccagaucaucaccaccgacaacaccuucgucagcggcaacugcgacguggugaucgggaucgucaacaacacgguguacgacccccugcagccggagcuggacuccuucaaggaggagcucgacaaguacuucaagaaccacaccagccccgacguggaccugggcgacaucuccgggaucaacgccagcgucgugaacauccagaaggagaucgaccgccugaacgagguggccaagaaccucaacgagucccugaucgaccugcaggagcucggcaaguacgagcaguacaucaaguggcccugguacaucuggcugggcuucaucgccgggcugaucgcgaucgucaucgugaccaucaugcucugcugcaugaccagcugcugcuccugccugaagggcugcugcagcugcggguccugcugcaaguucgacgaggacgacagcgagccggugcugaagggcgucaagcuccacuacacgugauaauaggcuggagccucgguggccuagcuucuugccccuugggccuccccccagccccuccuccccuuccugcacccguacccccguggucuuugaauaaagucugagugggcggcaaaaaaaaaaaaaaaaaaaaaaaaaaaaaaaaaaaaaaaaaaaaaaaaaaaaaaaaaaaaaaaaaaaaaaaaaaaaaaaaaaaaaaaaaaaaaaaaaaaaucuag

SEQ ID NO: 26627 - RNA, 4091 nt, Artificial Sequence
  SARS-CoV-2/Wuhan/WIV05/2019__EPI_ISL_402128 spike protein mRNA gc (1-1273)(K986P_V987P_K986P_V987P_H69del_V70del_Y144del_N501Y_A570 D_D614G_P681H_T716I_S982A_D1118H)
gggaaauaagagagaaaagaagaguaagaagaaauauaagaccccggcgccgccaccauguucguguuccugguccuccugccccuggugagcucccagugcgugaaccucaccacccgcacgcagcugccgcccgccuacaccaacagcuucacccggggcgucuacuaccccgacaagguguuccgcuccagcgugcugcacuccacccaggaccucuuccugcccuucuucagcaacgucacgugguuccacgccaucuccgggaccaacggcaccaagcgguucgacaacccggugcugcccuucaacgacgggguguacuucgcgagcaccgagaaguccaacaucauccgcggcuggaucuucgggacgacccucgacagcaagacccagucccugcugaucgucaacaacgccaccaacguggugaucaaggucugcgaguuccaguucugcaacgaccccuuccucggcguguaccacaagaacaacaagagcuggauggaguccgaguuccggguguacagcuccgccaacaacugcacguucgaguacgucagccagcccuuccugauggaccuggagggcaagcaggggaacuucaagaaccuccgcgaguucguguucaagaacaucgacggcuacuucaagaucuacuccaagcacaccccgaucaaccuggugcgggaccugccccagggguucagcgcccucgagccccuggucgaccugcccaucggcaucaacaucacccgcuuccagacccuccuggcccugcaccgguccuaccucacgccgggggacagcagcuccggcuggaccgcgggcgccgccgccuacuacgugggguaccugcagccccgcaccuuccugcucaaguacaacgagaacggcaccaucacggacgcgguggacugcgcccuggacccccugagcgagaccaagugcacccucaaguccuucaccgucgagaaggggaucuaccagacgagcaacuuccgggugcagcccaccgaguccaucgugcgcuucccgaacaucaccaaccugugccccuucggcgaggucuucaacgccacccgguucgccagcguguacgccuggaaccgcaagcggaucuccaacugcgucgcggacuacagcgugcuguacaacuccgccagcuucuccacguucaagugcuacggcgugagccccaccaagcucaacgaccugugcuucaccaacgucuacgccgacuccuucgugauccgcggggacgaggugcggcagaucgcccccggccagaccgggaagaucgccgacuacaacuacaagcugccggacgacuucacgggcugcgucaucgcguggaacagcaacaaccucgacuccaaggucgggggcaacuacaacuaccuguaccgccuguuccgcaagagcaaccucaagcccuucgagcgggacaucuccaccgagaucuaccaggccggcagcacccccugcaacgggguggagggcuucaacugcuacuucccccugcaguccuacggguuccagccgaccuacggcgugggguaccagcccuaccggguggugguccugagcuucgagcuccugcacgcccccgccacggugugcggccccaagaaguccaccaaccuggugaagaacaagugcgucaacuucaacuucaacggccucaccgggaccggcgugcugaccgagagcaacaagaaguuccugccguuccagcaguucgggcgcgacaucgacgacacgaccgacgccgugcgcgacccccagacccuggagauccucgacaucacccccugcagcuucggcggggucuccgugaucacgccgggcaccaacaccagcaaccagguggcgguccuguaccagggcgugaacugcaccgaggugcccgucgccauccacgccgaccagcugacgcccaccuggcggguguacuccaccgggagcaacguguuccagacccgcgccggcugccucaucggggccgagcacgucaacaacuccuacgagugcgacauccccaucggcgcgggcaucugcgccagcuaccagacgcagaccaacucccaccggcgcgcccggagcguggccucccagagcaucaucgcguacaccaugucccugggggccgagaacagcguggccuacuccaacaacagcaucgccaucccgaucaacuucaccaucuccgucacgaccgagauccugcccgugagcaugaccaagaccagcguggacugcacgauguacaucugcggcgacuccaccgagugcagcaaccuccugcugcaguacggguccuucugcacccagcucaaccgcgcccugaccggcaucgcggucgagcaggacaagaacacgcaggagguguucgcccaggugaagcagaucuacaagaccccgcccaucaaggacuucgggggcuucaacuucagccagauccugcccgaccccuccaagcccagcaagcgguccuucaucgaggaccuccuguucaacaaggucacccuggccgacgccggcuucaucaagcaguacggggacugccucggcgacaucgccgcgcgcgaccugaucugcgcccagaaguucaacgggcugaccgugcugcccccgcuccugacggacgagaugaucgcccaguacaccagcgcccuccuggccggcaccaucaccuccggguggacguucggcgcgggcgccgcccugcagauccccuucgccaugcagauggcguaccgguucaacgggaucggcgugacccagaacguccucuacgagaaccagaagcugaucgccaaccaguucaacagcgccaucgggaagauccaggacucccugagcuccaccgccagcgcccucggcaagcugcaggacguggugaaccagaacgcgcaggcccugaacacccucgucaagcagcuguccagcaacuucggggccaucuccagcgugcugaacgacauccucgcccgccuggacccgcccgaggccgaggugcagaucgaccggcugaucacgggccgccuccagucccugcagaccuacgucacccagcagcugauccgggcggccgagauccgcgccagcgccaaccucgccgcgaccaagaugagcgagugcgugcugggccaguccaagcggguggacuucugcgggaagggcuaccaccugaugagcuucccccaguccgcgccccacggggucguguuccuccacgugaccuacguccccgcccaggagaagaacuucacgaccgcccccgccaucugccacgacggcaaggcccacuucccgcgcgaggggguguucgucagcaacggcacccacugguucgugacccagcggaacuucuacgagccccagaucaucacgacccacaacaccuucguguccggcaacugcgacgucgugaucgggaucgugaacaacaccgucuacgacccccugcagcccgagcuggacagcuucaaggaggagcucgacaaguacuucaagaaccacacguccccggacguggaccugggcgacaucagcgggaucaacgccuccguggucaacauccagaaggagaucgaccgccugaacgagguggccaagaaccucaacgagagccugaucgaccugcaggagcucggcaaguacgagcaguacaucaaguggcccugguacaucuggcugggcuucaucgccgggcugaucgcgaucgugauggucaccaucaugcucugcugcaugaccuccugcugcagcugccugaagggcugcugcuccugcgggagcugcugcaaguucgacgaggacgacuccgagcccgugcugaagggcgugaagcuccacuacaccugauaauaggcuggagccucgguggccuagcuucuugccccuugggccuccccccagccccuccuccccuuccugcacccguacccccguggucuuugaauaaagucugagugggcggcaaaaaaaaaaaaaaaaaaaaaaaaaaaaaaaaaaaaaaaaaaaaaaaaaaaaaaaaaaaaaaaaaaaaaaaaaaaaaaaaaaaaaaaaaaaaaaaaaaaaucuag

SEQ ID NO: 26628 - RNA, 4100 nt, Artificial Sequence
  SARS-CoV-2/Wuhan/WIV05/2019__EPI_ISL_402128 spike protein mRNA gc (1-1273)(K986P_V987P_K986P_V987P_K417N_E484K_N501Y_D614G)
gggaaauaagagagaaaagaagaguaagaagaaauauaagaccccggcgccgccaccauguucguguuccugguccuccugccccuggugagcucccagugcgugaaccucaccacccgcacgcagcugccgcccgccuacaccaacagcuucacccggggcgucuacuaccccgacaagguguuccgcuccagcgugcugcacuccacccaggaccucuuccugcccuucuucagcaacgucacgugguuccacgccauccacguguccgggaccaacggcaccaagcgguucgacaacccggugcugcccuucaacgacggggucuacuucgcgagcaccgagaaguccaacaucauccgcggcuggaucuucgggacgacccucgacagcaagacccagucccugcugaucgugaacaacgccaccaacguggucaucaaggugugcgaguuccaguucugcaacgaccccuuccucggcguguacuaccacaagaacaacaagagcuggauggaguccgaguuccgggucuacagcuccgccaacaacugcacguucgaguacgugagccagcccuuccugauggaccuggagggcaagcaggggaacuucaagaaccuccgcgaguucguguucaagaacaucgacggcuacuucaagaucuacuccaagcacaccccgaucaaccugguccgggaccugccccagggguucagcgcccucgagccccugguggaccugcccaucggcaucaacaucacccgcuuccagacccuccuggcccugcaccgguccuaccucacgccgggggacagcagcuccggcuggaccgcgggcgccgccgccuacuacgugggguaccugcagccccgcaccuuccugcucaaguacaacgagaacggcaccaucacggacgcggucgacugcgcccuggacccccugagcgagaccaagugcacccucaaguccuucaccguggagaaggggaucuaccagacgagcaacuuccgggugcagcccaccgaguccaucguccgcuucccgaacaucaccaaccugugccccuucggcgagguguucaacgccacccgguucgccagcgucuacgccuggaaccgcaagcggaucuccaacugcguggcggacuacagcgugcuguacaacuccgccagcuucuccacguucaagugcuacggcgucagccccaccaagcucaacgaccugugcuucaccaacguguacgccgacuccuucgugauccgcggggacgagguccggcagaucgcccccggccagaccgggaacaucgccgacuacaacuacaagcugccggacgacuucacgggcugcgugaucgcguggaacagcaacaaccucgacuccaaggucgggggcaacuacaacuaccuguaccgccuguuccgcaagagcaaccucaagcccuucgagcgggacaucuccaccgagaucuaccaggccggcagcacccccugcaacggggugaagggcuucaacugcuacuucccccugcaguccuacggguuccagccgaccuacggcgugggguaccagcccuaccggguggucgugcugagcuucgagcuccugcacgcccccgccacggugugcggccccaagaaguccaccaaccuggucaagaacaagugcgugaacuucaacuucaacggccucaccgggaccggcgugcugaccgagagcaacaagaaguuccugccguuccagcaguucgggcgcgacaucgccgacacgaccgacgcgguccgcgacccccagacccuggagauccucgacaucacccccugcagcuucggcgggguguccgugaucacgccgggcaccaacaccagcaaccaggucgccgugcuguaccagggcgugaacugcaccgagguccccguggccauccacgccgaccagcugacgcccaccuggcggguguacuccaccgggagcaacgucuuccagacccgcgccggcugccucaucggggcggagcacgugaacaacuccuacgagugcgacauccccaucggcgccggcaucugcgccagcuaccagacgcagaccaacuccccgcggcgcgcccggagcguggcgucccagagcaucaucgccuacaccaugucccugggggccgagaacagcgucgccuacuccaacaacagcaucgccauccccaccaacuucacgaucuccgugaccaccgagauccugcccgugagcaugaccaagacgagcgucgacugcaccauguacaucugcggcgacuccaccgagugcagcaaccuccugcugcaguacggguccuucugcacccagcucaaccgcgcgcugacgggcaucgccguggagcaggacaagaacacccaggagguguucgcccaggucaagcagaucuacaagacgcccccgaucaaggacuucgggggcuucaacuucagccagauccugcccgaccccuccaagcccagcaagcgguccuucaucgaggaccuccuguucaacaaggugacccuggccgacgccggcuucaucaagcaguacggggacugccucggcgacaucgcggcccgcgaccugaucugcgcccagaaguucaacgggcugaccgugcucccgccccugcugaccgacgagaugaucgcccaguacaccagcgcccuccuggcgggcaccaucacguccggguggaccuucggcgccggcgccgcccugcagauccccuucgcgaugcagauggccuaccgguucaacgggaucggcgucacccagaacgugcucuacgagaaccagaagcugaucgccaaccaguucaacagcgccaucgggaagauccaggacucccugagcuccaccgccagcgcgcucggcaagcugcaggacguggucaaccagaacgcccaggcccugaacacgcucgugaagcagcuguccagcaacuucggggccaucuccagcgugcugaacgacauccucucccgccuggacccgcccgaggccgagguccagaucgaccggcugaucaccggccgccuccagagccugcagaccuacgugacccagcagcugauccgggcggccgagauccgcgccagcgccaaccucgccgcgaccaagauguccgagugcgugcugggccagagcaagcgggucgacuucugcgggaagggcuaccaccugauguccuucccccagagcgcgccccacggggugguguuccuccacgucacguacgugcccgcccaggagaagaacuucaccaccgccccggccaucugccacgacggcaaggcccacuucccccgcgagggggucuucguguccaacggcacccacugguucgugacgcagcggaacuucuacgagccccagaucaucaccaccgacaacaccuucgucagcggcaacugcgacguggugaucgggaucgucaacaacacgguguacgacccccugcagccggagcuggacuccuucaaggaggagcucgacaaguacuucaagaaccacaccagccccgacguggaccugggcgacaucuccgggaucaacgccagcgucgugaacauccagaaggagaucgaccgccugaacgagguggccaagaaccucaacgagucccugaucgaccugcaggagcucggcaaguacgagcaguacaucaaguggcccugguacaucuggcugggcuucaucgccgggcugaucgcgaucgucauggugaccaucaugcucugcugcaugaccagcugcugcuccugccugaagggcugcugcagcugcggguccugcugcaaguucgacgaggacgacagcgagccggugcugaagggcgucaagcuccacuacacgugauaauaggcuggagccucgguggccuagcuucuugccccuugggccuccccccagccccuccuccccuuccugcacccguacccccguggucuuugaauaaagucugagugggcggcaaaaaaaaaaaaaaaaaaaaaaaaaaaaaaaaaaaaaaaaaaaaaaaaaaaaaaaaaaaaaaaaaaaaaaaaaaaaaaaaaaaaaaaaaaaaaaaaaaaaucuag

SEQ ID NO: 26629 - RNA, 4091 nt, Artificial Sequence
  SARS-CoV-2/Wuhan/WIV05/2019__EPI_ISL_402128 spike protein mRNA gc (1-1273)(K986P_V987P_K986P_V987P_L18F_D80A_D215G_L242del_A243del_ L244del_R246I_K417N_E484K_N501Y_D614G_A701V)
gggaaauaagagagaaaagaagaguaagaagaaauauaagaccccggcgccgccaccauguucguguuccugguccuccugccccuggugagcucccagugcgugaacuucaccacccgcacgcagcucccgcccgccuacaccaacagcuucacccggggcgucuacuaccccgacaagguguuccgcuccagcgugcugcacuccacccaggaccuguuccuccccuucuucagcaacgucacgugguuccacgccauccacguguccgggaccaacggcaccaagcgguucgcgaacccggugcugcccuucaacgacggggucuacuucgccagcaccgagaaguccaacaucauccgcggcuggaucuucgggacgacccuggacagcaagacccagucccuccugaucgugaacaacgccaccaacguggucaucaaggugugcgaguuccaguucugcaacgaccccuuccugggcguguacuaccacaagaacaacaagagcuggauggaguccgaguuccgggucuacagcuccgccaacaacugcacguucgaguacgugagccagcccuuccucauggaccuggagggcaagcaggggaacuucaagaaccugcgcgaguucguguucaagaacaucgacggcuacuucaagaucuacuccaagcacaccccgaucaaccucguccgggggcugccccagggcuucagcgcccuggagccccucguggaccugcccaucgggaucaacaucacccgcuuccagacccugcacaucuccuaccucacgccgggcgacagcagcuccggcuggaccgcgggggccgccgccuacuacgugggcuaccugcagccccggaccuuccugcucaaguacaacgagaacgggaccaucacggacgcggucgacugcgcccuggacccccugagcgagaccaagugcacccucaaguccuucaccguggagaagggcaucuaccagacgagcaacuuccgcgugcagcccaccgaguccaucguccgguucccgaacaucaccaaccugugccccuucggcgagguguucaacgccacccgcuucgccagcgucuacgccuggaaccggaagcgcaucuccaacugcguggcggacuacagcgugcuguacaacuccgccagcuucuccacguucaagugcuacggggucagccccaccaagcucaacgaccugugcuucaccaacguguacgccgacuccuucgugauccggggcgacgagguccgccagaucgcccccgggcagaccggcaacaucgccgacuacaacuacaagcugccggacgacuucacggggugcgugaucgcguggaacagcaacaaccucgacuccaaggugggcggcaacuacaacuaccuguaccggcuguuccgcaagagcaaccucaagcccuucgagcgggacaucuccaccgagaucuaccaggccgggagcacccccugcaacggcgucaagggguucaacugcuacuucccccugcaguccuacggcuuccagccgaccuacggggugggcuaccagcccuaccgcguggucgugcugagcuucgagcuccugcacgcccccgccacggugugcggccccaagaaguccaccaaccuggucaagaacaagugcgugaacuucaacuucaacgggcucaccggcaccggggugcugaccgagagcaacaagaaguuccugccguuccagcaguucggccgggacaucgccgacacgaccgacgcgguccgcgacccccagacccucgagauccuggacaucacccccugcagcuucgggggcguguccgugaucacgccgggcaccaacaccagcaaccaggucgccgugcuguaccagggggugaacugcaccgagguccccguggccauccacgccgaccagcugacgcccaccuggcgcguguacuccaccggcagcaacgucuuccagacccgggccgggugccucaucggcgcggagcacgugaacaacuccuacgagugcgacauccccaucggcgccgggaucugcgccagcuaccagacgcagaccaacuccccgcgccgggcccgcagcguggcgucccagagcaucaucgccuacaccaugucccugggcgucgagaacagcguggccuacuccaacaacagcaucgccauccccaccaacuucacgaucuccgugaccaccgagauccugcccgucagcaugaccaagacgagcguggacugcaccauguacaucugcggggacuccaccgagugcagcaaccuccugcugcaguacggcuccuucugcacccagcucaaccgggcccugacggggaucgcgguggagcaggacaagaacacccaggaggucuucgcccaggugaagcagaucuacaagacgcccccgaucaaggacuucggcggcuucaacuucagccagauccugcccgaccccuccaagcccagcaagcgcuccuucaucgaggaccuccuguucaacaaggugacccuggccgacgccggguucaucaagcaguacggcgacugccucggggacaucgccgcgcgggaccugaucugcgcccagaaguucaacggccugaccguccucccgccccugcugaccgacgagaugaucgcccaguacaccagcgcccuccuggccgggaccaucacguccggcuggaccuucggcgcgggggccgcccugcagauccccuucgccaugcagauggcguaccgcuucaacggcaucggggugacccagaacgugcucuacgagaaccagaagcugaucgccaaccaguucaacagcgccaucggcaagauccaggacucccugagcuccaccgccagcgcccucgggaagcugcaggacgucgugaaccagaacgcgcaggcccugaacacgcucgugaagcagcuguccagcaacuucggcgccaucuccagcguccugaacgacauccucucccggcuggacccgcccgaggccgaggugcagaucgaccgccugaucaccggccggcuccagagccugcagaccuacgugacccagcagcugauccgcgccgcggagauccgggccagcgccaaccucgccgccaccaagauguccgagugcguccuggggcagagcaagcgcguggacuucugcggcaagggguaccaccugauguccuucccccagagcgcgccccacggcguggucuuccuccacgugacguacguccccgcccaggagaagaacuucaccaccgccccggccaucugccacgacgggaaggcgcacuucccccgggagggcguguucguguccaacggcacccacugguucgucacgcagcgcaacuucuacgagccccagaucaucaccaccgacaacaccuucgugagcgggaacugcgacguggucaucggcaucgugaacaacacgguguacgacccccugcagccggagcuggacuccuucaaggaggagcucgacaaguacuucaagaaccacaccagccccgacgucgaccugggggacaucuccggcaucaacgccagcguggugaacauccagaaggagaucgaccggcugaacgaggucgccaagaaccucaacgagucccugaucgaccugcaggagcucggcaaguacgagcaguacaucaaguggcccugguacaucuggcugggguucaucgccggccugaucgccaucgugauggugaccaucaugcucugcugcaugaccagcugcugcuccugccugaaggggugcugcagcugcggcuccugcugcaaguucgacgaggacgacagcgagccgguccugaagggggugaagcuccacuacacgugauaauaggcuggagccucgguggccuagcuucuugccccuugggccuccccccagccccuccuccccuuccugcacccguacccccguggucuuugaauaaagucugagugggcggcaaaaaaaaaaaaaaaaaaaaaaaaaaaaaaaaaaaaaaaaaaaaaaaaaaaaaaaaaaaaaaaaaaaaaaaaaaaaaaaaaaaaaaaaaaaaaaaaaaaaucuag

SEQ ID NO: 26630 - RNA, 4100 nt, Artificial Sequence
  SARS-CoV-2/Wuhan/WIV05/2019__EPI_ISL_402128 spike protein mRNA gc (1-1273)(K986P_V987P_K986P_V987P_E484K_D614G)
gggaaauaagagagaaaagaagaguaagaagaaauauaagaccccggcgccgccaccauguucguguuccugguccuccugccccuggugagcucccagugcgugaaccucaccacccgcacgcagcugccgcccgccuacaccaacagcuucacccggggcgucuacuaccccgacaagguguuccgcuccagcgugcugcacuccacccaggaccucuuccugcccuucuucagcaacgucacgugguuccacgccauccacguguccgggaccaacggcaccaagcgguucgacaacccggugcugcccuucaacgacggggucuacuucgcgagcaccgagaaguccaacaucauccgcggcuggaucuucgggacgacccucgacagcaagacccagucccugcugaucgugaacaacgccaccaacguggucaucaaggugugcgaguuccaguucugcaacgaccccuuccucggcguguacuaccacaagaacaacaagagcuggauggaguccgaguuccgggucuacagcuccgccaacaacugcacguucgaguacgugagccagcccuuccugauggaccuggagggcaagcaggggaacuucaagaaccuccgcgaguucguguucaagaacaucgacggcuacuucaagaucuacuccaagcacaccccgaucaaccugguccgggaccugccccagggguucagcgcccucgagccccugguggaccugcccaucggcaucaacaucacccgcuuccagacccuccuggcccugcaccgguccuaccucacgccgggggacagcagcuccggcuggaccgcgggcgccgccgccuacuacgugggguaccugcagccccgcaccuuccugcucaaguacaacgagaacggcaccaucacggacgcggucgacugcgcccuggacccccugagcgagaccaagugcacccucaaguccuucaccguggagaaggggaucuaccagacgagcaacuuccgggugcagcccaccgaguccaucguccgcuucccgaacaucaccaaccugugccccuucggcgagguguucaacgccacccgguucgccagcgucuacgccuggaaccgcaagcggaucuccaacugcguggcggacuacagcgugcuguacaacuccgccagcuucuccacguucaagugcuacggcgucagccccaccaagcucaacgaccugugcuucaccaacguguacgccgacuccuucgugauccgcggggacgagguccggcagaucgcccccggccagaccgggaagaucgccgacuacaacuacaagcugccggacgacuucacgggcugcgugaucgcguggaacagcaacaaccucgacuccaaggucgggggcaacuacaacuaccuguaccgccuguuccgcaagagcaaccucaagcccuucgagcgggacaucuccaccgagaucuaccaggccggcagcacccccugcaacggggugaagggcuucaacugcuacuucccccugcaguccuacggguuccagccgaccaacggcgugggguaccagcccuaccggguggucgugcugagcuucgagcuccugcacgcccccgccacggugugcggccccaagaaguccaccaaccuggucaagaacaagugcgugaacuucaacuucaacggccucaccgggaccggcgugcugaccgagagcaacaagaaguuccugccguuccagcaguucgggcgcgacaucgccgacacgaccgacgcgguccgcgacccccagacccuggagauccucgacaucacccccugcagcuucggcgggguguccgugaucacgccgggcaccaacaccagcaaccaggucgccgugcuguaccagggcgugaacugcaccgagguccccguggccauccacgccgaccagcugacgcccaccuggcggguguacuccaccgggagcaacgucuuccagacccgcgccggcugccucaucggggcggagcacgugaacaacuccuacgagugcgacauccccaucggcgccggcaucugcgccagcuaccagacgcagaccaacuccccgcggcgcgcccggagcguggcgucccagagcaucaucgccuacaccaugucccugggggccgagaacagcgucgccuacuccaacaacagcaucgccauccccaccaacuucacgaucuccgugaccaccgagauccugcccgugagcaugaccaagacgagcgucgacugcaccauguacaucugcggcgacuccaccgagugcagcaaccuccugcugcaguacggguccuucugcacccagcucaaccgcgcgcugacgggcaucgccguggagcaggacaagaacacccaggagguguucgcccaggucaagcagaucuacaagacgcccccgaucaaggacuucgggggcuucaacuucagccagauccugcccgaccccuccaagcccagcaagcgguccuucaucgaggaccuccuguucaacaaggugacccuggccgacgccggcuucaucaagcaguacggggacugccucggcgacaucgcggcccgcgaccugaucugcgcccagaaguucaacgggcugaccgugcucccgccccugcugaccgacgagaugaucgcccaguacaccagcgcccuccuggcgggcaccaucacguccggguggaccuucggcgccggcgccgcccugcagauccccuucgcgaugcagauggccuaccgguucaacgggaucggcgucacccagaacgugcucuacgagaaccagaagcugaucgccaaccaguucaacagcgccaucgggaagauccaggacucccugagcuccaccgccagcgcgcucggcaagcugcaggacguggucaaccagaacgcccaggcccugaacacgcucgugaagcagcuguccagcaacuucggggccaucuccagcgugcugaacgacauccucucccgccuggacccgcccgaggccgagguccagaucgaccggcugaucaccggccgccuccagagccugcagaccuacgugacccagcagcugauccgggcggccgagauccgcgccagcgccaaccucgccgcgaccaagauguccgagugcgugcugggccagagcaagcgggucgacuucugcgggaagggcuaccaccugauguccuucccccagagcgcgccccacggggugguguuccuccacgucacguacgugcccgcccaggagaagaacuucaccaccgccccggccaucugccacgacggcaaggcccacuucccccgcgagggggucuucguguccaacggcacccacugguucgugacgcagcggaacuucuacgagccccagaucaucaccaccgacaacaccuucgucagcggcaacugcgacguggugaucgggaucgucaacaacacgguguacgacccccugcagccggagcuggacuccuucaaggaggagcucgacaaguacuucaagaaccacaccagccccgacguggaccugggcgacaucuccgggaucaacgccagcgucgugaacauccagaaggagaucgaccgccugaacgagguggccaagaaccucaacgagucccugaucgaccugcaggagcucggcaaguacgagcaguacaucaaguggcccugguacaucuggcugggcuucaucgccgggcugaucgcgaucgucauggugaccaucaugcucugcugcaugaccagcugcugcuccugccugaagggcugcugcagcugcggguccugcugcaaguucgacgaggacgacagcgagccggugcugaagggcgucaagcuccacuacacgugauaauaggcuggagccucgguggccuagcuucuugccccuugggccuccccccagccccuccuccccuuccugcacccguacccccguggucuuugaauaaagucugagugggcggcaaaaaaaaaaaaaaaaaaaaaaaaaaaaaaaaaaaaaaaaaaaaaaaaaaaaaaaaaaaaaaaaaaaaaaaaaaaaaaaaaaaaaaaaaaaaaaaaaaaaucuag

SEQ ID NO: 26631 - RNA, 4100 nt, Artificial Sequence
  SARS-CoV-2/Wuhan/WIV05/2019__EPI_ISL_402128 spike protein mRNA gc (1-1273)(K986P_V987P_K986P_V987P_L18F_T20N_P26S_D138Y_R190S_K417T _E484K_N501Y_D614G_H655Y_T1027I)
gggaaauaagagagaaaagaagaguaagaagaaauauaagaccccggcgccgccaccauguucguguuccugguccuccugccccuggugagcucccagugcgugaacuucaccaaccgcacccagcucccgagcgccuacacgaacuccuucacccggggcgucuacuaccccgacaagguguuccgcagcuccgugcugcacagcacccaggaccuguuccuccccuucuucuccaacgucaccugguuccacgccauccacgugagcgggacgaacggcaccaagcgguucgacaaccccgugcugccguucaacgacggggucuacuucgcguccaccgagaaguccaacaucauccgcggcuggaucuucgggaccacgcuggacuccaagacccagagccuccugaucgugaacaacgccaccaacguggucaucaaggugugcgaguuccaguucugcaacuaccccuuccugggcguguacuaccacaagaacaacaaguccuggauggagagcgaguuccgggucuacuccagcgccaacaacugcaccuucgaguacgugucccagcccuuccucauggaccuggagggcaagcaggggaacuucaagaaccugagcgaguucguguucaagaacaucgacggcuacuucaagaucuacuccaagcacacgcccaucaaccucguccgcgaccugccgcagggguucagcgcccuggagccccucguggaccugcccaucggcaucaacaucacccgguuccagacccugcucgcccugcaccgcagcuaccugacccccggggacuccagcuccggcuggacggcgggcgccgccgccuacuacgugggguaccuccagccgcggaccuuccugcugaaguacaacgagaacggcaccaucaccgacgcggucgacugcgcccucgacccccugagcgagacgaagugcacccugaaguccuucaccguggagaaggggaucuaccagaccagcaacuuccgcgugcagcccacggaguccaucguccgguuccccaacaucaccaaccucugcccguucggcgagguguucaacgccacccgcuucgccagcgucuacgccuggaaccggaagcgcaucuccaacugcguggcggacuacagcgugcuguacaacuccgccagcuucuccaccuucaagugcuacggcgucagccccacgaagcugaacgaccucugcuucaccaacguguacgccgacuccuucgugauccgcggggacgagguccggcagaucgcccccggccagaccgggaccaucgccgacuacaacuacaagcugcccgacgacuucacgggcugcgugaucgcguggaacagcaacaaccuggacuccaaggucgggggcaacuacaacuaccucuaccggcuguuccgcaagagcaaccugaagccguucgagcgggacaucuccaccgagaucuaccaggccggcagcacccccugcaacggggugaagggcuucaacugcuacuucccccuccagagcuacggguuccagcccaccuacggcgugggguaccagccguaccgcguggucgugcuguccuucgagcugcuccacgcccccgccacggugugcggccccaagaaguccaccaaccuggucaagaacaagugcgugaacuucaacuucaacggccugaccgggaccggcgugcucaccgagagcaacaagaaguuccugcccuuccagcaguucgggcgggacaucgccgacacgaccgacgcgguccgcgacccgcagacccuggagauccuggacaucacccccugcagcuucggcgggguguccgugaucacgcccggcaccaacaccagcaaccaggucgccgugcucuaccagggcgugaacugcaccgaggucccgguggccauccacgccgaccagcugacgcccaccuggcgcguguacuccaccgggagcaacgucuuccagacccgggccggcugccugaucggggcggaguacgugaacaacuccuacgagugcgacauccccaucggcgccggcaucugcgccagcuaccagacgcagaccaacagcccccgccgggcccgcagcguggcgucccagagcaucaucgccuacaccaugucccucggggccgagaacagcgucgccuacuccaacaacagcaucgccaucccgaccaacuucacgaucagcgugaccaccgagauccugcccguguccaugaccaagacgagcgucgacugcaccauguacaucugcggcgacuccaccgagugcagcaaccugcuccugcaguacggguccuucugcacccagcugaaccgggcgcucacgggcaucgccguggagcaggacaagaacacccaggagguguucgcccaggucaagcagaucuacaagaccccgcccaucaaggacuucgggggcuucaacuucagccagauccugcccgaccccuccaagcccagcaagcgcuccuucaucgaggaccuccuguucaacaaggugacccuggccgacgccggcuucaucaagcaguacggggacugccugggcgacaucgcggcccgggaccucaucugcgcccagaaguucaacgggcugacggugcugcccccgcuccugaccgacgagaugaucgcccaguacaccagcgcccugcucgcgggcaccaucacguccggguggaccuucggcgccggcgccgcccugcagauccccuucgcgaugcagauggccuaccgcuucaacgggaucggcgucacccagaacgugcuguacgagaaccagaagcucaucgccaaccaguucaacagcgccaucgggaagauccaggacucccugagcuccaccgccagcgcgcugggcaagcuccaggacguggucaaccagaacgcccaggcccugaacacgcuggugaagcagcucuccagcaacuucggggccaucuccagcgugcugaacgacauccugagccggcucgacccgcccgaggccgagguccagaucgaccgccugaucaccggccggcugcagucccuccagaccuacgugacccagcagcugauccgcgcggccgagauccgggccagcgccaaccuggccgcgaucaagauguccgagugcgugcucggccagagcaagcgcgucgacuucugcgggaagggcuaccaccugauguccuucccccagagcgcgccccacggggugguguuccugcacgucaccuacgugcccgcccaggagaagaacuucacgaccgcccccgccaucugccacgacggcaaggcccacuucccgcgggagggggucuucguguccaacggcacccacugguucgugacccagcgcaacuucuacgagccccagaucaucacgaccgacaacaccuucgucagcggcaacugcgacguggugaucgggaucgucaacaacaccguguacgacccccuccagcccgagcuggacuccuucaaggaggagcuggacaaguacuucaagaaccacacgagcccggacguggaccucggcgacaucuccgggaucaacgccagcgucgugaacauccagaaggagaucgaccggcugaacgagguggccaagaaccugaacgagucccucaucgaccugcaggagcugggcaaguacgagcaguacaucaaguggcccugguacaucuggcucggcuucaucgccgggcugaucgcgaucgucauggugaccaucaugcugugcugcaugaccagcugcugcuccugccucaagggcugcugcagcugcggguccugcugcaaguucgacgaggacgacagcgagcccgugcugaagggcgucaagcugcacuacaccugauaauaggcuggagccucgguggccuagcuucuugccccuugggccuccccccagccccuccuccccuuccugcacccguacccccguggucuuugaauaaagucugagugggcggcaaaaaaaaaaaaaaaaaaaaaaaaaaaaaaaaaaaaaaaaaaaaaaaaaaaaaaaaaaaaaaaaaaaaaaaaaaaaaaaaaaaaaaaaaaaaaaaaaaaaucuag

SEQ ID NO: 26632 - RNA, 4100 nt, Artificial Sequence
  SARS-CoV-2/Wuhan/WIV05/2019__EPI_ISL_402128 spike protein mRNA gc (1-1273)(K986P_V987P_K986P_V987P_S13I_W152C_L452R_D614G)
gggaaauaagagagaaaagaagaguaagaagaaauauaagaccccggcgccgccaccauguucguguuccugguccuccugccccuggugagcauccagugcgugaaccucaccacccgcacgcagcugccgcccgccuacaccaacuccuucacccggggcgucuacuaccccgacaagguguuccgcagcuccgugcugcacagcacccaggaccucuuccugcccuucuucuccaacgucacgugguuccacgccauccacgugagcgggaccaacggcaccaagcgguucgacaacccggugcugcccuucaacgacggggucuacuucgcguccaccgagaaguccaacaucauccgcggcuggaucuucgggacgacccucgacagcaagacccagagccugcugaucgugaacaacgccaccaacguggucaucaaggugugcgaguuccaguucugcaacgaccccuuccucggcguguacuaccacaagaacaacaaguccugcauggagagcgaguuccgggucuacuccagcgccaacaacugcacguucgaguacgugucccagcccuuccugauggaccuggagggcaagcaggggaacuucaagaaccuccgcgaguucguguucaagaacaucgacggcuacuucaagaucuacagcaagcacaccccgaucaaccugguccgggaccugccccagggguucuccgcccucgagccccugguggaccugcccaucggcaucaacaucacccgcuuccagacccuccuggcccugcaccggagcuaccucacgccgggggacuccagcagcggcuggaccgcgggcgccgccgccuacuacgugggguaccugcagccccgcaccuuccugcucaaguacaacgagaacggcaccaucacggacgcggucgacugcgcccuggacccccuguccgagaccaagugcacccucaagagcuucaccguggagaaggggaucuaccagacguccaacuuccgggugcagcccaccgagagcaucguccgcuucccgaacaucaccaaccugugccccuucggcgagguguucaacgccacccgguucgccuccgucuacgccuggaaccgcaagcggaucagcaacugcguggcggacuacuccgugcuguacaacagcgccuccuucagcacguucaagugcuacggcgucucccccaccaagcucaacgaccugugcuucaccaacguguacgccgacagcuucgugauccgcggggacgagguccggcagaucgcccccggccagaccgggaagaucgccgacuacaacuacaagcugccggacgacuucacgggcugcgugaucgcguggaacuccaacaaccucgacagcaaggucgggggcaacuacaacuaccgcuaccggcuguuccgcaaguccaaccugaagcccuucgagcgggacaucagcaccgagaucuaccaggccggcuccacccccugcaacgggguggagggcuucaacugcuacuucccccuccagagcuacggguuccagccgaccaacggcgugggguaccagcccuaccgcguggucgugcuguccuucgagcugcuccacgcccccgccacggugugcggccccaagaaguccaccaaccuggucaagaacaagugcgugaacuucaacuucaacggccugaccgggaccggcgugcucaccgagagcaacaagaaguuccugccguuccagcaguucgggcgcgacaucgccgacacgaccgacgcgguccgggacccccagacccuggagauccuggacaucacccccugcagcuucggcggggugagcgugaucacgccgggcaccaacaccuccaaccaggucgccgugcucuaccagggcgugaacugcaccgagguccccguggccauccacgccgaccagcugacgcccaccuggcgcguguacagcaccggguccaacgucuuccagacccgggccggcugccugaucggggcggagcacgugaacaacagcuacgagugcgacauccccaucggcgccggcaucugcgccuccuaccagacgcagaccaacagcccgcgccgggcccgcuccguggcgagccaguccaucaucgccuacaccaugagccucggggccgagaacuccgucgccuacagcaacaacuccaucgccauccccaccaacuucacgaucagcgugaccaccgagauccugcccguguccaugaccaagacgagcgucgacugcaccauguacaucugcggcgacagcaccgagugcuccaaccugcuccugcaguacgggagcuucugcacccagcugaaccgggcgcucacgggcaucgccguggagcaggacaagaacacccaggagguguucgcccaggucaagcagaucuacaagacgcccccgaucaaggacuucgggggcuucaacuucucccagauccugcccgaccccagcaagcccuccaagcgcagcuucaucgaggaccuccuguucaacaaggugacccuggccgacgccggcuucaucaagcaguacggggacugccugggcgacaucgcggcccgggaccucaucugcgcccagaaguucaacgggcugaccgugcugccgccccuccugaccgacgagaugaucgcccaguacaccuccgcccugcucgcgggcaccaucacgagcggguggaccuucggcgccggcgccgcccugcagauccccuucgcgaugcagauggccuaccgcuucaacgggaucggcgucacccagaacgugcuguacgagaaccagaagcucaucgccaaccaguucaacuccgccaucgggaagauccaggacagccuguccagcaccgccuccgcgcugggcaagcuccaggacguggucaaccagaacgcccaggcccugaacacgcuggugaagcagcucagcuccaacuucggggccaucagcuccgugcugaacgacauccugagccggcucgacccgcccgaggccgagguccagaucgaccgccugaucaccggccggcugcagucccuccagaccuacgugacccagcagcugauccgcgcggccgagauccgggccagcgccaaccuggccgcgaccaagaugagcgagugcgugcucggccaguccaagcgcgucgacuucugcgggaagggcuaccaccugaugagcuucccccaguccgcgccccacggggugguguuccugcacgucacguacgugcccgcccaggagaagaacuucaccaccgccccggccaucugccacgacggcaaggcccacuucccccgggagggggucuucgugagcaacggcacccacugguucgugacgcagcgcaacuucuacgagccccagaucaucaccaccgacaacaccuucgucuccggcaacugcgacguggugaucgggaucgucaacaacacgguguacgacccccuccagccggagcuggacagcuucaaggaggagcuggacaaguacuucaagaaccacaccucccccgacguggaccucggcgacaucagcgggaucaacgccuccgucgugaacauccagaaggagaucgaccggcugaacgagguggccaagaaccugaacgagagccucaucgaccugcaggagcugggcaaguacgagcaguacaucaaguggcccugguacaucuggcucggcuucaucgccgggcugaucgcgaucgucauggugaccaucaugcugugcugcaugaccuccugcugcagcugccucaagggcugcugcuccugcgggagcugcugcaaguucgacgaggacgacuccgagccggugcugaagggcgucaagcugcacuacacgugauaauaggcuggagccucgguggccuagcuucuugccccuugggccuccccccagccccuccuccccuuccugcacccguacccccguggucuuugaauaaagucugagugggcggcaaaaaaaaaaaaaaaaaaaaaaaaaaaaaaaaaaaaaaaaaaaaaaaaaaaaaaaaaaaaaaaaaaaaaaaaaaaaaaaaaaaaaaaaaaaaaaaaaaaaucuag

SEQ ID NO: 26633 - RNA, 4100 nt, Artificial Sequence
  SARS-CoV-2/Wuhan/WIV05/2019__EPI_ISL_402128 spike protein mRNA gc (1-1273)(K986P_V987P)
gggaaauaagagagaaaagaagaguaagaagaaauauaagaccccggcgccgccaccauguucguguuccuggugcugcugccccuggugagcagccagugcgugaaccugaccacccggacccagcugccaccagccuacaccaacagcuucacccggggcgucuacuaccccgacaagguguuccggagcagcguccugcacagcacccaggaccuguuccugcccuucuucagcaacgugaccugguuccacgccauccacgugagcggcaccaacggcaccaagcgguucgacaaccccgugcugcccuucaacgacggcguguacuucgccagcaccgagaagagcaacaucauccggggcuggaucuucggcaccacccuggacagcaagacccagagccugcugaucgugaauaacgccaccaacguggugaucaaggugugcgaguuccaguucugcaacgaccccuuccugggcguguacuaccacaagaacaacaagagcuggauggagagcgaguuccggguguacagcagcgccaacaacugcaccuucgaguacgugagccagcccuuccugauggaccuggagggcaagcagggcaacuucaagaaccugcgggaguucguguucaagaacaucgacggcuacuucaagaucuacagcaagcacaccccaaucaaccuggugcgggaucugccccagggcuucucagcccuggagccccugguggaccugcccaucggcaucaacaucacccgguuccagacccugcuggcccugcaccggagcuaccugaccccaggcgacagcagcagcggguggacagcaggcgcggcugcuuacuacgugggcuaccugcagccccggaccuuccugcugaaguacaacgagaacggcaccaucaccgacgccguggacugcgcccuggacccucugagcgagaccaagugcacccugaagagcuucaccguggagaagggcaucuaccagaccagcaacuuccgggugcagcccaccgagagcaucgugcgguuccccaacaucaccaaccugugccccuucggcgagguguucaacgccacccgguucgccagcguguacgccuggaaccggaagcggaucagcaacugcguggccgacuacagcgugcuguacaacagcgccagcuucagcaccuucaagugcuacggcgugagccccaccaagcugaacgaccugugcuucaccaacguguacgccgacagcuucgugauccguggcgacgaggugcggcagaucgcacccggccagacaggcaagaucgccgacuacaacuacaagcugcccgacgacuucaccggcugcgugaucgccuggaacagcaacaaccucgacagcaaggugggcggcaacuacaacuaccuguaccggcuguuccggaagagcaaccugaagcccuucgagcgggacaucagcaccgagaucuaccaagccggcuccaccccuugcaacggcguggagggcuucaacugcuacuucccucugcagagcuacggcuuccagcccaccaacggcgugggcuaccagcccuaccgggugguggugcugagcuucgagcugcugcacgccccagccaccguguguggccccaagaagagcaccaaccuggugaagaacaagugcgugaacuucaacuucaacggccuuaccggcaccggcgugcugaccgagagcaacaagaaauuccugcccuuucagcaguucggccgggacaucgccgacaccaccgacgcugugcgggauccccagacccuggagauccuggacaucaccccuugcagcuucggcggcgugagcgugaucaccccaggcaccaacaccagcaaccagguggccgugcuguaccaggacgugaacugcaccgaggugcccguggccauccacgccgaccagcugacacccaccuggcgggucuacagcaccggcagcaacguguuccagacccgggccgguugccugaucggcgccgagcacgugaacaacagcuacgagugcgacauccccaucggcgccggcaucugugccagcuaccagacccagaccaauucaccccggagggcaaggagcguggccagccagagcaucaucgccuacaccaugagccugggcgccgagaacagcguggccuacagcaacaacagcaucgccauccccaccaacuucaccaucagcgugaccaccgagauucugcccgugagcaugaccaagaccagcguggacugcaccauguacaucugcggcgacagcaccgagugcagcaaccugcugcugcaguacggcagcuucugcacccagcugaaccgggcccugaccggcaucgccguggagcaggacaagaacacccaggagguguucgcccaggugaagcagaucuacaagaccccucccaucaaggacuucggcggcuucaacuucagccagauccugcccgaccccagcaagcccagcaagcggagcuucaucgaggaccugcuguucaacaaggugacccuagccgacgccggcuucaucaagcaguacggcgacugccucggcgacauagccgcccgggaccugaucugcgcccagaaguucaacggccugaccgugcugccuccccugcugaccgacgagaugaucgcccaguacaccagcgcccuguuagccggaaccaucaccagcggcuggacuuucggcgcuggagccgcucugcagauccccuucgccaugcagauggccuaccgguucaacggcaucggcgugacccagaacgugcuguacgagaaccagaagcugaucgccaaccaguucaacagcgccaucggcaagauccaggacagccugagcagcaccgcuagcgcccugggcaagcugcaggacguggugaaccagaacgcccaggcccugaacacccuggugaagcagcugagcagcaacuucggcgccaucagcagcgugcugaacgacauccugagccggcuggacccucccgaggccgaggugcagaucgaccggcugaucacuggccggcugcagagccugcagaccuacgugacccagcagcugauccgggccgccgagauucgggccagcgccaaccuggccgccaccaagaugagcgagugcgugcugggccagagcaagcggguggacuucugcggcaagggcuaccaccugaugagcuuuccccagagcgcaccccacggagugguguuccugcacgugaccuacgugcccgcccaggagaagaacuucaccaccgccccagccaucugccacgacggcaaggcccacuuuccccgggagggcguguucgugagcaacggcacccacugguucgugacccagcggaacuucuacgagccccagaucaucaccaccgacaacaccuucgugagcggcaacugcgacguggugaucggcaucgugaacaacaccguguacgauccccugcagcccgagcuggacagcuucaaggaggagcuggacaaguacuucaagaaucacaccagccccgacguggaccugggcgacaucagcggcaucaacgccagcguggugaacauccagaaggagaucgaucggcugaacgagguggccaagaaccugaacgagagccugaucgaccugcaggagcugggcaaguacgagcaguacaucaaguggcccugguacaucuggcugggcuucaucgccggccugaucgccaucgugauggugaccaucaugcugugcugcaugaccagcugcugcagcugccugaagggcuguugcagcugcggcagcugcugcaaguucgacgaggacgacagcgagcccgugcugaagggcgugaagcugcacuacaccugauaauaggcuggagccucgguggccuagcuucuugccccuugggccuccccccagccccuccuccccuuccugcacccguacccccguggucuuugaauaaagucugagugggcggcaaaaaaaaaaaaaaaaaaaaaaaaaaaaaaaaaaaaaaaaaaaaaaaaaaaaaaaaaaaaaaaaaaaaaaaaaaaaaaaaaaaaaaaaaaaaaaaaaaaaucuag

SEQ ID NO: 26634 - RNA, 4100 nt, Artificial Sequence
  SARS-CoV-2/Wuhan/WIV05/2019__EPI_ISL_402128 spike protein mRNA gc (1-1273)(K986P_V987P_ D614G)
gggaaauaagagagaaaagaagaguaagaagaaauauaagaccccggcgccgccaccauguucguguuccuggugcugcugccccuggugagcagccagugcgugaaccugaccacccggacccagcugccaccagccuacaccaacagcuucacccggggcgucuacuaccccgacaagguguuccggagcagcguccugcacagcacccaggaccuguuccugcccuucuucagcaacgugaccugguuccacgccauccacgugagcggcaccaacggcaccaagcgguucgacaaccccgugcugcccuucaacgacggcguguacuucgccagcaccgagaagagcaacaucauccggggcuggaucuucggcaccacccuggacagcaagacccagagccugcugaucgugaauaacgccaccaacguggugaucaaggugugcgaguuccaguucugcaacgaccccuuccugggcguguacuaccacaagaacaacaagagcuggauggagagcgaguuccggguguacagcagcgccaacaacugcaccuucgaguacgugagccagcccuuccugauggaccuggagggcaagcagggcaacuucaagaaccugcgggaguucguguucaagaacaucgacggcuacuucaagaucuacagcaagcacaccccaaucaaccuggugcgggaucugccccagggcuucucagcccuggagccccugguggaccugcccaucggcaucaacaucacccgguuccagacccugcuggcccugcaccggagcuaccugaccccaggcgacagcagcagcggguggacagcaggcgcggcugcuuacuacgugggcuaccugcagccccggaccuuccugcugaaguacaacgagaacggcaccaucaccgacgccguggacugcgcccuggacccucugagcgagaccaagugcacccugaagagcuucaccguggagaagggcaucuaccagaccagcaacuuccgggugcagcccaccgagagcaucgugcgguuccccaacaucaccaaccugugccccuucggcgagguguucaacgccacccgguucgccagcguguacgccuggaaccggaagcggaucagcaacugcguggccgacuacagcgugcuguacaacagcgccagcuucagcaccuucaagugcuacggcgugagccccaccaagcugaacgaccugugcuucaccaacguguacgccgacagcuucgugauccguggcgacgaggugcggcagaucgcacccggccagacaggcaagaucgccgacuacaacuacaagcugcccgacgacuucaccggcugcgugaucgccuggaacagcaacaaccucgacagcaaggugggcggcaacuacaacuaccuguaccggcuguuccggaagagcaaccugaagcccuucgagcgggacaucagcaccgagaucuaccaagccggcuccaccccuugcaacggcguggagggcuucaacugcuacuucccucugcagagcuacggcuuccagcccaccaacggcgugggcuaccagcccuaccgggugguggugcugagcuucgagcugcugcacgccccagccaccguguguggccccaagaagagcaccaaccuggugaagaacaagugcgugaacuucaacuucaacggccuuaccggcaccggcgugcugaccgagagcaacaagaaauuccugcccuuucagcaguucggccgggacaucgccgacaccaccgacgcugugcgggauccccagacccuggagauccuggacaucaccccuugcagcuucggcggcgugagcgugaucaccccaggcaccaacaccagcaaccagguggccgugcuguaccagggcgugaacugcaccgaggugcccguggccauccacgccgaccagcugacacccaccuggcgggucuacagcaccggcagcaacguguuccagacccgggccgguugccugaucggcgccgagcacgugaacaacagcuacgagugcgacauccccaucggcgccggcaucugugccagcuaccagacccagaccaauucaccccggagggcaaggagcguggccagccagagcaucaucgccuacaccaugagccugggcgccgagaacagcguggccuacagcaacaacagcaucgccauccccaccaacuucaccaucagcgugaccaccgagauucugcccgugagcaugaccaagaccagcguggacugcaccauguacaucugcggcgacagcaccgagugcagcaaccugcugcugcaguacggcagcuucugcacccagcugaaccgggcccugaccggcaucgccguggagcaggacaagaacacccaggagguguucgcccaggugaagcagaucuacaagaccccucccaucaaggacuucggcggcuucaacuucagccagauccugcccgaccccagcaagcccagcaagcggagcuucaucgaggaccugcuguucaacaaggugacccuagccgacgccggcuucaucaagcaguacggcgacugccucggcgacauagccgcccgggaccugaucugcgcccagaaguucaacggccugaccgugcugccuccccugcugaccgacgagaugaucgcccaguacaccagcgcccuguuagccggaaccaucaccagcggcuggacuuucggcgcuggagccgcucugcagauccccuucgccaugcagauggccuaccgguucaacggcaucggcgugacccagaacgugcuguacgagaaccagaagcugaucgccaaccaguucaacagcgccaucggcaagauccaggacagccugagcagcaccgcuagcgcccugggcaagcugcaggacguggugaaccagaacgcccaggcccugaacacccuggugaagcagcugagcagcaacuucggcgccaucagcagcgugcugaacgacauccugagccggcuggacccucccgaggccgaggugcagaucgaccggcugaucacuggccggcugcagagccugcagaccuacgugacccagcagcugauccgggccgccgagauucgggccagcgccaaccuggccgccaccaagaugagcgagugcgugcugggccagagcaagcggguggacuucugcggcaagggcuaccaccugaugagcuuuccccagagcgcaccccacggagugguguuccugcacgugaccuacgugcccgcccaggagaagaacuucaccaccgccccagccaucugccacgacggcaaggcccacuuuccccgggagggcguguucgugagcaacggcacccacugguucgugacccagcggaacuucuacgagccccagaucaucaccaccgacaacaccuucgugagcggcaacugcgacguggugaucggcaucgugaacaacaccguguacgauccccugcagcccgagcuggacagcuucaaggaggagcuggacaaguacuucaagaaucacaccagccccgacguggaccugggcgacaucagcggcaucaacgccagcguggugaacauccagaaggagaucgaucggcugaacgagguggccaagaaccugaacgagagccugaucgaccugcaggagcugggcaaguacgagcaguacaucaaguggcccugguacaucuggcugggcuucaucgccggccugaucgccaucgugauggugaccaucaugcugugcugcaugaccagcugcugcagcugccugaagggcuguugcagcugcggcagcugcugcaaguucgacgaggacgacagcgagcccgugcugaagggcgugaagcugcacuacaccugauaauaggcuggagccucgguggccuagcuucuugccccuugggccuccccccagccccuccuccccuuccugcacccguacccccguggucuuugaauaaagucugagugggcggcaaaaaaaaaaaaaaaaaaaaaaaaaaaaaaaaaaaaaaaaaaaaaaaaaaaaaaaaaaaaaaaaaaaaaaaaaaaaaaaaaaaaaaaaaaaaaaaaaaaaucuag

SEQ ID NO: 26635 - RNA, 4100 nt, Artificial Sequence
  SARS-CoV-2/Wuhan/WIV05/2019__EPI_ISL_402128 spike protein mRNA gc (1-1273)(K986P_V987P_A222V_D614G)
gggaaauaagagagaaaagaagaguaagaagaaauauaagaccccggcgccgccaccauguucguguuccuggugcugcugccccuggugagcagccagugcgugaaccugaccacccggacccagcugccaccagccuacaccaacagcuucacccggggcgucuacuaccccgacaagguguuccggagcagcguccugcacagcacccaggaccuguuccugcccuucuucagcaacgugaccugguuccacgccauccacgugagcggcaccaacggcaccaagcgguucgacaaccccgugcugcccuucaacgacggcguguacuucgccagcaccgagaagagcaacaucauccggggcuggaucuucggcaccacccuggacagcaagacccagagccugcugaucgugaauaacgccaccaacguggugaucaaggugugcgaguuccaguucugcaacgaccccuuccugggcguguacuaccacaagaacaacaagagcuggauggagagcgaguuccggguguacagcagcgccaacaacugcaccuucgaguacgugagccagcccuuccugauggaccuggagggcaagcagggcaacuucaagaaccugcgggaguucguguucaagaacaucgacggcuacuucaagaucuacagcaagcacaccccaaucaaccuggugcgggaucugccccagggcuucucagugcuggagccccugguggaccugcccaucggcaucaacaucacccgguuccagacccugcuggcccugcaccggagcuaccugaccccaggcgacagcagcagcggguggacagcaggcgcggcugcuuacuacgugggcuaccugcagccccggaccuuccugcugaaguacaacgagaacggcaccaucaccgacgccguggacugcgcccuggacccucugagcgagaccaagugcacccugaagagcuucaccguggagaagggcaucuaccagaccagcaacuuccgggugcagcccaccgagagcaucgugcgguuccccaacaucaccaaccugugccccuucggcgagguguucaacgccacccgguucgccagcguguacgccuggaaccggaagcggaucagcaacugcguggccgacuacagcgugcuguacaacagcgccagcuucagcaccuucaagugcuacggcgugagccccaccaagcugaacgaccugugcuucaccaacguguacgccgacagcuucgugauccguggcgacgaggugcggcagaucgcacccggccagacaggcaagaucgccgacuacaacuacaagcugcccgacgacuucaccggcugcgugaucgccuggaacagcaacaaccucgacagcaaggugggcggcaacuacaacuaccuguaccggcuguuccggaagagcaaccugaagcccuucgagcgggacaucagcaccgagaucuaccaagccggcuccaccccuugcaacggcguggagggcuucaacugcuacuucccucugcagagcuacggcuuccagcccaccaacggcgugggcuaccagcccuaccgggugguggugcugagcuucgagcugcugcacgccccagccaccguguguggccccaagaagagcaccaaccuggugaagaacaagugcgugaacuucaacuucaacggccuuaccggcaccggcgugcugaccgagagcaacaagaaauuccugcccuuucagcaguucggccgggacaucgccgacaccaccgacgcugugcgggauccccagacccuggagauccuggacaucaccccuugcagcuucggcggcgugagcgugaucaccccaggcaccaacaccagcaaccagguggccgugcuguaccagggcgugaacugcaccgaggugcccguggccauccacgccgaccagcugacacccaccuggcgggucuacagcaccggcagcaacguguuccagacccgggccgguugccugaucggcgccgagcacgugaacaacagcuacgagugcgacauccccaucggcgccggcaucugugccagcuaccagacccagaccaauucaccccggagggcaaggagcguggccagccagagcaucaucgccuacaccaugagccugggcgccgagaacagcguggccuacagcaacaacagcaucgccauccccaccaacuucaccaucagcgugaccaccgagauucugcccgugagcaugaccaagaccagcguggacugcaccauguacaucugcggcgacagcaccgagugcagcaaccugcugcugcaguacggcagcuucugcacccagcugaaccgggcccugaccggcaucgccguggagcaggacaagaacacccaggagguguucgcccaggugaagcagaucuacaagaccccucccaucaaggacuucggcggcuucaacuucagccagauccugcccgaccccagcaagcccagcaagcggagcuucaucgaggaccugcuguucaacaaggugacccuagccgacgccggcuucaucaagcaguacggcgacugccucggcgacauagccgcccgggaccugaucugcgcccagaaguucaacggccugaccgugcugccuccccugcugaccgacgagaugaucgcccaguacaccagcgcccuguuagccggaaccaucaccagcggcuggacuuucggcgcuggagccgcucugcagauccccuucgccaugcagauggccuaccgguucaacggcaucggcgugacccagaacgugcuguacgagaaccagaagcugaucgccaaccaguucaacagcgccaucggcaagauccaggacagccugagcagcaccgcuagcgcccugggcaagcugcaggacguggugaaccagaacgcccaggcccugaacacccuggugaagcagcugagcagcaacuucggcgccaucagcagcgugcugaacgacauccugagccggcuggacccucccgaggccgaggugcagaucgaccggcugaucacuggccggcugcagagccugcagaccuacgugacccagcagcugauccgggccgccgagauucgggccagcgccaaccuggccgccaccaagaugagcgagugcgugcugggccagagcaagcggguggacuucugcggcaagggcuaccaccugaugagcuuuccccagagcgcaccccacggagugguguuccugcacgugaccuacgugcccgcccaggagaagaacuucaccaccgccccagccaucugccacgacggcaaggcccacuuuccccgggagggcguguucgugagcaacggcacccacugguucgugacccagcggaacuucuacgagccccagaucaucaccaccgacaacaccuucgugagcggcaacugcgacguggugaucggcaucgugaacaacaccguguacgauccccugcagcccgagcuggacagcuucaaggaggagcuggacaaguacuucaagaaucacaccagccccgacguggaccugggcgacaucagcggcaucaacgccagcguggugaacauccagaaggagaucgaucggcugaacgagguggccaagaaccugaacgagagccugaucgaccugcaggagcugggcaaguacgagcaguacaucaaguggcccugguacaucuggcugggcuucaucgccggccugaucgccaucgugauggugaccaucaugcugugcugcaugaccagcugcugcagcugccugaagggcuguugcagcugcggcagcugcugcaaguucgacgaggacgacagcgagcccgugcugaagggcgugaagcugcacuacaccugauaauaggcuggagccucgguggccuagcuucuugccccuugggccuccccccagccccuccuccccuuccugcacccguacccccguggucuuugaauaaagucugagugggcggcaaaaaaaaaaaaaaaaaaaaaaaaaaaaaaaaaaaaaaaaaaaaaaaaaaaaaaaaaaaaaaaaaaaaaaaaaaaaaaaaaaaaaaaaaaaaaaaaaaaaucuag

SEQ ID NO: 26636 - RNA, 4100 nt, Artificial Sequence
  SARS-CoV-2/Wuhan/WIV05/2019__EPI_ISL_402128 spike protein mRNA gc (1-1273)(K986P_V987P_N439K_D614G)
gggaaauaagagagaaaagaagaguaagaagaaauauaagaccccggcgccgccaccauguucguguuccuggugcugcugccccuggugagcagccagugcgugaaccugaccacccggacccagcugccaccagccuacaccaacagcuucacccggggcgucuacuaccccgacaagguguuccggagcagcguccugcacagcacccaggaccuguuccugcccuucuucagcaacgugaccugguuccacgccauccacgugagcggcaccaacggcaccaagcgguucgacaaccccgugcugcccuucaacgacggcguguacuucgccagcaccgagaagagcaacaucauccggggcuggaucuucggcaccacccuggacagcaagacccagagccugcugaucgugaauaacgccaccaacguggugaucaaggugugcgaguuccaguucugcaacgaccccuuccugggcguguacuaccacaagaacaacaagagcuggauggagagcgaguuccggguguacagcagcgccaacaacugcaccuucgaguacgugagccagcccuuccugauggaccuggagggcaagcagggcaacuucaagaaccugcgggaguucguguucaagaacaucgacggcuacuucaagaucuacagcaagcacaccccaaucaaccuggugcgggaucugccccagggcuucucagcccuggagccccugguggaccugcccaucggcaucaacaucacccgguuccagacccugcuggcccugcaccggagcuaccugaccccaggcgacagcagcagcggguggacagcaggcgcggcugcuuacuacgugggcuaccugcagccccggaccuuccugcugaaguacaacgagaacggcaccaucaccgacgccguggacugcgcccuggacccucugagcgagaccaagugcacccugaagagcuucaccguggagaagggcaucuaccagaccagcaacuuccgggugcagcccaccgagagcaucgugcgguuccccaacaucaccaaccugugccccuucggcgagguguucaacgccacccgguucgccagcguguacgccuggaaccggaagcggaucagcaacugcguggccgacuacagcgugcuguacaacagcgccagcuucagcaccuucaagugcuacggcgugagccccaccaagcugaacgaccugugcuucaccaacguguacgccgacagcuucgugauccguggcgacgaggugcggcagaucgcacccggccagacaggcaagaucgccgacuacaacuacaagcugcccgacgacuucaccggcugcgugaucgccuggaacagcaagaaccucgacagcaaggugggcggcaacuacaacuaccuguaccggcuguuccggaagagcaaccugaagcccuucgagcgggacaucagcaccgagaucuaccaagccggcuccaccccuugcaacggcguggagggcuucaacugcuacuucccucugcagagcuacggcuuccagcccaccaacggcgugggcuaccagcccuaccgggugguggugcugagcuucgagcugcugcacgccccagccaccguguguggccccaagaagagcaccaaccuggugaagaacaagugcgugaacuucaacuucaacggccuuaccggcaccggcgugcugaccgagagcaacaagaaauuccugcccuuucagcaguucggccgggacaucgccgacaccaccgacgcugugcgggauccccagacccuggagauccuggacaucaccccuugcagcuucggcggcgugagcgugaucaccccaggcaccaacaccagcaaccagguggccgugcuguaccagggcgugaacugcaccgaggugcccguggccauccacgccgaccagcugacacccaccuggcgggucuacagcaccggcagcaacguguuccagacccgggccgguugccugaucggcgccgagcacgugaacaacagcuacgagugcgacauccccaucggcgccggcaucugugccagcuaccagacccagaccaauucaccccggagggcaaggagcguggccagccagagcaucaucgccuacaccaugagccugggcgccgagaacagcguggccuacagcaacaacagcaucgccauccccaccaacuucaccaucagcgugaccaccgagauucugcccgugagcaugaccaagaccagcguggacugcaccauguacaucugcggcgacagcaccgagugcagcaaccugcugcugcaguacggcagcuucugcacccagcugaaccgggcccugaccggcaucgccguggagcaggacaagaacacccaggagguguucgcccaggugaagcagaucuacaagaccccucccaucaaggacuucggcggcuucaacuucagccagauccugcccgaccccagcaagcccagcaagcggagcuucaucgaggaccugcuguucaacaaggugacccuagccgacgccggcuucaucaagcaguacggcgacugccucggcgacauagccgcccgggaccugaucugcgcccagaaguucaacggccugaccgugcugccuccccugcugaccgacgagaugaucgcccaguacaccagcgcccuguuagccggaaccaucaccagcggcuggacuuucggcgcuggagccgcucugcagauccccuucgccaugcagauggccuaccgguucaacggcaucggcgugacccagaacgugcuguacgagaaccagaagcugaucgccaaccaguucaacagcgccaucggcaagauccaggacagccugagcagcaccgcuagcgcccugggcaagcugcaggacguggugaaccagaacgcccaggcccugaacacccuggugaagcagcugagcagcaacuucggcgccaucagcagcgugcugaacgacauccugagccggcuggacccucccgaggccgaggugcagaucgaccggcugaucacuggccggcugcagagccugcagaccuacgugacccagcagcugauccgggccgccgagauucgggccagcgccaaccuggccgccaccaagaugagcgagugcgugcugggccagagcaagcggguggacuucugcggcaagggcuaccaccugaugagcuuuccccagagcgcaccccacggagugguguuccugcacgugaccuacgugcccgcccaggagaagaacuucaccaccgccccagccaucugccacgacggcaaggcccacuuuccccgggagggcguguucgugagcaacggcacccacugguucgugacccagcggaacuucuacgagccccagaucaucaccaccgacaacaccuucgugagcggcaacugcgacguggugaucggcaucgugaacaacaccguguacgauccccugcagcccgagcuggacagcuucaaggaggagcuggacaaguacuucaagaaucacaccagccccgacguggaccugggcgacaucagcggcaucaacgccagcguggugaacauccagaaggagaucgaucggcugaacgagguggccaagaaccugaacgagagccugaucgaccugcaggagcugggcaaguacgagcaguacaucaaguggcccugguacaucuggcugggcuucaucgccggccugaucgccaucgugauggugaccaucaugcugugcugcaugaccagcugcugcagcugccugaagggcuguugcagcugcggcagcugcugcaaguucgacgaggacgacagcgagcccgugcugaagggcgugaagcugcacuacaccugauaauaggcuggagccucgguggccuagcuucuugccccuugggccuccccccagccccuccuccccuuccugcacccguacccccguggucuuugaauaaagucugagugggcggcaaaaaaaaaaaaaaaaaaaaaaaaaaaaaaaaaaaaaaaaaaaaaaaaaaaaaaaaaaaaaaaaaaaaaaaaaaaaaaaaaaaaaaaaaaaaaaaaaaaaucuag

SEQ ID NO: 26637 - RNA, 4100 nt, Artificial Sequence
  SARS-CoV-2/Wuhan/WIV05/2019__EPI_ISL_402128 spike protein mRNA gc (1-1273)(K986P_V987P_S477N_D614G)
gggaaauaagagagaaaagaagaguaagaagaaauauaagaccccggcgccgccaccauguucguguuccuggugcugcugccccuggugagcagccagugcgugaaccugaccacccggacccagcugccaccagccuacaccaacagcuucacccggggcgucuacuaccccgacaagguguuccggagcagcguccugcacagcacccaggaccuguuccugcccuucuucagcaacgugaccugguuccacgccauccacgugagcggcaccaacggcaccaagcgguucgacaaccccgugcugcccuucaacgacggcguguacuucgccagcaccgagaagagcaacaucauccggggcuggaucuucggcaccacccuggacagcaagacccagagccugcugaucgugaauaacgccaccaacguggugaucaaggugugcgaguuccaguucugcaacgaccccuuccugggcguguacuaccacaagaacaacaagagcuggauggagagcgaguuccggguguacagcagcgccaacaacugcaccuucgaguacgugagccagcccuuccugauggaccuggagggcaagcagggcaacuucaagaaccugcgggaguucguguucaagaacaucgacggcuacuucaagaucuacagcaagcacaccccaaucaaccuggugcgggaucugccccagggcuucucagcccuggagccccugguggaccugcccaucggcaucaacaucacccgguuccagacccugcuggcccugcaccggagcuaccugaccccaggcgacagcagcagcggguggacagcaggcgcggcugcuuacuacgugggcuaccugcagccccggaccuuccugcugaaguacaacgagaacggcaccaucaccgacgccguggacugcgcccuggacccucugagcgagaccaagugcacccugaagagcuucaccguggagaagggcaucuaccagaccagcaacuuccgggugcagcccaccgagagcaucgugcgguuccccaacaucaccaaccugugccccuucggcgagguguucaacgccacccgguucgccagcguguacgccuggaaccggaagcggaucagcaacugcguggccgacuacagcgugcuguacaacagcgccagcuucagcaccuucaagugcuacggcgugagccccaccaagcugaacgaccugugcuucaccaacguguacgccgacagcuucgugauccguggcgacgaggugcggcagaucgcacccggccagacaggcaagaucgccgacuacaacuacaagcugcccgacgacuucaccggcugcgugaucgccuggaacagcaacaaccucgacagcaaggugggcggcaacuacaacuaccuguaccggcuguuccggaagagcaaccugaagcccuucgagcgggacaucagcaccgagaucuaccaagccggcaacaccccuugcaacggcguggagggcuucaacugcuacuucccucugcagagcuacggcuuccagcccaccaacggcgugggcuaccagcccuaccgggugguggugcugagcuucgagcugcugcacgccccagccaccguguguggccccaagaagagcaccaaccuggugaagaacaagugcgugaacuucaacuucaacggccuuaccggcaccggcgugcugaccgagagcaacaagaaauuccugcccuuucagcaguucggccgggacaucgccgacaccaccgacgcugugcgggauccccagacccuggagauccuggacaucaccccuugcagcuucggcggcgugagcgugaucaccccaggcaccaacaccagcaaccagguggccgugcuguaccagggcgugaacugcaccgaggugcccguggccauccacgccgaccagcugacacccaccuggcgggucuacagcaccggcagcaacguguuccagacccgggccgguugccugaucggcgccgagcacgugaacaacagcuacgagugcgacauccccaucggcgccggcaucugugccagcuaccagacccagaccaauucaccccggagggcaaggagcguggccagccagagcaucaucgccuacaccaugagccugggcgccgagaacagcguggccuacagcaacaacagcaucgccauccccaccaacuucaccaucagcgugaccaccgagauucugcccgugagcaugaccaagaccagcguggacugcaccauguacaucugcggcgacagcaccgagugcagcaaccugcugcugcaguacggcagcuucugcacccagcugaaccgggcccugaccggcaucgccguggagcaggacaagaacacccaggagguguucgcccaggugaagcagaucuacaagaccccucccaucaaggacuucggcggcuucaacuucagccagauccugcccgaccccagcaagcccagcaagcggagcuucaucgaggaccugcuguucaacaaggugacccuagccgacgccggcuucaucaagcaguacggcgacugccucggcgacauagccgcccgggaccugaucugcgcccagaaguucaacggccugaccgugcugccuccccugcugaccgacgagaugaucgcccaguacaccagcgcccuguuagccggaaccaucaccagcggcuggacuuucggcgcuggagccgcucugcagauccccuucgccaugcagauggccuaccgguucaacggcaucggcgugacccagaacgugcuguacgagaaccagaagcugaucgccaaccaguucaacagcgccaucggcaagauccaggacagccugagcagcaccgcuagcgcccugggcaagcugcaggacguggugaaccagaacgcccaggcccugaacacccuggugaagcagcugagcagcaacuucggcgccaucagcagcgugcugaacgacauccugagccggcuggacccucccgaggccgaggugcagaucgaccggcugaucacuggccggcugcagagccugcagaccuacgugacccagcagcugauccgggccgccgagauucgggccagcgccaaccuggccgccaccaagaugagcgagugcgugcugggccagagcaagcggguggacuucugcggcaagggcuaccaccugaugagcuuuccccagagcgcaccccacggagugguguuccugcacgugaccuacgugcccgcccaggagaagaacuucaccaccgccccagccaucugccacgacggcaaggcccacuuuccccgggagggcguguucgugagcaacggcacccacugguucgugacccagcggaacuucuacgagccccagaucaucaccaccgacaacaccuucgugagcggcaacugcgacguggugaucggcaucgugaacaacaccguguacgauccccugcagcccgagcuggacagcuucaaggaggagcuggacaaguacuucaagaaucacaccagccccgacguggaccugggcgacaucagcggcaucaacgccagcguggugaacauccagaaggagaucgaucggcugaacgagguggccaagaaccugaacgagagccugaucgaccugcaggagcugggcaaguacgagcaguacaucaaguggcccugguacaucuggcugggcuucaucgccggccugaucgccaucgugauggugaccaucaugcugugcugcaugaccagcugcugcagcugccugaagggcuguugcagcugcggcagcugcugcaaguucgacgaggacgacagcgagcccgugcugaagggcgugaagcugcacuacaccugauaauaggcuggagccucgguggccuagcuucuugccccuugggccuccccccagccccuccuccccuuccugcacccguacccccguggucuuugaauaaagucugagugggcggcaaaaaaaaaaaaaaaaaaaaaaaaaaaaaaaaaaaaaaaaaaaaaaaaaaaaaaaaaaaaaaaaaaaaaaaaaaaaaaaaaaaaaaaaaaaaaaaaaaaaucuag

SEQ ID NO: 26638 - RNA, 4100 nt, Artificial Sequence
  SARS-CoV-2/Wuhan/WIV05/2019__EPI_ISL_402128 spike protein mRNA gc (1-1273)(K986P_V987P_N501Y_D614G)
gggaaauaagagagaaaagaagaguaagaagaaauauaagaccccggcgccgccaccauguucguguuccuggugcugcugccccuggugagcagccagugcgugaaccugaccacccggacccagcugccaccagccuacaccaacagcuucacccggggcgucuacuaccccgacaagguguuccggagcagcguccugcacagcacccaggaccuguuccugcccuucuucagcaacgugaccugguuccacgccauccacgugagcggcaccaacggcaccaagcgguucgacaaccccgugcugcccuucaacgacggcguguacuucgccagcaccgagaagagcaacaucauccggggcuggaucuucggcaccacccuggacagcaagacccagagccugcugaucgugaauaacgccaccaacguggugaucaaggugugcgaguuccaguucugcaacgaccccuuccugggcguguacuaccacaagaacaacaagagcuggauggagagcgaguuccggguguacagcagcgccaacaacugcaccuucgaguacgugagccagcccuuccugauggaccuggagggcaagcagggcaacuucaagaaccugcgggaguucguguucaagaacaucgacggcuacuucaagaucuacagcaagcacaccccaaucaaccuggugcgggaucugccccagggcuucucagcccuggagccccugguggaccugcccaucggcaucaacaucacccgguuccagacccugcuggcccugcaccggagcuaccugaccccaggcgacagcagcagcggguggacagcaggcgcggcugcuuacuacgugggcuaccugcagccccggaccuuccugcugaaguacaacgagaacggcaccaucaccgacgccguggacugcgcccuggacccucugagcgagaccaagugcacccugaagagcuucaccguggagaagggcaucuaccagaccagcaacuuccgggugcagcccaccgagagcaucgugcgguuccccaacaucaccaaccugugccccuucggcgagguguucaacgccacccgguucgccagcguguacgccuggaaccggaagcggaucagcaacugcguggccgacuacagcgugcuguacaacagcgccagcuucagcaccuucaagugcuacggcgugagccccaccaagcugaacgaccugugcuucaccaacguguacgccgacagcuucgugauccguggcgacgaggugcggcagaucgcacccggccagacaggcaagaucgccgacuacaacuacaagcugcccgacgacuucaccggcugcgugaucgccuggaacagcaacaaccucgacagcaaggugggcggcaacuacaacuaccuguaccggcuguuccggaagagcaaccugaagcccuucgagcgggacaucagcaccgagaucuaccaagccggcuccaccccuugcaacggcguggagggcuucaacugcuacuucccucugcagagcuacggcuuccagcccaccuacggcgugggcuaccagcccuaccgggugguggugcugagcuucgagcugcugcacgccccagccaccguguguggccccaagaagagcaccaaccuggugaagaacaagugcgugaacuucaacuucaacggccuuaccggcaccggcgugcugaccgagagcaacaagaaauuccugcccuuucagcaguucggccgggacaucgccgacaccaccgacgcugugcgggauccccagacccuggagauccuggacaucaccccuugcagcuucggcggcgugagcgugaucaccccaggcaccaacaccagcaaccagguggccgugcuguaccagggcgugaacugcaccgaggugcccguggccauccacgccgaccagcugacacccaccuggcgggucuacagcaccggcagcaacguguuccagacccgggccgguugccugaucggcgccgagcacgugaacaacagcuacgagugcgacauccccaucggcgccggcaucugugccagcuaccagacccagaccaauucaccccggagggcaaggagcguggccagccagagcaucaucgccuacaccaugagccugggcgccgagaacagcguggccuacagcaacaacagcaucgccauccccaccaacuucaccaucagcgugaccaccgagauucugcccgugagcaugaccaagaccagcguggacugcaccauguacaucugcggcgacagcaccgagugcagcaaccugcugcugcaguacggcagcuucugcacccagcugaaccgggcccugaccggcaucgccguggagcaggacaagaacacccaggagguguucgcccaggugaagcagaucuacaagaccccucccaucaaggacuucggcggcuucaacuucagccagauccugcccgaccccagcaagcccagcaagcggagcuucaucgaggaccugcuguucaacaaggugacccuagccgacgccggcuucaucaagcaguacggcgacugccucggcgacauagccgcccgggaccugaucugcgcccagaaguucaacggccugaccgugcugccuccccugcugaccgacgagaugaucgcccaguacaccagcgcccuguuagccggaaccaucaccagcggcuggacuuucggcgcuggagccgcucugcagauccccuucgccaugcagauggccuaccgguucaacggcaucggcgugacccagaacgugcuguacgagaaccagaagcugaucgccaaccaguucaacagcgccaucggcaagauccaggacagccugagcagcaccgcuagcgcccugggcaagcugcaggacguggugaaccagaacgcccaggcccugaacacccuggugaagcagcugagcagcaacuucggcgccaucagcagcgugcugaacgacauccugagccggcuggacccucccgaggccgaggugcagaucgaccggcugaucacuggccggcugcagagccugcagaccuacgugacccagcagcugauccgggccgccgagauucgggccagcgccaaccuggccgccaccaagaugagcgagugcgugcugggccagagcaagcggguggacuucugcggcaagggcuaccaccugaugagcuuuccccagagcgcaccccacggagugguguuccugcacgugaccuacgugcccgcccaggagaagaacuucaccaccgccccagccaucugccacgacggcaaggcccacuuuccccgggagggcguguucgugagcaacggcacccacugguucgugacccagcggaacuucuacgagccccagaucaucaccaccgacaacaccuucgugagcggcaacugcgacguggugaucggcaucgugaacaacaccguguacgauccccugcagcccgagcuggacagcuucaaggaggagcuggacaaguacuucaagaaucacaccagccccgacguggaccugggcgacaucagcggcaucaacgccagcguggugaacauccagaaggagaucgaucggcugaacgagguggccaagaaccugaacgagagccugaucgaccugcaggagcugggcaaguacgagcaguacaucaaguggcccugguacaucuggcugggcuucaucgccggccugaucgccaucgugauggugaccaucaugcugugcugcaugaccagcugcugcagcugccugaagggcuguugcagcugcggcagcugcugcaaguucgacgaggacgacagcgagcccgugcugaagggcgugaagcugcacuacaccugauaauaggcuggagccucgguggccuagcuucuugccccuugggccuccccccagccccuccuccccuuccugcacccguacccccguggucuuugaauaaagucugagugggcggcaaaaaaaaaaaaaaaaaaaaaaaaaaaaaaaaaaaaaaaaaaaaaaaaaaaaaaaaaaaaaaaaaaaaaaaaaaaaaaaaaaaaaaaaaaaaaaaaaaaaucuag

SEQ ID NO: 26639 - RNA, 4094 nt, Artificial Sequence
  SARS-CoV-2/Wuhan/WIV05/2019__EPI_ISL_402128 spike protein mRNA gc (1-1273)(K986P_V987P_H69del_V70del_D614G)
gggaaauaagagagaaaagaagaguaagaagaaauauaagaccccggcgccgccaccauguucguguuccuggugcugcugccccuggugagcagccagugcgugaaccugaccacccggacccagcugccaccagccuacaccaacagcuucacccggggcgucuacuaccccgacaagguguuccggagcagcguccugcacagcacccaggaccuguuccugcccuucuucagcaacgugaccugguuccacgccaucagcggcaccaacggcaccaagcgguucgacaaccccgugcugcccuucaacgacggcguguacuucgccagcaccgagaagagcaacaucauccggggcuggaucuucggcaccacccuggacagcaagacccagagccugcugaucgugaauaacgccaccaacguggugaucaaggugugcgaguuccaguucugcaacgaccccuuccugggcguguacuaccacaagaacaacaagagcuggauggagagcgaguuccggguguacagcagcgccaacaacugcaccuucgaguacgugagccagcccuuccugauggaccuggagggcaagcagggcaacuucaagaaccugcgggaguucguguucaagaacaucgacggcuacuucaagaucuacagcaagcacaccccaaucaaccuggugcgggaucugccccagggcuucucagcccuggagccccugguggaccugcccaucggcaucaacaucacccgguuccagacccugcuggcccugcaccggagcuaccugaccccaggcgacagcagcagcggguggacagcaggcgcggcugcuuacuacgugggcuaccugcagccccggaccuuccugcugaaguacaacgagaacggcaccaucaccgacgccguggacugcgcccuggacccucugagcgagaccaagugcacccugaagagcuucaccguggagaagggcaucuaccagaccagcaacuuccgggugcagcccaccgagagcaucgugcgguuccccaacaucaccaaccugugccccuucggcgagguguucaacgccacccgguucgccagcguguacgccuggaaccggaagcggaucagcaacugcguggccgacuacagcgugcuguacaacagcgccagcuucagcaccuucaagugcuacggcgugagccccaccaagcugaacgaccugugcuucaccaacguguacgccgacagcuucgugauccguggcgacgaggugcggcagaucgcacccggccagacaggcaagaucgccgacuacaacuacaagcugcccgacgacuucaccggcugcgugaucgccuggaacagcaacaaccucgacagcaaggugggcggcaacuacaacuaccuguaccggcuguuccggaagagcaaccugaagcccuucgagcgggacaucagcaccgagaucuaccaagccggcuccaccccuugcaacggcguggagggcuucaacugcuacuucccucugcagagcuacggcuuccagcccaccaacggcgugggcuaccagcccuaccgggugguggugcugagcuucgagcugcugcacgccccagccaccguguguggccccaagaagagcaccaaccuggugaagaacaagugcgugaacuucaacuucaacggccuuaccggcaccggcgugcugaccgagagcaacaagaaauuccugcccuuucagcaguucggccgggacaucgccgacaccaccgacgcugugcgggauccccagacccuggagauccuggacaucaccccuugcagcuucggcggcgugagcgugaucaccccaggcaccaacaccagcaaccagguggccgugcuguaccagggcgugaacugcaccgaggugcccguggccauccacgccgaccagcugacacccaccuggcgggucuacagcaccggcagcaacguguuccagacccgggccgguugccugaucggcgccgagcacgugaacaacagcuacgagugcgacauccccaucggcgccggcaucugugccagcuaccagacccagaccaauucaccccggagggcaaggagcguggccagccagagcaucaucgccuacaccaugagccugggcgccgagaacagcguggccuacagcaacaacagcaucgccauccccaccaacuucaccaucagcgugaccaccgagauucugcccgugagcaugaccaagaccagcguggacugcaccauguacaucugcggcgacagcaccgagugcagcaaccugcugcugcaguacggcagcuucugcacccagcugaaccgggcccugaccggcaucgccguggagcaggacaagaacacccaggagguguucgcccaggugaagcagaucuacaagaccccucccaucaaggacuucggcggcuucaacuucagccagauccugcccgaccccagcaagcccagcaagcggagcuucaucgaggaccugcuguucaacaaggugacccuagccgacgccggcuucaucaagcaguacggcgacugccucggcgacauagccgcccgggaccugaucugcgcccagaaguucaacggccugaccgugcugccuccccugcugaccgacgagaugaucgcccaguacaccagcgcccuguuagccggaaccaucaccagcggcuggacuuucggcgcuggagccgcucugcagauccccuucgccaugcagauggccuaccgguucaacggcaucggcgugacccagaacgugcuguacgagaaccagaagcugaucgccaaccaguucaacagcgccaucggcaagauccaggacagccugagcagcaccgcuagcgcccugggcaagcugcaggacguggugaaccagaacgcccaggcccugaacacccuggugaagcagcugagcagcaacuucggcgccaucagcagcgugcugaacgacauccugagccggcuggacccucccgaggccgaggugcagaucgaccggcugaucacuggccggcugcagagccugcagaccuacgugacccagcagcugauccgggccgccgagauucgggccagcgccaaccuggccgccaccaagaugagcgagugcgugcugggccagagcaagcggguggacuucugcggcaagggcuaccaccugaugagcuuuccccagagcgcaccccacggagugguguuccugcacgugaccuacgugcccgcccaggagaagaacuucaccaccgccccagccaucugccacgacggcaaggcccacuuuccccgggagggcguguucgugagcaacggcacccacugguucgugacccagcggaacuucuacgagccccagaucaucaccaccgacaacaccuucgugagcggcaacugcgacguggugaucggcaucgugaacaacaccguguacgauccccugcagcccgagcuggacagcuucaaggaggagcuggacaaguacuucaagaaucacaccagccccgacguggaccugggcgacaucagcggcaucaacgccagcguggugaacauccagaaggagaucgaucggcugaacgagguggccaagaaccugaacgagagccugaucgaccugcaggagcugggcaaguacgagcaguacaucaaguggcccugguacaucuggcugggcuucaucgccggccugaucgccaucgugauggugaccaucaugcugugcugcaugaccagcugcugcagcugccugaagggcuguugcagcugcggcagcugcugcaaguucgacgaggacgacagcgagcccgugcugaagggcgugaagcugcacuacaccugauaauaggcuggagccucgguggccuagcuucuugccccuugggccuccccccagccccuccuccccuuccugcacccguacccccguggucuuugaauaaagucugagugggcggcaaaaaaaaaaaaaaaaaaaaaaaaaaaaaaaaaaaaaaaaaaaaaaaaaaaaaaaaaaaaaaaaaaaaaaaaaaaaaaaaaaaaaaaaaaaaaaaaaaaaucuag

SEQ ID NO: 26640 - RNA, 4100 nt, Artificial Sequence
  SARS-CoV-2/Wuhan/WIV05/2019__EPI_ISL_402128 spike protein mRNA gc (1-1273)(K986P_V987P_Y453F_D614G)
gggaaauaagagagaaaagaagaguaagaagaaauauaagaccccggcgccgccaccauguucguguuccuggugcugcugccccuggugagcagccagugcgugaaccugaccacccggacccagcugccaccagccuacaccaacagcuucacccggggcgucuacuaccccgacaagguguuccggagcagcguccugcacagcacccaggaccuguuccugcccuucuucagcaacgugaccugguuccacgccauccacgugagcggcaccaacggcaccaagcgguucgacaaccccgugcugcccuucaacgacggcguguacuucgccagcaccgagaagagcaacaucauccggggcuggaucuucggcaccacccuggacagcaagacccagagccugcugaucgugaauaacgccaccaacguggugaucaaggugugcgaguuccaguucugcaacgaccccuuccugggcguguacuaccacaagaacaacaagagcuggauggagagcgaguuccggguguacagcagcgccaacaacugcaccuucgaguacgugagccagcccuuccugauggaccuggagggcaagcagggcaacuucaagaaccugcgggaguucguguucaagaacaucgacggcuacuucaagaucuacagcaagcacaccccaaucaaccuggugcgggaucugccccagggcuucucagcccuggagccccugguggaccugcccaucggcaucaacaucacccgguuccagacccugcuggcccugcaccggagcuaccugaccccaggcgacagcagcagcggguggacagcaggcgcggcugcuuacuacgugggcuaccugcagccccggaccuuccugcugaaguacaacgagaacggcaccaucaccgacgccguggacugcgcccuggacccucugagcgagaccaagugcacccugaagagcuucaccguggagaagggcaucuaccagaccagcaacuuccgggugcagcccaccgagagcaucgugcgguuccccaacaucaccaaccugugccccuucggcgagguguucaacgccacccgguucgccagcguguacgccuggaaccggaagcggaucagcaacugcguggccgacuacagcgugcuguacaacagcgccagcuucagcaccuucaagugcuacggcgugagccccaccaagcugaacgaccugugcuucaccaacguguacgccgacagcuucgugauccguggcgacgaggugcggcagaucgcacccggccagacaggcaagaucgccgacuacaacuacaagcugcccgacgacuucaccggcugcgugaucgccuggaacagcaacaaccucgacagcaaggugggcggcaacuacaacuaccuguuccggcuguuccggaagagcaaccugaagcccuucgagcgggacaucagcaccgagaucuaccaagccggcuccaccccuugcaacggcguggagggcuucaacugcuacuucccucugcagagcuacggcuuccagcccaccaacggcgugggcuaccagcccuaccgggugguggugcugagcuucgagcugcugcacgccccagccaccguguguggccccaagaagagcaccaaccuggugaagaacaagugcgugaacuucaacuucaacggccuuaccggcaccggcgugcugaccgagagcaacaagaaauuccugcccuuucagcaguucggccgggacaucgccgacaccaccgacgcugugcgggauccccagacccuggagauccuggacaucaccccuugcagcuucggcggcgugagcgugaucaccccaggcaccaacaccagcaaccagguggccgugcuguaccagggcgugaacugcaccgaggugcccguggccauccacgccgaccagcugacacccaccuggcgggucuacagcaccggcagcaacguguuccagacccgggccgguugccugaucggcgccgagcacgugaacaacagcuacgagugcgacauccccaucggcgccggcaucugugccagcuaccagacccagaccaauucaccccggagggcaaggagcguggccagccagagcaucaucgccuacaccaugagccugggcgccgagaacagcguggccuacagcaacaacagcaucgccauccccaccaacuucaccaucagcgugaccaccgagauucugcccgugagcaugaccaagaccagcguggacugcaccauguacaucugcggcgacagcaccgagugcagcaaccugcugcugcaguacggcagcuucugcacccagcugaaccgggcccugaccggcaucgccguggagcaggacaagaacacccaggagguguucgcccaggugaagcagaucuacaagaccccucccaucaaggacuucggcggcuucaacuucagccagauccugcccgaccccagcaagcccagcaagcggagcuucaucgaggaccugcuguucaacaaggugacccuagccgacgccggcuucaucaagcaguacggcgacugccucggcgacauagccgcccgggaccugaucugcgcccagaaguucaacggccugaccgugcugccuccccugcugaccgacgagaugaucgcccaguacaccagcgcccuguuagccggaaccaucaccagcggcuggacuuucggcgcuggagccgcucugcagauccccuucgccaugcagauggccuaccgguucaacggcaucggcgugacccagaacgugcuguacgagaaccagaagcugaucgccaaccaguucaacagcgccaucggcaagauccaggacagccugagcagcaccgcuagcgcccugggcaagcugcaggacguggugaaccagaacgcccaggcccugaacacccuggugaagcagcugagcagcaacuucggcgccaucagcagcgugcugaacgacauccugagccggcuggacccucccgaggccgaggugcagaucgaccggcugaucacuggccggcugcagagccugcagaccuacgugacccagcagcugauccgggccgccgagauucgggccagcgccaaccuggccgccaccaagaugagcgagugcgugcugggccagagcaagcggguggacuucugcggcaagggcuaccaccugaugagcuuuccccagagcgcaccccacggagugguguuccugcacgugaccuacgugcccgcccaggagaagaacuucaccaccgccccagccaucugccacgacggcaaggcccacuuuccccgggagggcguguucgugagcaacggcacccacugguucgugacccagcggaacuucuacgagccccagaucaucaccaccgacaacaccuucgugagcggcaacugcgacguggugaucggcaucgugaacaacaccguguacgauccccugcagcccgagcuggacagcuucaaggaggagcuggacaaguacuucaagaaucacaccagccccgacguggaccugggcgacaucagcggcaucaacgccagcguggugaacauccagaaggagaucgaucggcugaacgagguggccaagaaccugaacgagagccugaucgaccugcaggagcugggcaaguacgagcaguacaucaaguggcccugguacaucuggcugggcuucaucgccggccugaucgccaucgugauggugaccaucaugcugugcugcaugaccagcugcugcagcugccugaagggcuguugcagcugcggcagcugcugcaaguucgacgaggacgacagcgagcccgugcugaagggcgugaagcugcacuacaccugauaauaggcuggagccucgguggccuagcuucuugccccuugggccuccccccagccccuccuccccuuccugcacccguacccccguggucuuugaauaaagucugagugggcggcaaaaaaaaaaaaaaaaaaaaaaaaaaaaaaaaaaaaaaaaaaaaaaaaaaaaaaaaaaaaaaaaaaaaaaaaaaaaaaaaaaaaaaaaaaaaaaaaaaaaucuag

SEQ ID NO: 26641 - RNA, 4100 nt, Artificial Sequence
  SARS-CoV-2/Wuhan/WIV05/2019__EPI_ISL_402128 spike protein mRNA gc (1-1273)(K986P_V987P_D614G_I692V)
gggaaauaagagagaaaagaagaguaagaagaaauauaagaccccggcgccgccaccauguucguguuccuggugcugcugccccuggugagcagccagugcgugaaccugaccacccggacccagcugccaccagccuacaccaacagcuucacccggggcgucuacuaccccgacaagguguuccggagcagcguccugcacagcacccaggaccuguuccugcccuucuucagcaacgugaccugguuccacgccauccacgugagcggcaccaacggcaccaagcgguucgacaaccccgugcugcccuucaacgacggcguguacuucgccagcaccgagaagagcaacaucauccggggcuggaucuucggcaccacccuggacagcaagacccagagccugcugaucgugaauaacgccaccaacguggugaucaaggugugcgaguuccaguucugcaacgaccccuuccugggcguguacuaccacaagaacaacaagagcuggauggagagcgaguuccggguguacagcagcgccaacaacugcaccuucgaguacgugagccagcccuuccugauggaccuggagggcaagcagggcaacuucaagaaccugcgggaguucguguucaagaacaucgacggcuacuucaagaucuacagcaagcacaccccaaucaaccuggugcgggaucugccccagggcuucucagcccuggagccccugguggaccugcccaucggcaucaacaucacccgguuccagacccugcuggcccugcaccggagcuaccugaccccaggcgacagcagcagcggguggacagcaggcgcggcugcuuacuacgugggcuaccugcagccccggaccuuccugcugaaguacaacgagaacggcaccaucaccgacgccguggacugcgcccuggacccucugagcgagaccaagugcacccugaagagcuucaccguggagaagggcaucuaccagaccagcaacuuccgggugcagcccaccgagagcaucgugcgguuccccaacaucaccaaccugugccccuucggcgagguguucaacgccacccgguucgccagcguguacgccuggaaccggaagcggaucagcaacugcguggccgacuacagcgugcuguacaacagcgccagcuucagcaccuucaagugcuacggcgugagccccaccaagcugaacgaccugugcuucaccaacguguacgccgacagcuucgugauccguggcgacgaggugcggcagaucgcacccggccagacaggcaagaucgccgacuacaacuacaagcugcccgacgacuucaccggcugcgugaucgccuggaacagcaacaaccucgacagcaaggugggcggcaacuacaacuaccuguaccggcuguuccggaagagcaaccugaagcccuucgagcgggacaucagcaccgagaucuaccaagccggcuccaccccuugcaacggcguggagggcuucaacugcuacuucccucugcagagcuacggcuuccagcccaccaacggcgugggcuaccagcccuaccgggugguggugcugagcuucgagcugcugcacgccccagccaccguguguggccccaagaagagcaccaaccuggugaagaacaagugcgugaacuucaacuucaacggccuuaccggcaccggcgugcugaccgagagcaacaagaaauuccugcccuuucagcaguucggccgggacaucgccgacaccaccgacgcugugcgggauccccagacccuggagauccuggacaucaccccuugcagcuucggcggcgugagcgugaucaccccaggcaccaacaccagcaaccagguggccgugcuguaccagggcgugaacugcaccgaggugcccguggccauccacgccgaccagcugacacccaccuggcgggucuacagcaccggcagcaacguguuccagacccgggccgguugccugaucggcgccgagcacgugaacaacagcuacgagugcgacauccccaucggcgccggcaucugugccagcuaccagacccagaccaauucaccccggagggcaaggagcguggccagccagagcgugaucgccuacaccaugagccugggcgccgagaacagcguggccuacagcaacaacagcaucgccauccccaccaacuucaccaucagcgugaccaccgagauucugcccgugagcaugaccaagaccagcguggacugcaccauguacaucugcggcgacagcaccgagugcagcaaccugcugcugcaguacggcagcuucugcacccagcugaaccgggcccugaccggcaucgccguggagcaggacaagaacacccaggagguguucgcccaggugaagcagaucuacaagaccccucccaucaaggacuucggcggcuucaacuucagccagauccugcccgaccccagcaagcccagcaagcggagcuucaucgaggaccugcuguucaacaaggugacccuagccgacgccggcuucaucaagcaguacggcgacugccucggcgacauagccgcccgggaccugaucugcgcccagaaguucaacggccugaccgugcugccuccccugcugaccgacgagaugaucgcccaguacaccagcgcccuguuagccggaaccaucaccagcggcuggacuuucggcgcuggagccgcucugcagauccccuucgccaugcagauggccuaccgguucaacggcaucggcgugacccagaacgugcuguacgagaaccagaagcugaucgccaaccaguucaacagcgccaucggcaagauccaggacagccugagcagcaccgcuagcgcccugggcaagcugcaggacguggugaaccagaacgcccaggcccugaacacccuggugaagcagcugagcagcaacuucggcgccaucagcagcgugcugaacgacauccugagccggcuggacccucccgaggccgaggugcagaucgaccggcugaucacuggccggcugcagagccugcagaccuacgugacccagcagcugauccgggccgccgagauucgggccagcgccaaccuggccgccaccaagaugagcgagugcgugcugggccagagcaagcggguggacuucugcggcaagggcuaccaccugaugagcuuuccccagagcgcaccccacggagugguguuccugcacgugaccuacgugcccgcccaggagaagaacuucaccaccgccccagccaucugccacgacggcaaggcccacuuuccccgggagggcguguucgugagcaacggcacccacugguucgugacccagcggaacuucuacgagccccagaucaucaccaccgacaacaccuucgugagcggcaacugcgacguggugaucggcaucgugaacaacaccguguacgauccccugcagcccgagcuggacagcuucaaggaggagcuggacaaguacuucaagaaucacaccagccccgacguggaccugggcgacaucagcggcaucaacgccagcguggugaacauccagaaggagaucgaucggcugaacgagguggccaagaaccugaacgagagccugaucgaccugcaggagcugggcaaguacgagcaguacaucaaguggcccugguacaucuggcugggcuucaucgccggccugaucgccaucgugauggugaccaucaugcugugcugcaugaccagcugcugcagcugccugaagggcuguugcagcugcggcagcugcugcaaguucgacgaggacgacagcgagcccgugcugaagggcgugaagcugcacuacaccugauaauaggcuggagccucgguggccuagcuucuugccccuugggccuccccccagccccuccuccccuuccugcacccguacccccguggucuuugaauaaagucugagugggcggcaaaaaaaaaaaaaaaaaaaaaaaaaaaaaaaaaaaaaaaaaaaaaaaaaaaaaaaaaaaaaaaaaaaaaaaaaaaaaaaaaaaaaaaaaaaaaaaaaaaaucuag

SEQ ID NO: 26642 - RNA, 4100 nt, Artificial Sequence
  SARS-CoV-2/Wuhan/WIV05/2019__EPI_ISL_402128 spike protein mRNA gc (1-1273)(K986P_V987P_D614G_M1229I)
gggaaauaagagagaaaagaagaguaagaagaaauauaagaccccggcgccgccaccauguucguguuccuggugcugcugccccuggugagcagccagugcgugaaccugaccacccggacccagcugccaccagccuacaccaacagcuucacccggggcgucuacuaccccgacaagguguuccggagcagcguccugcacagcacccaggaccuguuccugcccuucuucagcaacgugaccugguuccacgccauccacgugagcggcaccaacggcaccaagcgguucgacaaccccgugcugcccuucaacgacggcguguacuucgccagcaccgagaagagcaacaucauccggggcuggaucuucggcaccacccuggacagcaagacccagagccugcugaucgugaauaacgccaccaacguggugaucaaggugugcgaguuccaguucugcaacgaccccuuccugggcguguacuaccacaagaacaacaagagcuggauggagagcgaguuccggguguacagcagcgccaacaacugcaccuucgaguacgugagccagcccuuccugauggaccuggagggcaagcagggcaacuucaagaaccugcgggaguucguguucaagaacaucgacggcuacuucaagaucuacagcaagcacaccccaaucaaccuggugcgggaucugccccagggcuucucagcccuggagccccugguggaccugcccaucggcaucaacaucacccgguuccagacccugcuggcccugcaccggagcuaccugaccccaggcgacagcagcagcggguggacagcaggcgcggcugcuuacuacgugggcuaccugcagccccggaccuuccugcugaaguacaacgagaacggcaccaucaccgacgccguggacugcgcccuggacccucugagcgagaccaagugcacccugaagagcuucaccguggagaagggcaucuaccagaccagcaacuuccgggugcagcccaccgagagcaucgugcgguuccccaacaucaccaaccugugccccuucggcgagguguucaacgccacccgguucgccagcguguacgccuggaaccggaagcggaucagcaacugcguggccgacuacagcgugcuguacaacagcgccagcuucagcaccuucaagugcuacggcgugagccccaccaagcugaacgaccugugcuucaccaacguguacgccgacagcuucgugauccguggcgacgaggugcggcagaucgcacccggccagacaggcaagaucgccgacuacaacuacaagcugcccgacgacuucaccggcugcgugaucgccuggaacagcaacaaccucgacagcaaggugggcggcaacuacaacuaccuguaccggcuguuccggaagagcaaccugaagcccuucgagcgggacaucagcaccgagaucuaccaagccggcuccaccccuugcaacggcguggagggcuucaacugcuacuucccucugcagagcuacggcuuccagcccaccaacggcgugggcuaccagcccuaccgggugguggugcugagcuucgagcugcugcacgccccagccaccguguguggccccaagaagagcaccaaccuggugaagaacaagugcgugaacuucaacuucaacggccuuaccggcaccggcgugcugaccgagagcaacaagaaauuccugcccuuucagcaguucggccgggacaucgccgacaccaccgacgcugugcgggauccccagacccuggagauccuggacaucaccccuugcagcuucggcggcgugagcgugaucaccccaggcaccaacaccagcaaccagguggccgugcuguaccagggcgugaacugcaccgaggugcccguggccauccacgccgaccagcugacacccaccuggcgggucuacagcaccggcagcaacguguuccagacccgggccgguugccugaucggcgccgagcacgugaacaacagcuacgagugcgacauccccaucggcgccggcaucugugccagcuaccagacccagaccaauucaccccggagggcaaggagcguggccagccagagcaucaucgccuacaccaugagccugggcgccgagaacagcguggccuacagcaacaacagcaucgccauccccaccaacuucaccaucagcgugaccaccgagauucugcccgugagcaugaccaagaccagcguggacugcaccauguacaucugcggcgacagcaccgagugcagcaaccugcugcugcaguacggcagcuucugcacccagcugaaccgggcccugaccggcaucgccguggagcaggacaagaacacccaggagguguucgcccaggugaagcagaucuacaagaccccucccaucaaggacuucggcggcuucaacuucagccagauccugcccgaccccagcaagcccagcaagcggagcuucaucgaggaccugcuguucaacaaggugacccuagccgacgccggcuucaucaagcaguacggcgacugccucggcgacauagccgcccgggaccugaucugcgcccagaaguucaacggccugaccgugcugccuccccugcugaccgacgagaugaucgcccaguacaccagcgcccuguuagccggaaccaucaccagcggcuggacuuucggcgcuggagccgcucugcagauccccuucgccaugcagauggccuaccgguucaacggcaucggcgugacccagaacgugcuguacgagaaccagaagcugaucgccaaccaguucaacagcgccaucggcaagauccaggacagccugagcagcaccgcuagcgcccugggcaagcugcaggacguggugaaccagaacgcccaggcccugaacacccuggugaagcagcugagcagcaacuucggcgccaucagcagcgugcugaacgacauccugagccggcuggacccucccgaggccgaggugcagaucgaccggcugaucacuggccggcugcagagccugcagaccuacgugacccagcagcugauccgggccgccgagauucgggccagcgccaaccuggccgccaccaagaugagcgagugcgugcugggccagagcaagcggguggacuucugcggcaagggcuaccaccugaugagcuuuccccagagcgcaccccacggagugguguuccugcacgugaccuacgugcccgcccaggagaagaacuucaccaccgccccagccaucugccacgacggcaaggcccacuuuccccgggagggcguguucgugagcaacggcacccacugguucgugacccagcggaacuucuacgagccccagaucaucaccaccgacaacaccuucgugagcggcaacugcgacguggugaucggcaucgugaacaacaccguguacgauccccugcagcccgagcuggacagcuucaaggaggagcuggacaaguacuucaagaaucacaccagccccgacguggaccugggcgacaucagcggcaucaacgccagcguggugaacauccagaaggagaucgaucggcugaacgagguggccaagaaccugaacgagagccugaucgaccugcaggagcugggcaaguacgagcaguacaucaaguggcccugguacaucuggcugggcuucaucgccggccugaucgccaucgugaucgugaccaucaugcugugcugcaugaccagcugcugcagcugccugaagggcuguugcagcugcggcagcugcugcaaguucgacgaggacgacagcgagcccgugcugaagggcgugaagcugcacuacaccugauaauaggcuggagccucgguggccuagcuucuugccccuugggccuccccccagccccuccuccccuuccugcacccguacccccguggucuuugaauaaagucugagugggcggcaaaaaaaaaaaaaaaaaaaaaaaaaaaaaaaaaaaaaaaaaaaaaaaaaaaaaaaaaaaaaaaaaaaaaaaaaaaaaaaaaaaaaaaaaaaaaaaaaaaaucuag

SEQ ID NO: 26643 - RNA, 4094 nt, Artificial Sequence
  SARS-CoV-2/Wuhan/WIV05/2019__EPI_ISL_402128 spike protein mRNA gc (1-1273)(K986P_V987P_H69del_V70del_A222V_Y453F_S477N_D614G_I692V)
gggaaauaagagagaaaagaagaguaagaagaaauauaagaccccggcgccgccaccauguucguguuccuggugcugcugccccuggugagcagccagugcgugaaccugaccacccggacccagcugccaccagccuacaccaacagcuucacccggggcgucuacuaccccgacaagguguuccggagcagcguccugcacagcacccaggaccuguuccugcccuucuucagcaacgugaccugguuccacgccaucagcggcaccaacggcaccaagcgguucgacaaccccgugcugcccuucaacgacggcguguacuucgccagcaccgagaagagcaacaucauccggggcuggaucuucggcaccacccuggacagcaagacccagagccugcugaucgugaauaacgccaccaacguggugaucaaggugugcgaguuccaguucugcaacgaccccuuccugggcguguacuaccacaagaacaacaagagcuggauggagagcgaguuccggguguacagcagcgccaacaacugcaccuucgaguacgugagccagcccuuccugauggaccuggagggcaagcagggcaacuucaagaaccugcgggaguucguguucaagaacaucgacggcuacuucaagaucuacagcaagcacaccccaaucaaccuggugcgggaucugccccagggcuucucagugcuggagccccugguggaccugcccaucggcaucaacaucacccgguuccagacccugcuggcccugcaccggagcuaccugaccccaggcgacagcagcagcggguggacagcaggcgcggcugcuuacuacgugggcuaccugcagccccggaccuuccugcugaaguacaacgagaacggcaccaucaccgacgccguggacugcgcccuggacccucugagcgagaccaagugcacccugaagagcuucaccguggagaagggcaucuaccagaccagcaacuuccgggugcagcccaccgagagcaucgugcgguuccccaacaucaccaaccugugccccuucggcgagguguucaacgccacccgguucgccagcguguacgccuggaaccggaagcggaucagcaacugcguggccgacuacagcgugcuguacaacagcgccagcuucagcaccuucaagugcuacggcgugagccccaccaagcugaacgaccugugcuucaccaacguguacgccgacagcuucgugauccguggcgacgaggugcggcagaucgcacccggccagacaggcaagaucgccgacuacaacuacaagcugcccgacgacuucaccggcugcgugaucgccuggaacagcaacaaccucgacagcaaggugggcggcaacuacaacuaccuguuccggcuguuccggaagagcaaccugaagcccuucgagcgggacaucagcaccgagaucuaccaagccggcaacaccccuugcaacggcguggagggcuucaacugcuacuucccucugcagagcuacggcuuccagcccaccaacggcgugggcuaccagcccuaccgggugguggugcugagcuucgagcugcugcacgccccagccaccguguguggccccaagaagagcaccaaccuggugaagaacaagugcgugaacuucaacuucaacggccuuaccggcaccggcgugcugaccgagagcaacaagaaauuccugcccuuucagcaguucggccgggacaucgccgacaccaccgacgcugugcgggauccccagacccuggagauccuggacaucaccccuugcagcuucggcggcgugagcgugaucaccccaggcaccaacaccagcaaccagguggccgugcuguaccagggcgugaacugcaccgaggugcccguggccauccacgccgaccagcugacacccaccuggcgggucuacagcaccggcagcaacguguuccagacccgggccgguugccugaucggcgccgagcacgugaacaacagcuacgagugcgacauccccaucggcgccggcaucugugccagcuaccagacccagaccaauucaccccggagggcaaggagcguggccagccagagcgugaucgccuacaccaugagccugggcgccgagaacagcguggccuacagcaacaacagcaucgccauccccaccaacuucaccaucagcgugaccaccgagauucugcccgugagcaugaccaagaccagcguggacugcaccauguacaucugcggcgacagcaccgagugcagcaaccugcugcugcaguacggcagcuucugcacccagcugaaccgggcccugaccggcaucgccguggagcaggacaagaacacccaggagguguucgcccaggugaagcagaucuacaagaccccucccaucaaggacuucggcggcuucaacuucagccagauccugcccgaccccagcaagcccagcaagcggagcuucaucgaggaccugcuguucaacaaggugacccuagccgacgccggcuucaucaagcaguacggcgacugccucggcgacauagccgcccgggaccugaucugcgcccagaaguucaacggccugaccgugcugccuccccugcugaccgacgagaugaucgcccaguacaccagcgcccuguuagccggaaccaucaccagcggcuggacuuucggcgcuggagccgcucugcagauccccuucgccaugcagauggccuaccgguucaacggcaucggcgugacccagaacgugcuguacgagaaccagaagcugaucgccaaccaguucaacagcgccaucggcaagauccaggacagccugagcagcaccgcuagcgcccugggcaagcugcaggacguggugaaccagaacgcccaggcccugaacacccuggugaagcagcugagcagcaacuucggcgccaucagcagcgugcugaacgacauccugagccggcuggacccucccgaggccgaggugcagaucgaccggcugaucacuggccggcugcagagccugcagaccuacgugacccagcagcugauccgggccgccgagauucgggccagcgccaaccuggccgccaccaagaugagcgagugcgugcugggccagagcaagcggguggacuucugcggcaagggcuaccaccugaugagcuuuccccagagcgcaccccacggagugguguuccugcacgugaccuacgugcccgcccaggagaagaacuucaccaccgccccagccaucugccacgacggcaaggcccacuuuccccgggagggcguguucgugagcaacggcacccacugguucgugacccagcggaacuucuacgagccccagaucaucaccaccgacaacaccuucgugagcggcaacugcgacguggugaucggcaucgugaacaacaccguguacgauccccugcagcccgagcuggacagcuucaaggaggagcuggacaaguacuucaagaaucacaccagccccgacguggaccugggcgacaucagcggcaucaacgccagcguggugaacauccagaaggagaucgaucggcugaacgagguggccaagaaccugaacgagagccugaucgaccugcaggagcugggcaaguacgagcaguacaucaaguggcccugguacaucuggcugggcuucaucgccggccugaucgccaucgugauggugaccaucaugcugugcugcaugaccagcugcugcagcugccugaagggcuguugcagcugcggcagcugcugcaaguucgacgaggacgacagcgagcccgugcugaagggcgugaagcugcacuacaccugauaauaggcuggagccucgguggccuagcuucuugccccuugggccuccccccagccccuccuccccuuccugcacccguacccccguggucuuugaauaaagucugagugggcggcaaaaaaaaaaaaaaaaaaaaaaaaaaaaaaaaaaaaaaaaaaaaaaaaaaaaaaaaaaaaaaaaaaaaaaaaaaaaaaaaaaaaaaaaaaaaaaaaaaaaucuag

SEQ ID NO: 26644 - RNA, 4094 nt, Artificial Sequence
  SARS-CoV-2/Wuhan/WIV05/2019__EPI_ISL_402128 spike protein mRNA gc (1-1273)(K986P_V987P_H69del_V70del_Y453F_D614G_I692V_M1229I)
gggaaauaagagagaaaagaagaguaagaagaaauauaagaccccggcgccgccaccauguucguguuccuggugcugcugccccuggugagcagccagugcgugaaccugaccacccggacccagcugccaccagccuacaccaacagcuucacccggggcgucuacuaccccgacaagguguuccggagcagcguccugcacagcacccaggaccuguuccugcccuucuucagcaacgugaccugguuccacgccaucagcggcaccaacggcaccaagcgguucgacaaccccgugcugcccuucaacgacggcguguacuucgccagcaccgagaagagcaacaucauccggggcuggaucuucggcaccacccuggacagcaagacccagagccugcugaucgugaauaacgccaccaacguggugaucaaggugugcgaguuccaguucugcaacgaccccuuccugggcguguacuaccacaagaacaacaagagcuggauggagagcgaguuccggguguacagcagcgccaacaacugcaccuucgaguacgugagccagcccuuccugauggaccuggagggcaagcagggcaacuucaagaaccugcgggaguucguguucaagaacaucgacggcuacuucaagaucuacagcaagcacaccccaaucaaccuggugcgggaucugccccagggcuucucagcccuggagccccugguggaccugcccaucggcaucaacaucacccgguuccagacccugcuggcccugcaccggagcuaccugaccccaggcgacagcagcagcggguggacagcaggcgcggcugcuuacuacgugggcuaccugcagccccggaccuuccugcugaaguacaacgagaacggcaccaucaccgacgccguggacugcgcccuggacccucugagcgagaccaagugcacccugaagagcuucaccguggagaagggcaucuaccagaccagcaacuuccgggugcagcccaccgagagcaucgugcgguuccccaacaucaccaaccugugccccuucggcgagguguucaacgccacccgguucgccagcguguacgccuggaaccggaagcggaucagcaacugcguggccgacuacagcgugcuguacaacagcgccagcuucagcaccuucaagugcuacggcgugagccccaccaagcugaacgaccugugcuucaccaacguguacgccgacagcuucgugauccguggcgacgaggugcggcagaucgcacccggccagacaggcaagaucgccgacuacaacuacaagcugcccgacgacuucaccggcugcgugaucgccuggaacagcaacaaccucgacagcaaggugggcggcaacuacaacuaccuguuccggcuguuccggaagagcaaccugaagcccuucgagcgggacaucagcaccgagaucuaccaagccggcuccaccccuugcaacggcguggagggcuucaacugcuacuucccucugcagagcuacggcuuccagcccaccaacggcgugggcuaccagcccuaccgggugguggugcugagcuucgagcugcugcacgccccagccaccguguguggccccaagaagagcaccaaccuggugaagaacaagugcgugaacuucaacuucaacggccuuaccggcaccggcgugcugaccgagagcaacaagaaauuccugcccuuucagcaguucggccgggacaucgccgacaccaccgacgcugugcgggauccccagacccuggagauccuggacaucaccccuugcagcuucggcggcgugagcgugaucaccccaggcaccaacaccagcaaccagguggccgugcuguaccagggcgugaacugcaccgaggugcccguggccauccacgccgaccagcugacacccaccuggcgggucuacagcaccggcagcaacguguuccagacccgggccgguugccugaucggcgccgagcacgugaacaacagcuacgagugcgacauccccaucggcgccggcaucugugccagcuaccagacccagaccaauucaccccggagggcaaggagcguggccagccagagcgugaucgccuacaccaugagccugggcgccgagaacagcguggccuacagcaacaacagcaucgccauccccaccaacuucaccaucagcgugaccaccgagauucugcccgugagcaugaccaagaccagcguggacugcaccauguacaucugcggcgacagcaccgagugcagcaaccugcugcugcaguacggcagcuucugcacccagcugaaccgggcccugaccggcaucgccguggagcaggacaagaacacccaggagguguucgcccaggugaagcagaucuacaagaccccucccaucaaggacuucggcggcuucaacuucagccagauccugcccgaccccagcaagcccagcaagcggagcuucaucgaggaccugcuguucaacaaggugacccuagccgacgccggcuucaucaagcaguacggcgacugccucggcgacauagccgcccgggaccugaucugcgcccagaaguucaacggccugaccgugcugccuccccugcugaccgacgagaugaucgcccaguacaccagcgcccuguuagccggaaccaucaccagcggcuggacuuucggcgcuggagccgcucugcagauccccuucgccaugcagauggccuaccgguucaacggcaucggcgugacccagaacgugcuguacgagaaccagaagcugaucgccaaccaguucaacagcgccaucggcaagauccaggacagccugagcagcaccgcuagcgcccugggcaagcugcaggacguggugaaccagaacgcccaggcccugaacacccuggugaagcagcugagcagcaacuucggcgccaucagcagcgugcugaacgacauccugagccggcuggacccucccgaggccgaggugcagaucgaccggcugaucacuggccggcugcagagccugcagaccuacgugacccagcagcugauccgggccgccgagauucgggccagcgccaaccuggccgccaccaagaugagcgagugcgugcugggccagagcaagcggguggacuucugcggcaagggcuaccaccugaugagcuuuccccagagcgcaccccacggagugguguuccugcacgugaccuacgugcccgcccaggagaagaacuucaccaccgccccagccaucugccacgacggcaaggcccacuuuccccgggagggcguguucgugagcaacggcacccacugguucgugacccagcggaacuucuacgagccccagaucaucaccaccgacaacaccuucgugagcggcaacugcgacguggugaucggcaucgugaacaacaccguguacgauccccugcagcccgagcuggacagcuucaaggaggagcuggacaaguacuucaagaaucacaccagccccgacguggaccugggcgacaucagcggcaucaacgccagcguggugaacauccagaaggagaucgaucggcugaacgagguggccaagaaccugaacgagagccugaucgaccugcaggagcugggcaaguacgagcaguacaucaaguggcccugguacaucuggcugggcuucaucgccggccugaucgccaucgugaucgugaccaucaugcugugcugcaugaccagcugcugcagcugccugaagggcuguugcagcugcggcagcugcugcaaguucgacgaggacgacagcgagcccgugcugaagggcgugaagcugcacuacaccugauaauaggcuggagccucgguggccuagcuucuugccccuugggccuccccccagccccuccuccccuuccugcacccguacccccguggucuuugaauaaagucugagugggcggcaaaaaaaaaaaaaaaaaaaaaaaaaaaaaaaaaaaaaaaaaaaaaaaaaaaaaaaaaaaaaaaaaaaaaaaaaaaaaaaaaaaaaaaaaaaaaaaaaaaaucuag

SEQ ID NO: 26645 - RNA, 4091 nt, Artificial Sequence
  SARS-CoV-2/Wuhan/WIV05/2019__EPI_ISL_402128 spike protein mRNA gc (1-1273)(K986P_V987P_K986P_V987P_H69del_V70del_Y144del_N501Y_A570 D_D614G_P681H_T716I_S982A_D1118H)
gggaaauaagagagaaaagaagaguaagaagaaauauaagaccccggcgccgccaccauguucguguuccuggugcugcugccccuggugagcagccagugcgugaaccugaccacccggacccagcugccaccagccuacaccaacagcuucacccggggcgucuacuaccccgacaagguguuccggagcagcguccugcacagcacccaggaccuguuccugcccuucuucagcaacgugaccugguuccacgccaucagcggcaccaacggcaccaagcgguucgacaaccccgugcugcccuucaacgacggcguguacuucgccagcaccgagaagagcaacaucauccggggcuggaucuucggcaccacccuggacagcaagacccagagccugcugaucgugaauaacgccaccaacguggugaucaaggugugcgaguuccaguucugcaacgaccccuuccugggcguguaccacaagaacaacaagagcuggauggagagcgaguuccggguguacagcagcgccaacaacugcaccuucgaguacgugagccagcccuuccugauggaccuggagggcaagcagggcaacuucaagaaccugcgggaguucguguucaagaacaucgacggcuacuucaagaucuacagcaagcacaccccaaucaaccuggugcgggaucugccccagggcuucucagcccuggagccccugguggaccugcccaucggcaucaacaucacccgguuccagacccugcuggcccugcaccggagcuaccugaccccaggcgacagcagcagcggguggacagcaggcgcggcugcuuacuacgugggcuaccugcagccccggaccuuccugcugaaguacaacgagaacggcaccaucaccgacgccguggacugcgcccuggacccucugagcgagaccaagugcacccugaagagcuucaccguggagaagggcaucuaccagaccagcaacuuccgggugcagcccaccgagagcaucgugcgguuccccaacaucaccaaccugugccccuucggcgagguguucaacgccacccgguucgccagcguguacgccuggaaccggaagcggaucagcaacugcguggccgacuacagcgugcuguacaacagcgccagcuucagcaccuucaagugcuacggcgugagccccaccaagcugaacgaccugugcuucaccaacguguacgccgacagcuucgugauccguggcgacgaggugcggcagaucgcacccggccagacaggcaagaucgccgacuacaacuacaagcugcccgacgacuucaccggcugcgugaucgccuggaacagcaacaaccucgacagcaaggugggcggcaacuacaacuaccuguaccggcuguuccggaagagcaaccugaagcccuucgagcgggacaucagcaccgagaucuaccaagccggcuccaccccuugcaacggcguggagggcuucaacugcuacuucccucugcagagcuacggcuuccagcccaccuacggcgugggcuaccagcccuaccgggugguggugcugagcuucgagcugcugcacgccccagccaccguguguggccccaagaagagcaccaaccuggugaagaacaagugcgugaacuucaacuucaacggccuuaccggcaccggcgugcugaccgagagcaacaagaaauuccugcccuuucagcaguucggccgggacaucgacgacaccaccgacgcugugcgggauccccagacccuggagauccuggacaucaccccuugcagcuucggcggcgugagcgugaucaccccaggcaccaacaccagcaaccagguggccgugcuguaccagggcgugaacugcaccgaggugcccguggccauccacgccgaccagcugacacccaccuggcgggucuacagcaccggcagcaacguguuccagacccgggccgguugccugaucggcgccgagcacgugaacaacagcuacgagugcgacauccccaucggcgccggcaucugugccagcuaccagacccagaccaauucacaccggagggcaaggagcguggccagccagagcaucaucgccuacaccaugagccugggcgccgagaacagcguggccuacagcaacaacagcaucgccauccccaucaacuucaccaucagcgugaccaccgagauucugcccgugagcaugaccaagaccagcguggacugcaccauguacaucugcggcgacagcaccgagugcagcaaccugcugcugcaguacggcagcuucugcacccagcugaaccgggcccugaccggcaucgccguggagcaggacaagaacacccaggagguguucgcccaggugaagcagaucuacaagaccccucccaucaaggacuucggcggcuucaacuucagccagauccugcccgaccccagcaagcccagcaagcggagcuucaucgaggaccugcuguucaacaaggugacccuagccgacgccggcuucaucaagcaguacggcgacugccucggcgacauagccgcccgggaccugaucugcgcccagaaguucaacggccugaccgugcugccuccccugcugaccgacgagaugaucgcccaguacaccagcgcccuguuagccggaaccaucaccagcggcuggacuuucggcgcuggagccgcucugcagauccccuucgccaugcagauggccuaccgguucaacggcaucggcgugacccagaacgugcuguacgagaaccagaagcugaucgccaaccaguucaacagcgccaucggcaagauccaggacagccugagcagcaccgcuagcgcccugggcaagcugcaggacguggugaaccagaacgcccaggcccugaacacccuggugaagcagcugagcagcaacuucggcgccaucagcagcgugcugaacgacauccuggcccggcuggacccucccgaggccgaggugcagaucgaccggcugaucacuggccggcugcagagccugcagaccuacgugacccagcagcugauccgggccgccgagauucgggccagcgccaaccuggccgccaccaagaugagcgagugcgugcugggccagagcaagcggguggacuucugcggcaagggcuaccaccugaugagcuuuccccagagcgcaccccacggagugguguuccugcacgugaccuacgugcccgcccaggagaagaacuucaccaccgccccagccaucugccacgacggcaaggcccacuuuccccgggagggcguguucgugagcaacggcacccacugguucgugacccagcggaacuucuacgagccccagaucaucaccacccacaacaccuucgugagcggcaacugcgacguggugaucggcaucgugaacaacaccguguacgauccccugcagcccgagcuggacagcuucaaggaggagcuggacaaguacuucaagaaucacaccagccccgacguggaccugggcgacaucagcggcaucaacgccagcguggugaacauccagaaggagaucgaucggcugaacgagguggccaagaaccugaacgagagccugaucgaccugcaggagcugggcaaguacgagcaguacaucaaguggcccugguacaucuggcugggcuucaucgccggccugaucgccaucgugauggugaccaucaugcugugcugcaugaccagcugcugcagcugccugaagggcuguugcagcugcggcagcugcugcaaguucgacgaggacgacagcgagcccgugcugaagggcgugaagcugcacuacaccugauaauaggcuggagccucgguggccuagcuucuugccccuugggccuccccccagccccuccuccccuuccugcacccguacccccguggucuuugaauaaagucugagugggcggcaaaaaaaaaaaaaaaaaaaaaaaaaaaaaaaaaaaaaaaaaaaaaaaaaaaaaaaaaaaaaaaaaaaaaaaaaaaaaaaaaaaaaaaaaaaaaaaaaaaaucuag

SEQ ID NO: 26646 - RNA, 4100 nt, Artificial Sequence
  SARS-CoV-2/Wuhan/WIV05/2019__EPI_ISL_402128 spike protein mRNA gc (1-1273)(K986P_V987P_K986P_V987P_K417N_E484K_N501Y_D614G)
gggaaauaagagagaaaagaagaguaagaagaaauauaagaccccggcgccgccaccauguucguguuccuggugcugcugccccuggugagcagccagugcgugaaccugaccacccggacccagcugccaccagccuacaccaacagcuucacccggggcgucuacuaccccgacaagguguuccggagcagcguccugcacagcacccaggaccuguuccugcccuucuucagcaacgugaccugguuccacgccauccacgugagcggcaccaacggcaccaagcgguucgacaaccccgugcugcccuucaacgacggcguguacuucgccagcaccgagaagagcaacaucauccggggcuggaucuucggcaccacccuggacagcaagacccagagccugcugaucgugaauaacgccaccaacguggugaucaaggugugcgaguuccaguucugcaacgaccccuuccugggcguguacuaccacaagaacaacaagagcuggauggagagcgaguuccggguguacagcagcgccaacaacugcaccuucgaguacgugagccagcccuuccugauggaccuggagggcaagcagggcaacuucaagaaccugcgggaguucguguucaagaacaucgacggcuacuucaagaucuacagcaagcacaccccaaucaaccuggugcgggaucugccccagggcuucucagcccuggagccccugguggaccugcccaucggcaucaacaucacccgguuccagacccugcuggcccugcaccggagcuaccugaccccaggcgacagcagcagcggguggacagcaggcgcggcugcuuacuacgugggcuaccugcagccccggaccuuccugcugaaguacaacgagaacggcaccaucaccgacgccguggacugcgcccuggacccucugagcgagaccaagugcacccugaagagcuucaccguggagaagggcaucuaccagaccagcaacuuccgggugcagcccaccgagagcaucgugcgguuccccaacaucaccaaccugugccccuucggcgagguguucaacgccacccgguucgccagcguguacgccuggaaccggaagcggaucagcaacugcguggccgacuacagcgugcuguacaacagcgccagcuucagcaccuucaagugcuacggcgugagccccaccaagcugaacgaccugugcuucaccaacguguacgccgacagcuucgugauccguggcgacgaggugcggcagaucgcacccggccagacaggcaacaucgccgacuacaacuacaagcugcccgacgacuucaccggcugcgugaucgccuggaacagcaacaaccucgacagcaaggugggcggcaacuacaacuaccuguaccggcuguuccggaagagcaaccugaagcccuucgagcgggacaucagcaccgagaucuaccaagccggcuccaccccuugcaacggcgugaagggcuucaacugcuacuucccucugcagagcuacggcuuccagcccaccuacggcgugggcuaccagcccuaccgggugguggugcugagcuucgagcugcugcacgccccagccaccguguguggccccaagaagagcaccaaccuggugaagaacaagugcgugaacuucaacuucaacggccuuaccggcaccggcgugcugaccgagagcaacaagaaauuccugcccuuucagcaguucggccgggacaucgccgacaccaccgacgcugugcgggauccccagacccuggagauccuggacaucaccccuugcagcuucggcggcgugagcgugaucaccccaggcaccaacaccagcaaccagguggccgugcuguaccagggcgugaacugcaccgaggugcccguggccauccacgccgaccagcugacacccaccuggcgggucuacagcaccggcagcaacguguuccagacccgggccgguugccugaucggcgccgagcacgugaacaacagcuacgagugcgacauccccaucggcgccggcaucugugccagcuaccagacccagaccaauucaccccggagggcaaggagcguggccagccagagcaucaucgccuacaccaugagccugggcgccgagaacagcguggccuacagcaacaacagcaucgccauccccaccaacuucaccaucagcgugaccaccgagauucugcccgugagcaugaccaagaccagcguggacugcaccauguacaucugcggcgacagcaccgagugcagcaaccugcugcugcaguacggcagcuucugcacccagcugaaccgggcccugaccggcaucgccguggagcaggacaagaacacccaggagguguucgcccaggugaagcagaucuacaagaccccucccaucaaggacuucggcggcuucaacuucagccagauccugcccgaccccagcaagcccagcaagcggagcuucaucgaggaccugcuguucaacaaggugacccuagccgacgccggcuucaucaagcaguacggcgacugccucggcgacauagccgcccgggaccugaucugcgcccagaaguucaacggccugaccgugcugccuccccugcugaccgacgagaugaucgcccaguacaccagcgcccuguuagccggaaccaucaccagcggcuggacuuucggcgcuggagccgcucugcagauccccuucgccaugcagauggccuaccgguucaacggcaucggcgugacccagaacgugcuguacgagaaccagaagcugaucgccaaccaguucaacagcgccaucggcaagauccaggacagccugagcagcaccgcuagcgcccugggcaagcugcaggacguggugaaccagaacgcccaggcccugaacacccuggugaagcagcugagcagcaacuucggcgccaucagcagcgugcugaacgacauccugagccggcuggacccucccgaggccgaggugcagaucgaccggcugaucacuggccggcugcagagccugcagaccuacgugacccagcagcugauccgggccgccgagauucgggccagcgccaaccuggccgccaccaagaugagcgagugcgugcugggccagagcaagcggguggacuucugcggcaagggcuaccaccugaugagcuuuccccagagcgcaccccacggagugguguuccugcacgugaccuacgugcccgcccaggagaagaacuucaccaccgccccagccaucugccacgacggcaaggcccacuuuccccgggagggcguguucgugagcaacggcacccacugguucgugacccagcggaacuucuacgagccccagaucaucaccaccgacaacaccuucgugagcggcaacugcgacguggugaucggcaucgugaacaacaccguguacgauccccugcagcccgagcuggacagcuucaaggaggagcuggacaaguacuucaagaaucacaccagccccgacguggaccugggcgacaucagcggcaucaacgccagcguggugaacauccagaaggagaucgaucggcugaacgagguggccaagaaccugaacgagagccugaucgaccugcaggagcugggcaaguacgagcaguacaucaaguggcccugguacaucuggcugggcuucaucgccggccugaucgccaucgugauggugaccaucaugcugugcugcaugaccagcugcugcagcugccugaagggcuguugcagcugcggcagcugcugcaaguucgacgaggacgacagcgagcccgugcugaagggcgugaagcugcacuacaccugauaauaggcuggagccucgguggccuagcuucuugccccuugggccuccccccagccccuccuccccuuccugcacccguacccccguggucuuugaauaaagucugagugggcggcaaaaaaaaaaaaaaaaaaaaaaaaaaaaaaaaaaaaaaaaaaaaaaaaaaaaaaaaaaaaaaaaaaaaaaaaaaaaaaaaaaaaaaaaaaaaaaaaaaaaucuag

SEQ ID NO: 26647 - RNA, 4091 nt, Artificial Sequence
  SARS-CoV-2/Wuhan/WIV05/2019__EPI_ISL_402128 spike protein mRNA gc (1-1273)(K986P_V987P_K986P_V987P_L18F_D80A_D215G_L242del_A243del_ L244del_R246I_K417N_E484K_N501Y_D614G_A701V)
gggaaauaagagagaaaagaagaguaagaagaaauauaagaccccggcgccgccaccauguucguguuccuggugcugcugccccuggugagcagccagugcgugaacuucaccacccggacccagcugccaccagccuacaccaacagcuucacccggggcgucuacuaccccgacaagguguuccggagcagcguccugcacagcacccaggaccuguuccugcccuucuucagcaacgugaccugguuccacgccauccacgugagcggcaccaacggcaccaagcgguucgccaaccccgugcugcccuucaacgacggcguguacuucgccagcaccgagaagagcaacaucauccggggcuggaucuucggcaccacccuggacagcaagacccagagccugcugaucgugaauaacgccaccaacguggugaucaaggugugcgaguuccaguucugcaacgaccccuuccugggcguguacuaccacaagaacaacaagagcuggauggagagcgaguuccggguguacagcagcgccaacaacugcaccuucgaguacgugagccagcccuuccugauggaccuggagggcaagcagggcaacuucaagaaccugcgggaguucguguucaagaacaucgacggcuacuucaagaucuacagcaagcacaccccaaucaaccuggugcggggccugccccagggcuucucagcccuggagccccugguggaccugcccaucggcaucaacaucacccgguuccagacccugcacaucagcuaccugaccccaggcgacagcagcagcggguggacagcaggcgcggcugcuuacuacgugggcuaccugcagccccggaccuuccugcugaaguacaacgagaacggcaccaucaccgacgccguggacugcgcccuggacccucugagcgagaccaagugcacccugaagagcuucaccguggagaagggcaucuaccagaccagcaacuuccgggugcagcccaccgagagcaucgugcgguuccccaacaucaccaaccugugccccuucggcgagguguucaacgccacccgguucgccagcguguacgccuggaaccggaagcggaucagcaacugcguggccgacuacagcgugcuguacaacagcgccagcuucagcaccuucaagugcuacggcgugagccccaccaagcugaacgaccugugcuucaccaacguguacgccgacagcuucgugauccguggcgacgaggugcggcagaucgcacccggccagacaggcaacaucgccgacuacaacuacaagcugcccgacgacuucaccggcugcgugaucgccuggaacagcaacaaccucgacagcaaggugggcggcaacuacaacuaccuguaccggcuguuccggaagagcaaccugaagcccuucgagcgggacaucagcaccgagaucuaccaagccggcuccaccccuugcaacggcgugaagggcuucaacugcuacuucccucugcagagcuacggcuuccagcccaccuacggcgugggcuaccagcccuaccgggugguggugcugagcuucgagcugcugcacgccccagccaccguguguggccccaagaagagcaccaaccuggugaagaacaagugcgugaacuucaacuucaacggccuuaccggcaccggcgugcugaccgagagcaacaagaaauuccugcccuuucagcaguucggccgggacaucgccgacaccaccgacgcugugcgggauccccagacccuggagauccuggacaucaccccuugcagcuucggcggcgugagcgugaucaccccaggcaccaacaccagcaaccagguggccgugcuguaccagggcgugaacugcaccgaggugcccguggccauccacgccgaccagcugacacccaccuggcgggucuacagcaccggcagcaacguguuccagacccgggccgguugccugaucggcgccgagcacgugaacaacagcuacgagugcgacauccccaucggcgccggcaucugugccagcuaccagacccagaccaauucaccccggagggcaaggagcguggccagccagagcaucaucgccuacaccaugagccugggcguggagaacagcguggccuacagcaacaacagcaucgccauccccaccaacuucaccaucagcgugaccaccgagauucugcccgugagcaugaccaagaccagcguggacugcaccauguacaucugcggcgacagcaccgagugcagcaaccugcugcugcaguacggcagcuucugcacccagcugaaccgggcccugaccggcaucgccguggagcaggacaagaacacccaggagguguucgcccaggugaagcagaucuacaagaccccucccaucaaggacuucggcggcuucaacuucagccagauccugcccgaccccagcaagcccagcaagcggagcuucaucgaggaccugcuguucaacaaggugacccuagccgacgccggcuucaucaagcaguacggcgacugccucggcgacauagccgcccgggaccugaucugcgcccagaaguucaacggccugaccgugcugccuccccugcugaccgacgagaugaucgcccaguacaccagcgcccuguuagccggaaccaucaccagcggcuggacuuucggcgcuggagccgcucugcagauccccuucgccaugcagauggccuaccgguucaacggcaucggcgugacccagaacgugcuguacgagaaccagaagcugaucgccaaccaguucaacagcgccaucggcaagauccaggacagccugagcagcaccgcuagcgcccugggcaagcugcaggacguggugaaccagaacgcccaggcccugaacacccuggugaagcagcugagcagcaacuucggcgccaucagcagcgugcugaacgacauccugagccggcuggacccucccgaggccgaggugcagaucgaccggcugaucacuggccggcugcagagccugcagaccuacgugacccagcagcugauccgggccgccgagauucgggccagcgccaaccuggccgccaccaagaugagcgagugcgugcugggccagagcaagcggguggacuucugcggcaagggcuaccaccugaugagcuuuccccagagcgcaccccacggagugguguuccugcacgugaccuacgugcccgcccaggagaagaacuucaccaccgccccagccaucugccacgacggcaaggcccacuuuccccgggagggcguguucgugagcaacggcacccacugguucgugacccagcggaacuucuacgagccccagaucaucaccaccgacaacaccuucgugagcggcaacugcgacguggugaucggcaucgugaacaacaccguguacgauccccugcagcccgagcuggacagcuucaaggaggagcuggacaaguacuucaagaaucacaccagccccgacguggaccugggcgacaucagcggcaucaacgccagcguggugaacauccagaaggagaucgaucggcugaacgagguggccaagaaccugaacgagagccugaucgaccugcaggagcugggcaaguacgagcaguacaucaaguggcccugguacaucuggcugggcuucaucgccggccugaucgccaucgugauggugaccaucaugcugugcugcaugaccagcugcugcagcugccugaagggcuguugcagcugcggcagcugcugcaaguucgacgaggacgacagcgagcccgugcugaagggcgugaagcugcacuacaccugauaauaggcuggagccucgguggccuagcuucuugccccuugggccuccccccagccccuccuccccuuccugcacccguacccccguggucuuugaauaaagucugagugggcggcaaaaaaaaaaaaaaaaaaaaaaaaaaaaaaaaaaaaaaaaaaaaaaaaaaaaaaaaaaaaaaaaaaaaaaaaaaaaaaaaaaaaaaaaaaaaaaaaaaaaucuag

SEQ ID NO: 26648 - RNA, 4100 nt, Artificial Sequence
  SARS-CoV-2/Wuhan/WIV05/2019__EPI_ISL_402128 spike protein mRNA gc (1-1273)(K986P_V987P_K986P_V987P_E484K_D614G)
gggaaauaagagagaaaagaagaguaagaagaaauauaagaccccggcgccgccaccauguucguguuccuggugcugcugccccuggugagcagccagugcgugaaccugaccacccggacccagcugccaccagccuacaccaacagcuucacccggggcgucuacuaccccgacaagguguuccggagcagcguccugcacagcacccaggaccuguuccugcccuucuucagcaacgugaccugguuccacgccauccacgugagcggcaccaacggcaccaagcgguucgacaaccccgugcugcccuucaacgacggcguguacuucgccagcaccgagaagagcaacaucauccggggcuggaucuucggcaccacccuggacagcaagacccagagccugcugaucgugaauaacgccaccaacguggugaucaaggugugcgaguuccaguucugcaacgaccccuuccugggcguguacuaccacaagaacaacaagagcuggauggagagcgaguuccggguguacagcagcgccaacaacugcaccuucgaguacgugagccagcccuuccugauggaccuggagggcaagcagggcaacuucaagaaccugcgggaguucguguucaagaacaucgacggcuacuucaagaucuacagcaagcacaccccaaucaaccuggugcgggaucugccccagggcuucucagcccuggagccccugguggaccugcccaucggcaucaacaucacccgguuccagacccugcuggcccugcaccggagcuaccugaccccaggcgacagcagcagcggguggacagcaggcgcggcugcuuacuacgugggcuaccugcagccccggaccuuccugcugaaguacaacgagaacggcaccaucaccgacgccguggacugcgcccuggacccucugagcgagaccaagugcacccugaagagcuucaccguggagaagggcaucuaccagaccagcaacuuccgggugcagcccaccgagagcaucgugcgguuccccaacaucaccaaccugugccccuucggcgagguguucaacgccacccgguucgccagcguguacgccuggaaccggaagcggaucagcaacugcguggccgacuacagcgugcuguacaacagcgccagcuucagcaccuucaagugcuacggcgugagccccaccaagcugaacgaccugugcuucaccaacguguacgccgacagcuucgugauccguggcgacgaggugcggcagaucgcacccggccagacaggcaagaucgccgacuacaacuacaagcugcccgacgacuucaccggcugcgugaucgccuggaacagcaacaaccucgacagcaaggugggcggcaacuacaacuaccuguaccggcuguuccggaagagcaaccugaagcccuucgagcgggacaucagcaccgagaucuaccaagccggcuccaccccuugcaacggcgugaagggcuucaacugcuacuucccucugcagagcuacggcuuccagcccaccaacggcgugggcuaccagcccuaccgggugguggugcugagcuucgagcugcugcacgccccagccaccguguguggccccaagaagagcaccaaccuggugaagaacaagugcgugaacuucaacuucaacggccuuaccggcaccggcgugcugaccgagagcaacaagaaauuccugcccuuucagcaguucggccgggacaucgccgacaccaccgacgcugugcgggauccccagacccuggagauccuggacaucaccccuugcagcuucggcggcgugagcgugaucaccccaggcaccaacaccagcaaccagguggccgugcuguaccagggcgugaacugcaccgaggugcccguggccauccacgccgaccagcugacacccaccuggcgggucuacagcaccggcagcaacguguuccagacccgggccgguugccugaucggcgccgagcacgugaacaacagcuacgagugcgacauccccaucggcgccggcaucugugccagcuaccagacccagaccaauucaccccggagggcaaggagcguggccagccagagcaucaucgccuacaccaugagccugggcgccgagaacagcguggccuacagcaacaacagcaucgccauccccaccaacuucaccaucagcgugaccaccgagauucugcccgugagcaugaccaagaccagcguggacugcaccauguacaucugcggcgacagcaccgagugcagcaaccugcugcugcaguacggcagcuucugcacccagcugaaccgggcccugaccggcaucgccguggagcaggacaagaacacccaggagguguucgcccaggugaagcagaucuacaagaccccucccaucaaggacuucggcggcuucaacuucagccagauccugcccgaccccagcaagcccagcaagcggagcuucaucgaggaccugcuguucaacaaggugacccuagccgacgccggcuucaucaagcaguacggcgacugccucggcgacauagccgcccgggaccugaucugcgcccagaaguucaacggccugaccgugcugccuccccugcugaccgacgagaugaucgcccaguacaccagcgcccuguuagccggaaccaucaccagcggcuggacuuucggcgcuggagccgcucugcagauccccuucgccaugcagauggccuaccgguucaacggcaucggcgugacccagaacgugcuguacgagaaccagaagcugaucgccaaccaguucaacagcgccaucggcaagauccaggacagccugagcagcaccgcuagcgcccugggcaagcugcaggacguggugaaccagaacgcccaggcccugaacacccuggugaagcagcugagcagcaacuucggcgccaucagcagcgugcugaacgacauccugagccggcuggacccucccgaggccgaggugcagaucgaccggcugaucacuggccggcugcagagccugcagaccuacgugacccagcagcugauccgggccgccgagauucgggccagcgccaaccuggccgccaccaagaugagcgagugcgugcugggccagagcaagcggguggacuucugcggcaagggcuaccaccugaugagcuuuccccagagcgcaccccacggagugguguuccugcacgugaccuacgugcccgcccaggagaagaacuucaccaccgccccagccaucugccacgacggcaaggcccacuuuccccgggagggcguguucgugagcaacggcacccacugguucgugacccagcggaacuucuacgagccccagaucaucaccaccgacaacaccuucgugagcggcaacugcgacguggugaucggcaucgugaacaacaccguguacgauccccugcagcccgagcuggacagcuucaaggaggagcuggacaaguacuucaagaaucacaccagccccgacguggaccugggcgacaucagcggcaucaacgccagcguggugaacauccagaaggagaucgaucggcugaacgagguggccaagaaccugaacgagagccugaucgaccugcaggagcugggcaaguacgagcaguacaucaaguggcccugguacaucuggcugggcuucaucgccggccugaucgccaucgugauggugaccaucaugcugugcugcaugaccagcugcugcagcugccugaagggcuguugcagcugcggcagcugcugcaaguucgacgaggacgacagcgagcccgugcugaagggcgugaagcugcacuacaccugauaauaggcuggagccucgguggccuagcuucuugccccuugggccuccccccagccccuccuccccuuccugcacccguacccccguggucuuugaauaaagucugagugggcggcaaaaaaaaaaaaaaaaaaaaaaaaaaaaaaaaaaaaaaaaaaaaaaaaaaaaaaaaaaaaaaaaaaaaaaaaaaaaaaaaaaaaaaaaaaaaaaaaaaaaucuag

SEQ ID NO: 26649 - RNA, 4100 nt, Artificial Sequence
  SARS-CoV-2/Wuhan/WIV05/2019__EPI_ISL_402128 spike protein mRNA gc (1-1273)(K986P_V987P_K986P_V987P_L18F_T20N_P26S_D138Y_R190S_K417T _E484K_N501Y_D614G_H655Y_T1027I)
gggaaauaagagagaaaagaagaguaagaagaaauauaagaccccggcgccgccaccauguucguguuccuggugcugcugccccuggugagcagccagugcgugaacuucaccaaccggacccagcugccaagcgccuacaccaacagcuucacccggggcgucuacuaccccgacaagguguuccggagcagcguccugcacagcacccaggaccuguuccugcccuucuucagcaacgugaccugguuccacgccauccacgugagcggcaccaacggcaccaagcgguucgacaaccccgugcugcccuucaacgacggcguguacuucgccagcaccgagaagagcaacaucauccggggcuggaucuucggcaccacccuggacagcaagacccagagccugcugaucgugaauaacgccaccaacguggugaucaaggugugcgaguuccaguucugcaacuaccccuuccugggcguguacuaccacaagaacaacaagagcuggauggagagcgaguuccggguguacagcagcgccaacaacugcaccuucgaguacgugagccagcccuuccugauggaccuggagggcaagcagggcaacuucaagaaccugagcgaguucguguucaagaacaucgacggcuacuucaagaucuacagcaagcacaccccaaucaaccuggugcgggaucugccccagggcuucucagcccuggagccccugguggaccugcccaucggcaucaacaucacccgguuccagacccugcuggcccugcaccggagcuaccugaccccaggcgacagcagcagcggguggacagcaggcgcggcugcuuacuacgugggcuaccugcagccccggaccuuccugcugaaguacaacgagaacggcaccaucaccgacgccguggacugcgcccuggacccucugagcgagaccaagugcacccugaagagcuucaccguggagaagggcaucuaccagaccagcaacuuccgggugcagcccaccgagagcaucgugcgguuccccaacaucaccaaccugugccccuucggcgagguguucaacgccacccgguucgccagcguguacgccuggaaccggaagcggaucagcaacugcguggccgacuacagcgugcuguacaacagcgccagcuucagcaccuucaagugcuacggcgugagccccaccaagcugaacgaccugugcuucaccaacguguacgccgacagcuucgugauccguggcgacgaggugcggcagaucgcacccggccagacaggcaccaucgccgacuacaacuacaagcugcccgacgacuucaccggcugcgugaucgccuggaacagcaacaaccucgacagcaaggugggcggcaacuacaacuaccuguaccggcuguuccggaagagcaaccugaagcccuucgagcgggacaucagcaccgagaucuaccaagccggcuccaccccuugcaacggcgugaagggcuucaacugcuacuucccucugcagagcuacggcuuccagcccaccuacggcgugggcuaccagcccuaccgggugguggugcugagcuucgagcugcugcacgccccagccaccguguguggccccaagaagagcaccaaccuggugaagaacaagugcgugaacuucaacuucaacggccuuaccggcaccggcgugcugaccgagagcaacaagaaauuccugcccuuucagcaguucggccgggacaucgccgacaccaccgacgcugugcgggauccccagacccuggagauccuggacaucaccccuugcagcuucggcggcgugagcgugaucaccccaggcaccaacaccagcaaccagguggccgugcuguaccagggcgugaacugcaccgaggugcccguggccauccacgccgaccagcugacacccaccuggcgggucuacagcaccggcagcaacguguuccagacccgggccgguugccugaucggcgccgaguacgugaacaacagcuacgagugcgacauccccaucggcgccggcaucugugccagcuaccagacccagaccaauucaccccggagggcaaggagcguggccagccagagcaucaucgccuacaccaugagccugggcgccgagaacagcguggccuacagcaacaacagcaucgccauccccaccaacuucaccaucagcgugaccaccgagauucugcccgugagcaugaccaagaccagcguggacugcaccauguacaucugcggcgacagcaccgagugcagcaaccugcugcugcaguacggcagcuucugcacccagcugaaccgggcccugaccggcaucgccguggagcaggacaagaacacccaggagguguucgcccaggugaagcagaucuacaagaccccucccaucaaggacuucggcggcuucaacuucagccagauccugcccgaccccagcaagcccagcaagcggagcuucaucgaggaccugcuguucaacaaggugacccuagccgacgccggcuucaucaagcaguacggcgacugccucggcgacauagccgcccgggaccugaucugcgcccagaaguucaacggccugaccgugcugccuccccugcugaccgacgagaugaucgcccaguacaccagcgcccuguuagccggaaccaucaccagcggcuggacuuucggcgcuggagccgcucugcagauccccuucgccaugcagauggccuaccgguucaacggcaucggcgugacccagaacgugcuguacgagaaccagaagcugaucgccaaccaguucaacagcgccaucggcaagauccaggacagccugagcagcaccgcuagcgcccugggcaagcugcaggacguggugaaccagaacgcccaggcccugaacacccuggugaagcagcugagcagcaacuucggcgccaucagcagcgugcugaacgacauccugagccggcuggacccucccgaggccgaggugcagaucgaccggcugaucacuggccggcugcagagccugcagaccuacgugacccagcagcugauccgggccgccgagauucgggccagcgccaaccuggccgccaucaagaugagcgagugcgugcugggccagagcaagcggguggacuucugcggcaagggcuaccaccugaugagcuuuccccagagcgcaccccacggagugguguuccugcacgugaccuacgugcccgcccaggagaagaacuucaccaccgccccagccaucugccacgacggcaaggcccacuuuccccgggagggcguguucgugagcaacggcacccacugguucgugacccagcggaacuucuacgagccccagaucaucaccaccgacaacaccuucgugagcggcaacugcgacguggugaucggcaucgugaacaacaccguguacgauccccugcagcccgagcuggacagcuucaaggaggagcuggacaaguacuucaagaaucacaccagccccgacguggaccugggcgacaucagcggcaucaacgccagcguggugaacauccagaaggagaucgaucggcugaacgagguggccaagaaccugaacgagagccugaucgaccugcaggagcugggcaaguacgagcaguacaucaaguggcccugguacaucuggcugggcuucaucgccggccugaucgccaucgugauggugaccaucaugcugugcugcaugaccagcugcugcagcugccugaagggcuguugcagcugcggcagcugcugcaaguucgacgaggacgacagcgagcccgugcugaagggcgugaagcugcacuacaccugauaauaggcuggagccucgguggccuagcuucuugccccuugggccuccccccagccccuccuccccuuccugcacccguacccccguggucuuugaauaaagucugagugggcggcaaaaaaaaaaaaaaaaaaaaaaaaaaaaaaaaaaaaaaaaaaaaaaaaaaaaaaaaaaaaaaaaaaaaaaaaaaaaaaaaaaaaaaaaaaaaaaaaaaaaucuag

SEQ ID NO: 26650 - RNA, 4100 nt, Artificial Sequence
  SARS-CoV-2/Wuhan/WIV05/2019__EPI_ISL_402128 spike protein mRNA gc (1-1273)(K986P_V987P_K986P_V987P_S13I_W152C_L452R_D614G)
gggaaauaagagagaaaagaagaguaagaagaaauauaagaccccggcgccgccaccauguucguguuccuggugcugcugccccuggugagcauccagugcgugaaccugaccacccggacccagcugccaccagccuacaccaacagcuucacccggggcgucuacuaccccgacaagguguuccggagcagcguccugcacagcacccaggaccuguuccugcccuucuucagcaacgugaccugguuccacgccauccacgugagcggcaccaacggcaccaagcgguucgacaaccccgugcugcccuucaacgacggcguguacuucgccagcaccgagaagagcaacaucauccggggcuggaucuucggcaccacccuggacagcaagacccagagccugcugaucgugaauaacgccaccaacguggugaucaaggugugcgaguuccaguucugcaacgaccccuuccugggcguguacuaccacaagaacaacaagagcugcauggagagcgaguuccggguguacagcagcgccaacaacugcaccuucgaguacgugagccagcccuuccugauggaccuggagggcaagcagggcaacuucaagaaccugcgggaguucguguucaagaacaucgacggcuacuucaagaucuacagcaagcacaccccaaucaaccuggugcgggaucugccccagggcuucucagcccuggagccccugguggaccugcccaucggcaucaacaucacccgguuccagacccugcuggcccugcaccggagcuaccugaccccaggcgacagcagcagcggguggacagcaggcgcggcugcuuacuacgugggcuaccugcagccccggaccuuccugcugaaguacaacgagaacggcaccaucaccgacgccguggacugcgcccuggacccucugagcgagaccaagugcacccugaagagcuucaccguggagaagggcaucuaccagaccagcaacuuccgggugcagcccaccgagagcaucgugcgguuccccaacaucaccaaccugugccccuucggcgagguguucaacgccacccgguucgccagcguguacgccuggaaccggaagcggaucagcaacugcguggccgacuacagcgugcuguacaacagcgccagcuucagcaccuucaagugcuacggcgugagccccaccaagcugaacgaccugugcuucaccaacguguacgccgacagcuucgugauccguggcgacgaggugcggcagaucgcacccggccagacaggcaagaucgccgacuacaacuacaagcugcccgacgacuucaccggcugcgugaucgccuggaacagcaacaaccucgacagcaaggugggcggcaacuacaacuaccgcuaccggcuguuccggaagagcaaccugaagcccuucgagcgggacaucagcaccgagaucuaccaagccggcuccaccccuugcaacggcguggagggcuucaacugcuacuucccucugcagagcuacggcuuccagcccaccaacggcgugggcuaccagcccuaccgggugguggugcugagcuucgagcugcugcacgccccagccaccguguguggccccaagaagagcaccaaccuggugaagaacaagugcgugaacuucaacuucaacggccuuaccggcaccggcgugcugaccgagagcaacaagaaauuccugcccuuucagcaguucggccgggacaucgccgacaccaccgacgcugugcgggauccccagacccuggagauccuggacaucaccccuugcagcuucggcggcgugagcgugaucaccccaggcaccaacaccagcaaccagguggccgugcuguaccagggcgugaacugcaccgaggugcccguggccauccacgccgaccagcugacacccaccuggcgggucuacagcaccggcagcaacguguuccagacccgggccgguugccugaucggcgccgagcacgugaacaacagcuacgagugcgacauccccaucggcgccggcaucugugccagcuaccagacccagaccaauucaccccggagggcaaggagcguggccagccagagcaucaucgccuacaccaugagccugggcgccgagaacagcguggccuacagcaacaacagcaucgccauccccaccaacuucaccaucagcgugaccaccgagauucugcccgugagcaugaccaagaccagcguggacugcaccauguacaucugcggcgacagcaccgagugcagcaaccugcugcugcaguacggcagcuucugcacccagcugaaccgggcccugaccggcaucgccguggagcaggacaagaacacccaggagguguucgcccaggugaagcagaucuacaagaccccucccaucaaggacuucggcggcuucaacuucagccagauccugcccgaccccagcaagcccagcaagcggagcuucaucgaggaccugcuguucaacaaggugacccuagccgacgccggcuucaucaagcaguacggcgacugccucggcgacauagccgcccgggaccugaucugcgcccagaaguucaacggccugaccgugcugccuccccugcugaccgacgagaugaucgcccaguacaccagcgcccuguuagccggaaccaucaccagcggcuggacuuucggcgcuggagccgcucugcagauccccuucgccaugcagauggccuaccgguucaacggcaucggcgugacccagaacgugcuguacgagaaccagaagcugaucgccaaccaguucaacagcgccaucggcaagauccaggacagccugagcagcaccgcuagcgcccugggcaagcugcaggacguggugaaccagaacgcccaggcccugaacacccuggugaagcagcugagcagcaacuucggcgccaucagcagcgugcugaacgacauccugagccggcuggacccucccgaggccgaggugcagaucgaccggcugaucacuggccggcugcagagccugcagaccuacgugacccagcagcugauccgggccgccgagauucgggccagcgccaaccuggccgccaccaagaugagcgagugcgugcugggccagagcaagcggguggacuucugcggcaagggcuaccaccugaugagcuuuccccagagcgcaccccacggagugguguuccugcacgugaccuacgugcccgcccaggagaagaacuucaccaccgccccagccaucugccacgacggcaaggcccacuuuccccgggagggcguguucgugagcaacggcacccacugguucgugacccagcggaacuucuacgagccccagaucaucaccaccgacaacaccuucgugagcggcaacugcgacguggugaucggcaucgugaacaacaccguguacgauccccugcagcccgagcuggacagcuucaaggaggagcuggacaaguacuucaagaaucacaccagccccgacguggaccugggcgacaucagcggcaucaacgccagcguggugaacauccagaaggagaucgaucggcugaacgagguggccaagaaccugaacgagagccugaucgaccugcaggagcugggcaaguacgagcaguacaucaaguggcccugguacaucuggcugggcuucaucgccggccugaucgccaucgugauggugaccaucaugcugugcugcaugaccagcugcugcagcugccugaagggcuguugcagcugcggcagcugcugcaaguucgacgaggacgacagcgagcccgugcugaagggcgugaagcugcacuacaccugauaauaggcuggagccucgguggccuagcuucuugccccuugggccuccccccagccccuccuccccuuccugcacccguacccccguggucuuugaauaaagucugagugggcggcaaaaaaaaaaaaaaaaaaaaaaaaaaaaaaaaaaaaaaaaaaaaaaaaaaaaaaaaaaaaaaaaaaaaaaaaaaaaaaaaaaaaaaaaaaaaaaaaaaaaucuag

SEQ ID NO: 26651 - RNA, 4100 nt, Artificial Sequence
  SARS-CoV-2/Wuhan/WIV05/2019__EPI_ISL_402128 spike protein mRNA gc (1-1273)(K986P_V987P)
gggaaauaagagagaaaagaagaguaagaagaaauauaagaccccggcgccgccaccauguucguguuccuggugcugcugccccuggugagcagccagugcgugaaccugaccacccggacccagcugcccccugccuacaccaacagcuucacccggggcguguacuaccccgacaagguguuccggagcagcgugcugcacagcacccaggaccuguuccugcccuucuucagcaacgugaccugguuccacgccauccacgugagcggcaccaacggcaccaagcgguucgacaacccagugcugcccuucaacgacggcguguacuucgccagcaccgagaagucaaacaucauccggggcuggaucuucggcaccacccuggacagcaagacacagagccugcugaucgugaacaacgccaccaacguggugaucaaggugugcgaguuucaguucugcaacgaccccuuccugggcguguacuaccacaagaacaacaagagcuggauggagagcgaguuccgggucuacagcagcgcuaacaauugcaccuucgaguacgugagccagcccuuccugauggaccucgagggcaagcagggcaacuucaagaaccugcgggaguucguguucaagaacaucgauggcuacuucaagaucuacagcaagcacacccccaucaaccuggugcgggaccugccccagggauucagcgcccuggagccucugguggaccugcccaucggcaucaacaucaccagguuccagacccugcuggcccugcaccggagcuaccugacccccggcgacagcagcagcggcuggaccgccggcgccgccgcauacuacgugggcuaccugcagccacggaccuuccugcugaaguacaacgagaacggcaccaucaccgacgccguggacugcgcccuggacccccugagcgagaccaagugcacccuaaagagcuucaccguggagaagggcaucuaccagaccagcaacuuccgggugcagcccacugagagcaucgugcgguuccccaacauuaccaaccugugucccuucggcgagguguucaacgccacccgguucgccagcguguacgccuggaaccggaagcggaucagcaacugcguggccgacuacagcgugcuguacaacagcgccagcuucagcaccuucaagugcuacggcgugagcccuaccaagcugaacgaccugugcuucaccaacguguacgcugacagcuucgugauccggggcgacgaggugcggcagaucgcccccggccagaccggcaagaucgccgacuacaacuacaagcugcccgacgacuucaccggcugcgugaucgccuggaacagcaacaaccuggacagcaaggugggcggcaacuacaacuaccuguaccggcuguuccguaagagcaaccugaagccauucgagcgggacaucagcaccgagaucuaccaggccggcagcacccccugcaacgguguggagggcuuuaacugcuacuucccccugcagagcuacggcuuccagcccaccaacggcgugggcuaccagcccuaccgggugguggugcugagcuucgagcugcugcacgcccccgccaccgugugcggcccuaaaaagagcaccaaccuggugaagaacaagugcgugaacuucaauuucaacggccugaccggcaccggcgugcugaccgagagcaacaagaaguuccugcccuuccagcaguucggccgggauaucgccgacaccaccgacgcagugcgggacccccagacccuggagauccuggacaucaccccaugcagcuucggcggcgugagcgucaucacccccggcacaaacaccagcaaccagguggccgugcuguaccaggacgugaacugcaccgaggugcccguggccauccacgccgaccagcugacccccaccuggcggguguacagcaccggaagcaacguguuccagacccgggccggcugccugaucggcgccgagcacgugaacaacuccuacgagugcgacauccccaucggcgcuggcaucugcgccagcuaccagacccagaccaacagcccccggcgggcccggagcguggccagccagagcaucaucgccuacaccaugagcuuaggcgccgagaacagcguggccuacagcaacaacagcaucgcgaucccuaccaacuucaccaucagcgugaccaccgagauacugcccgugagcaugaccaagaccagcguggacuguaccauguacaucugcggcgacagcaccgagugcagcaaccugcugcugcaguacggcagcuucugcacccagcugaaccgggcccugaccggcaucgccguggagcaggacaagaacacccaagagguguucgcccaggugaagcagaucuacaagacucccccaaucaaggacuucggcggcuucaacuucagccagauccugcccgaccccagcaagcccagcaagcggagcuucaucgaggaccugcuguucaacaaggugacccuggccgacgccggcuucaucaagcaguacggcgauugccugggcgacaucgccgcucgggaccugaucugcgcccagaaguucaacgggcugaccgugcugcccccucugcugaccgacgagaugaucgcccaguacaccagcgcccugcuugccggcaccaucaccagcggcuggaccuucggcgccggcgcagcccugcagauccccuucgccaugcagauggccuaccgguucaacggcaucggcgugacccagaacgugcuguacgagaaccagaagcugaucgccaaccaguucaacagcgccaucggcaagauccaggacagccugagcagcaccgccagcgcccugggcaagcugcaggacguggugaaccagaacgcucaggcccugaacacccuggugaagcagcugagcagcaacuucggcgccaucagcucagugcugaaugacauccugagcaggcuggaucccccagaggccgaggugcagaucgaccggcugaucaccggccggcugcagagccugcagaccuacgugacccagcagcugauccgggccgccgagauccgggccagcgccaaccuggcagccaccaagaugagcgagugcgugcugggccagagcaagcggguggacuuuugcggcaagggcuaccaccugaugagcuucccccagagcgcuccccacggcgugguguuccuccacgugacauacguccccgcccaggagaagaacuucaccaccgcccccgccauuugccacgacggcaaggcccacuucccccgggagggcguguucgugagcaacggaacccacugguucgugacccagcggaacuucuacgagccucagaucaucaccaccgacaacaccuucgugagcggcaacugcgacguggugaucggcaucgugaacaacaccguguacgacccccugcagcccgagcuggacagcuucaaggaggagcuggacaaguacuucaagaaccacaccagcccagacguggaccugggcgacaucagcggcaucaacgccagcguggugaacauccagaaggagaucgaccggcugaacgagguggccaagaaccugaacgagagccugaucgaccugcaggagcugggcaaguacgagcaguacaucaaguggcccugguacaucuggcugggcuucaucgccggccugaucgccaucgugauggugaccaucaugcugugcugcaugaccagcugcuguagcugccugaagggcugcugcagcugcggcagcugcugcaaguucgacgaggacgacagcgagcccgugcugaagggcgugaagcugcacuacaccugauaauaggcuggagccucgguggccuagcuucuugccccuugggccuccccccagccccuccuccccuuccugcacccguacccccguggucuuugaauaaagucugagugggcggcaaaaaaaaaaaaaaaaaaaaaaaaaaaaaaaaaaaaaaaaaaaaaaaaaaaaaaaaaaaaaaaaaaaaaaaaaaaaaaaaaaaaaaaaaaaaaaaaaaaaucuag

SEQ ID NO: 26652 - RNA, 4100 nt, Artificial Sequence
  SARS-CoV-2/Wuhan/WIV05/2019__EPI_ISL_402128 spike protein mRNA gc (1-1273)(K986P_V987P_ D614G)
gggaaauaagagagaaaagaagaguaagaagaaauauaagaccccggcgccgccaccauguucguguuccuggugcugcugccccuggugagcagccagugcgugaaccugaccacccggacccagcugcccccugccuacaccaacagcuucacccggggcguguacuaccccgacaagguguuccggagcagcgugcugcacagcacccaggaccuguuccugcccuucuucagcaacgugaccugguuccacgccauccacgugagcggcaccaacggcaccaagcgguucgacaacccagugcugcccuucaacgacggcguguacuucgccagcaccgagaagucaaacaucauccggggcuggaucuucggcaccacccuggacagcaagacacagagccugcugaucgugaacaacgccaccaacguggugaucaaggugugcgaguuucaguucugcaacgaccccuuccugggcguguacuaccacaagaacaacaagagcuggauggagagcgaguuccgggucuacagcagcgcuaacaauugcaccuucgaguacgugagccagcccuuccugauggaccucgagggcaagcagggcaacuucaagaaccugcgggaguucguguucaagaacaucgauggcuacuucaagaucuacagcaagcacacccccaucaaccuggugcgggaccugccccagggauucagcgcccuggagccucugguggaccugcccaucggcaucaacaucaccagguuccagacccugcuggcccugcaccggagcuaccugacccccggcgacagcagcagcggcuggaccgccggcgccgccgcauacuacgugggcuaccugcagccacggaccuuccugcugaaguacaacgagaacggcaccaucaccgacgccguggacugcgcccuggacccccugagcgagaccaagugcacccuaaagagcuucaccguggagaagggcaucuaccagaccagcaacuuccgggugcagcccacugagagcaucgugcgguuccccaacauuaccaaccugugucccuucggcgagguguucaacgccacccgguucgccagcguguacgccuggaaccggaagcggaucagcaacugcguggccgacuacagcgugcuguacaacagcgccagcuucagcaccuucaagugcuacggcgugagcccuaccaagcugaacgaccugugcuucaccaacguguacgcugacagcuucgugauccggggcgacgaggugcggcagaucgcccccggccagaccggcaagaucgccgacuacaacuacaagcugcccgacgacuucaccggcugcgugaucgccuggaacagcaacaaccuggacagcaaggugggcggcaacuacaacuaccuguaccggcuguuccguaagagcaaccugaagccauucgagcgggacaucagcaccgagaucuaccaggccggcagcacccccugcaacgguguggagggcuuuaacugcuacuucccccugcagagcuacggcuuccagcccaccaacggcgugggcuaccagcccuaccgggugguggugcugagcuucgagcugcugcacgcccccgccaccgugugcggcccuaaaaagagcaccaaccuggugaagaacaagugcgugaacuucaauuucaacggccugaccggcaccggcgugcugaccgagagcaacaagaaguuccugcccuuccagcaguucggccgggauaucgccgacaccaccgacgcagugcgggacccccagacccuggagauccuggacaucaccccaugcagcuucggcggcgugagcgucaucacccccggcacaaacaccagcaaccagguggccgugcuguaccagggagugaacugcaccgaggugcccguggccauccacgccgaccagcugacccccaccuggcggguguacagcaccggcagcaacguguuccagacccgggccggcugccugaucggcgccgagcacgugaacaacuccuacgagugcgacauccccaucggcgcuggcaucugcgccagcuaccagacccagaccaacagcccccggcgggcccggagcguggccagccagagcaucaucgccuacaccaugagcuuaggcgccgagaacagcguggccuacagcaacaacagcaucgcgaucccuaccaacuucaccaucagcgugaccaccgagauacugcccgugagcaugaccaagaccagcguggacuguaccauguacaucugcggcgacagcaccgagugcagcaaccugcugcugcaguacggcagcuucugcacccagcugaaccgggcccugaccggcaucgccguggagcaggacaagaacacccaagagguguucgcccaggugaagcagaucuacaagacucccccaaucaaggacuucggcggcuucaacuucagccagauccugcccgaccccagcaagcccagcaagcggagcuucaucgaggaccugcuguucaacaaggugacccuggccgacgccggcuucaucaagcaguacggcgacugccugggggauaucgccgcucgggaccugaucugcgcccagaaguucaacggccugaccgugcugcccccucugcugaccgacgagaugaucgcccaguacaccagcgcccugcuugccggcaccaucaccagcggcuggaccuucggcgccggcgcagcccugcagauccccuucgccaugcagauggccuaccgguucaacggcaucggcgugacccagaacgugcuguacgagaaccagaagcugaucgccaaccaguucaacagcgccaucggcaagauccaggacagccugagcagcaccgccagcgcccugggcaagcugcaggacguggugaaccagaacgcucaggcccugaacacccuggugaagcagcugagcagcaacuucggcgccaucagcucagugcugaaugacauccugagcaggcuggaucccccagaggccgaggugcagaucgaccggcugaucaccggccggcugcagagccugcagaccuacgugacccagcagcugauccgggccgccgagauccgggccagcgccaaccuggcagccaccaagaugagcgagugcgugcugggccagagcaagcggguggacuuuugcggcaagggcuaccaccugaugagcuucccccagagcgcuccccacggcgugguguuccuccacgugacauacguccccgcccaggagaagaacuucaccaccgcccccgccauuugccacgacggcaaggcccacuucccccgggagggaguguucgugagcaacggcacccacugguucgugacccagcggaacuucuacgagccucagaucaucaccaccgacaacaccuucgugagcggcaacugcgacguggugaucggcaucgugaacaacaccguguacgacccccugcagcccgagcuggacagcuucaaggaggagcuggacaaguacuucaagaaccacaccagcccagacguggaccugggcgacaucagcggcaucaacgccagcguggugaacauccagaaggagaucgaccggcugaacgagguggccaagaaccugaacgagagccugaucgaccugcaggagcugggcaaguacgagcaguacaucaaguggcccugguacaucuggcugggcuucaucgccggccugaucgccaucgugauggugaccaucaugcugugcugcaugaccagcugcuguagcugccugaagggcugcugcagcugcggcagcugcugcaaguucgacgaggacgacagcgagcccgugcugaagggcgugaagcugcacuacaccugauaauaggcuggagccucgguggccuagcuucuugccccuugggccuccccccagccccuccuccccuuccugcacccguacccccguggucuuugaauaaagucugagugggcggcaaaaaaaaaaaaaaaaaaaaaaaaaaaaaaaaaaaaaaaaaaaaaaaaaaaaaaaaaaaaaaaaaaaaaaaaaaaaaaaaaaaaaaaaaaaaaaaaaaaaucuag

SEQ ID NO: 26653 - RNA, 4100 nt, Artificial Sequence
  SARS-CoV-2/Wuhan/WIV05/2019__EPI_ISL_402128 spike protein mRNA gc (1-1273)(K986P_V987P_A222V_D614G)
gggaaauaagagagaaaagaagaguaagaagaaauauaagaccccggcgccgccaccauguucguguuccuggugcugcugccccuggugagcagccagugcgugaaccugaccacccggacccagcugcccccugccuacaccaacagcuucacccggggcguguacuaccccgacaagguguuccggagcagcgugcugcacagcacccaggaccuguuccugcccuucuucagcaacgugaccugguuccacgccauccacgugagcggcaccaacggcaccaagcgguucgacaacccagugcugcccuucaacgacggcguguacuucgccagcaccgagaagucaaacaucauccggggcuggaucuucggcaccacccuggacagcaagacacagagccugcugaucgugaacaacgccaccaacguggugaucaaggugugcgaguuucaguucugcaacgaccccuuccugggcguguacuaccacaagaacaacaagagcuggauggagagcgaguuccgggucuacagcagcgcuaacaauugcaccuucgaguacgugagccagcccuuccugauggaccucgagggcaagcagggcaacuucaagaaccugcgggaguucguguucaagaacaucgauggcuacuucaagaucuacagcaagcacacccccaucaaccuggugcgggaccugccccagggauucagcgugcuggagccucugguggaccugcccaucggcaucaacaucaccagguuccagacccugcuggcccugcaccggagcuaccugacccccggcgacagcagcagcggcuggaccgccggcgccgccgccuacuacgugggcuaccugcagccacggaccuuccugcugaaguacaacgagaacggcaccaucaccgacgcaguggacugcgcccuggacccccugagcgagaccaagugcacccuaaagagcuucaccguggagaagggcaucuaccagaccagcaacuuccgggugcagcccacugagagcaucgugcgguuccccaacauuaccaaccugugucccuucggcgagguguucaacgccacccgguucgccagcguguacgccuggaaccggaagcggaucagcaacugcguggccgacuacagcgugcuguacaacagcgccagcuucagcaccuucaagugcuacggcgugagcccuaccaagcugaacgaccugugcuucaccaacguguacgccgacagcuucgugauccggggcgacgaggugcggcagaucgcucccggccagaccggcaagaucgccgacuacaacuacaagcugcccgacgacuucaccggcugcgugaucgccuggaacagcaacaaccuggacagcaaggugggcggcaacuacaacuaccuguaccggcuguuccguaagagcaaccugaagccauucgagcgggacaucagcaccgagaucuaccaggccggcagcacccccugcaacgguguggagggcuuuaacugcuacuucccccugcagagcuacggcuuccagcccaccaacggcgugggcuaccagcccuaccgggugguggugcugagcuucgagcugcugcacgcccccgccaccgugugcggcccuaaaaagagcaccaaccuggugaagaacaagugcgugaacuucaauuucaacggccugaccggcaccggcgugcugaccgagagcaacaagaaguuccugcccuuccagcaguucggccgggauaucgccgacaccaccgacgccgugcgggacccccagacccuggagauccuggacaucaccccaugcagcuucggcggcgucagcgugaucacccccggcacaaacaccagcaaccagguggcagugcuguaccagggagugaacugcaccgaggugcccguggccauccacgccgaccagcugacccccaccuggcggguguacagcaccggcagcaacguguuccagacccgggccggcugccugaucggcgccgagcacgugaacaacuccuacgagugcgacauccccaucggcgccggcaucugcgcuagcuaccagacccagaccaacagcccccggcgggcccggagcguggccagccagagcaucaucgccuacaccaugagcuuaggcgccgagaacagcguggccuacagcaacaacagcaucgccaucccuaccaacuucaccaucagcgugaccaccgagauacugcccgugagcaugaccaagaccagcguggacuguaccauguacaucugcggcgacagcaccgagugcagcaaccugcugcugcaguacggcagcuucugcacccagcugaaccgggcgcugaccggcaucgccguggagcaggacaagaacacccaagagguguucgcccaggugaagcagaucuacaagacucccccaaucaaggacuucggcggcuucaacuucagccagauccugcccgaccccagcaagcccagcaagcggagcuucaucgaggaccugcuguucaacaaggugacccuggccgacgccggcuucaucaagcaguacggcgacugccugggggauaucgccgcccgggaccugaucugcgcucagaaguucaacggccugaccgugcugcccccucugcugaccgacgagaugaucgcccaguacaccagcgcccugcuugccggcaccaucaccagcggcuggaccuucggcgccggcgccgcacugcagauccccuucgccaugcagauggccuaccgguucaacggcaucggcgugacccagaacgugcuguacgagaaccagaagcugaucgccaaccaguucaacagcgccaucggcaagauccaggacagccugagcagcaccgccagcgcccugggcaagcugcaggacguggugaaccagaacgcccaggcucugaacacccuggugaagcagcugagcagcaacuucggcgccaucagcucagugcugaaugacauccugagcaggcuggaucccccagaggccgaggugcagaucgaccggcugaucaccggccggcugcagagccugcagaccuacgugacccagcagcugauccgggccgccgagauccgggccagcgccaaccuggccgcaaccaagaugagcgagugcgugcugggccagagcaagcggguggacuuuugcggcaagggcuaccaccugaugagcuucccccagagcgcuccccacggcgugguguuccuccacgucacauacgugcccgcccaggagaagaacuucaccaccgcccccgccauuugccacgacggcaaggcccacuucccccgggagggaguguucgugagcaacggcacccacugguucgugacccagcggaacuucuacgagccucagaucaucaccaccgacaacaccuucgugagcggcaacugcgacguggugaucggcaucgugaacaacaccguguacgacccccugcagcccgagcuggacagcuucaaggaggagcuggacaaguacuucaagaaccacaccagcccagacguggaccugggcgacaucagcggcaucaacgccagcguggugaacauccagaaggagaucgaccggcugaacgagguggccaagaaccugaacgagagccugaucgaccugcaggagcugggcaaguacgagcaguacaucaaguggcccugguacaucuggcugggcuucaucgccggccugaucgccaucgugauggugaccaucaugcugugcugcaugaccagcugcuguagcugccugaagggcugcugcagcugcggcagcugcugcaaguucgacgaggacgacagcgagcccgugcugaagggcgugaagcugcacuacaccugauaauaggcuggagccucgguggccuagcuucuugccccuugggccuccccccagccccuccuccccuuccugcacccguacccccguggucuuugaauaaagucugagugggcggcaaaaaaaaaaaaaaaaaaaaaaaaaaaaaaaaaaaaaaaaaaaaaaaaaaaaaaaaaaaaaaaaaaaaaaaaaaaaaaaaaaaaaaaaaaaaaaaaaaaaucuag

SEQ ID NO: 26654 - RNA, 4100 nt, Artificial Sequence
  SARS-CoV-2/Wuhan/WIV05/2019__EPI_ISL_402128 spike protein mRNA gc (1-1273)(K986P_V987P_N439K_D614G)
gggaaauaagagagaaaagaagaguaagaagaaauauaagaccccggcgccgccaccauguucguguuccuggugcugcugccccuggugagcagccagugcgugaaccugaccacccggacccagcugcccccugccuacaccaacagcuucacccggggcguguacuaccccgacaagguguuccggagcagcgugcugcacagcacccaggaccuguuccugcccuucuucagcaacgugaccugguuccacgccauccacgugagcggcaccaacggcaccaagcgguucgacaacccagugcugcccuucaacgacggcguguacuucgccagcaccgagaagucaaacaucauccggggcuggaucuucggcaccacccuggacagcaagacacagagccugcugaucgugaacaacgccaccaacguggugaucaaggugugcgaguuucaguucugcaacgaccccuuccugggcguguacuaccacaagaacaacaagagcuggauggagagcgaguuccgggucuacagcagcgcuaacaauugcaccuucgaguacgugagccagcccuuccugauggaccucgagggcaagcagggcaacuucaagaaccugcgggaguucguguucaagaacaucgauggcuacuucaagaucuacagcaagcacacccccaucaaccuggugcgggaccugccccagggauucagcgcccuggagccucugguggaccugcccaucggcaucaacaucaccagguuccagacccugcuggcccugcaccggagcuaccugacccccggcgacagcagcagcggcuggaccgccggcgccgccgcauacuacgugggcuaccugcagccacggaccuuccugcugaaguacaacgagaacggcaccaucaccgacgccguggacugcgcccuggacccccugagcgagaccaagugcacccuaaagagcuucaccguggagaagggcaucuaccagaccagcaacuuccgggugcagcccacugagagcaucgugcgguuccccaacauuaccaaccugugucccuucggcgagguguucaacgccacccgguucgccagcguguacgccuggaaccggaagcggaucagcaacugcguggccgacuacagcgugcuguacaacagcgccagcuucagcaccuucaagugcuacggcgugagcccuaccaagcugaacgaccugugcuucaccaacguguacgcugacagcuucgugauccggggcgacgaggugcggcagaucgcccccggccagaccggcaagaucgccgacuacaacuacaagcugcccgacgacuucaccggcugcgugaucgccuggaacagcaagaaccuggacagcaaggugggcggcaacuacaacuaccuguaccggcuguuccguaagagcaaccugaagccauucgagcgggacaucagcaccgagaucuaccaggccggcagcacccccugcaacgguguggagggcuuuaacugcuacuucccccugcagagcuacggcuuccagcccaccaacggcgugggcuaccagcccuaccgggugguggugcugagcuucgagcugcugcacgcccccgccaccgugugcggcccuaaaaagagcaccaaccuggugaagaacaagugcgugaacuucaacuucaauggccugaccggcaccggcgugcugaccgagagcaacaagaaguuccugcccuuccagcaguucggccgggauaucgccgacaccaccgacgcagugcgggacccccagacccuggagauccuggacaucaccccaugcagcuucggcggcgugagcgucaucacccccggcacaaacaccagcaaccagguggccgugcuguaccagggagugaacugcaccgaggugcccguggccauccacgccgaccagcugacccccaccuggcggguguacagcaccggcagcaacguguuccagacccgggccggcugccugaucggcgccgagcacgugaacaacuccuacgagugcgacauccccaucggcgcuggcaucugcgccagcuaccagacccagaccaacagcccccggcgggcccggagcguggccagccagagcaucaucgccuacaccaugagcuuaggcgccgagaacagcguggccuacagcaacaacagcaucgcgaucccuaccaacuucaccaucagcgugaccaccgagauacugcccgugagcaugaccaagaccagcguggacuguaccauguacaucugcggcgacagcaccgagugcagcaaccugcugcugcaguacggcagcuucugcacccagcugaaccgggcccugaccggcaucgccguggagcaggacaagaacacccaagagguguucgcccaggugaagcagaucuacaagacucccccaaucaaggacuucggcggcuucaacuucagccagauccugcccgaccccagcaagcccagcaagcggagcuucaucgaggaccugcuguucaacaaggugacccuggccgacgccggcuucaucaagcaguacggcgacugccugggggauaucgccgcucgggaccugaucugcgcccagaaguucaacggccugaccgugcugcccccucugcugaccgacgagaugaucgcccaguacaccagcgcccugcuugccggcaccaucaccagcggcuggaccuucggcgccggcgcagcccugcagauccccuucgccaugcagauggccuaccgguucaacggcaucggcgugacccagaacgugcuguacgagaaccagaagcugaucgccaaccaguucaacagcgccaucggcaagauccaggacagccugagcagcaccgccagcgcccugggcaagcugcaggacguggugaaccagaacgcucaggcccugaacacccuggugaagcagcugagcagcaacuucggcgccaucagcucagugcugaacgacauccugagcaggcuggaucccccagaggccgaggugcagaucgaccggcugaucaccggccggcugcagagccugcagaccuacgugacccagcagcugauccgggccgccgagauccgggccagcgccaaucuggcagccaccaagaugagcgagugcgugcugggccagagcaagcggguggacuuuugcggcaagggcuaccaccugaugagcuucccccagagcgcuccccacggcgugguguuccuccacgugacauacguccccgcccaggagaagaacuucaccaccgcccccgccauuugccacgacggcaaggcccacuucccccgggagggaguguucgugagcaacggcacccacugguucgugacccagcggaacuucuacgagccucagaucaucaccaccgacaacaccuucgugagcggcaacugcgacguggugaucggcaucgugaacaacaccguguacgacccccugcagcccgagcuggacagcuucaaggaggagcuggacaaguacuucaagaaccacaccagcccagacguggaccugggcgacaucagcggcaucaacgccagcguggugaacauccagaaggagaucgaccggcugaacgagguggccaagaaccugaacgagagccugaucgaccugcaggagcugggcaaguacgagcaguacaucaaguggcccugguacaucuggcugggcuucaucgccggccugaucgccaucgugauggugaccaucaugcugugcugcaugaccagcugcuguagcugccugaagggcugcugcagcugcggcagcugcugcaaguucgacgaggacgacagcgagcccgugcugaagggcgugaagcugcacuacaccugauaauaggcuggagccucgguggccuagcuucuugccccuugggccuccccccagccccuccuccccuuccugcacccguacccccguggucuuugaauaaagucugagugggcggcaaaaaaaaaaaaaaaaaaaaaaaaaaaaaaaaaaaaaaaaaaaaaaaaaaaaaaaaaaaaaaaaaaaaaaaaaaaaaaaaaaaaaaaaaaaaaaaaaaaaucuag

SEQ ID NO: 26655 - RNA, 4100 nt, Artificial Sequence
  SARS-CoV-2/Wuhan/WIV05/2019__EPI_ISL_402128 spike protein mRNA gc (1-1273)(K986P_V987P_S477N_D614G)
gggaaauaagagagaaaagaagaguaagaagaaauauaagaccccggcgccgccaccauguucguguuccuggugcugcugccccuggugagcagccagugcgugaaccugaccacccggacccagcugcccccugccuacaccaacagcuucacccggggcguguacuaccccgacaagguguuccggagcagcgugcugcacagcacccaggaccuguuccugcccuucuucagcaacgugaccugguuccacgccauccacgugagcggcaccaacggcaccaagcgguucgacaacccagugcugcccuucaacgacggcguguacuucgccagcaccgagaagucaaacaucauccggggcuggaucuucggcaccacccuggacagcaagacacagagccugcugaucgugaacaacgccaccaacguggugaucaaggugugcgaguuucaguucugcaacgaccccuuccugggcguguacuaccacaagaacaacaagagcuggauggagagcgaguuccgggucuacagcagcgcuaacaauugcaccuucgaguacgugagccagcccuuccugauggaccucgagggcaagcagggcaacuucaagaaccugcgggaguucguguucaagaacaucgauggcuacuucaagaucuacagcaagcacacccccaucaaccuggugcgggaccugccccagggauucagcgcccuggagccucugguggaccugcccaucggcaucaacaucaccagguuccagacccugcuggcccugcaccggagcuaccugacccccggcgacagcagcagcggcuggaccgccggcgccgccgcauacuacgugggcuaccugcagccacggaccuuccugcugaaguacaacgagaacggcaccaucaccgacgccguggacugcgcccuggacccccugagcgagaccaagugcacccuaaagagcuucaccguggagaagggcaucuaccagaccagcaacuuccgggugcagcccacugagagcaucgugcgguuccccaacauuaccaaccugugucccuucggcgagguguucaacgccacccgguucgccagcguguacgccuggaaccggaagcggaucagcaacugcguggccgacuacagcgugcuguacaacagcgccagcuucagcaccuucaagugcuacggcgugagcccuaccaagcugaacgaccugugcuucaccaacguguacgcugacagcuucgugauccggggcgacgaggugcggcagaucgcccccggccagaccggcaagaucgccgacuacaacuacaagcugcccgacgacuucaccggcugcgugaucgccuggaacagcaacaaccuggacagcaaggugggcggcaacuacaacuaccuguaccggcuguuccguaagagcaaccugaagccauucgagcgggacaucagcaccgagaucuaccaggccggcaacacccccugcaacgguguggagggcuuuaacugcuacuucccccugcagagcuacggcuuccagcccaccaacggcgugggcuaccagcccuaccgggugguggugcugagcuucgagcugcugcacgcccccgccaccgugugcggcccuaaaaagagcaccaaccuggugaagaacaagugcgugaauuucaacuucaacggccugaccggcaccggcgugcugaccgagagcaacaagaaguuccugcccuuccagcaguucggccgggauaucgccgacaccaccgacgcagugcgggacccccagacccuggagauccuggacaucaccccaugcagcuucggcggcgugagcgucaucacccccggcacaaacaccagcaaccagguggccgugcuguaccagggagugaacugcaccgaggugcccguggccauccacgccgaccagcugacccccaccuggcggguguacagcaccggcagcaacguguuccagacccgggccggcugccugaucggcgccgagcacgugaacaacagcuacgagugcgacauccccaucggcgcuggcaucugcgccuccuaccagacccagaccaacagcccccggcgggcccggagcguggccagccagagcaucaucgccuacaccaugagcuuaggcgccgagaacagcguggccuacagcaacaacagcaucgcgaucccuaccaacuucaccaucagcgugaccaccgagauacugcccgugagcaugaccaagaccagcguggacuguaccauguacaucugcggcgacagcaccgagugcagcaaccugcugcugcaguacggcagcuucugcacccagcugaaccgggcccugaccggcaucgccguggagcaggacaagaacacccaagagguguucgcccaggugaagcagaucuacaagacucccccaaucaaggacuucggcggcuucaacuucagccagauccugcccgaccccagcaagcccagcaagcggagcuucaucgaggaccugcuguucaacaaggugacccuggccgacgccggcuucaucaagcaguacggcgacugccugggggauaucgccgcucgggaccugaucugcgcccagaaguucaacggccugaccgugcugcccccucugcugaccgacgagaugaucgcccaguacaccagcgcccugcuugccggcaccaucaccagcggcuggaccuucggcgccggcgcagcccugcagauccccuucgccaugcagauggccuaccgguucaacggcaucggcgugacccagaacgugcuguacgagaaccagaagcugaucgccaaccaguucaacagcgccaucggcaagauccaggacagccugagcagcaccgccagcgcccugggcaagcugcaggacguggugaaccagaacgcucaggcccugaacacccuggugaagcagcugagcagcaauuucggcgccaucagcagcgugcugaacgacauccugucaaggcuggaucccccagaggccgaggugcagaucgaccggcugaucaccggccggcugcagagccugcagaccuacgugacccagcagcugauccgggccgccgagauccgggccagcgccaaccuggcagccaccaagaugagcgagugcgugcugggccagagcaagcggguggacuuuugcggcaagggcuaccaccugaugagcuucccccagagcgcuccccacggcgugguguuccuccacgugacauacguccccgcccaggagaagaacuucaccaccgcccccgccauuugccacgacggcaaggcccacuucccccgggagggaguguucgugagcaacggcacccacugguucgugacccagcggaacuucuacgagccucagaucaucaccaccgacaacaccuucgugagcggcaacugcgacguggugaucggcaucgugaacaacaccguguacgacccccugcagcccgagcuggacagcuucaaggaggagcuggacaaguacuucaagaaccacaccagcccagacguggaccugggcgacaucagcggcaucaacgccagcguggugaacauccagaaggagaucgaccggcugaacgagguggccaagaaccugaacgagagccugaucgaccugcaggagcugggcaaguacgagcaguacaucaaguggcccugguacaucuggcugggcuucaucgccggccugaucgccaucgugauggugaccaucaugcugugcugcaugaccagcugcuguagcugccugaagggcugcugcagcugcggcagcugcugcaaguucgacgaggacgacagcgagcccgugcugaagggcgugaagcugcacuacaccugauaauaggcuggagccucgguggccuagcuucuugccccuugggccuccccccagccccuccuccccuuccugcacccguacccccguggucuuugaauaaagucugagugggcggcaaaaaaaaaaaaaaaaaaaaaaaaaaaaaaaaaaaaaaaaaaaaaaaaaaaaaaaaaaaaaaaaaaaaaaaaaaaaaaaaaaaaaaaaaaaaaaaaaaaaucuag

SEQ ID NO: 26656 - RNA, 4100 nt, Artificial Sequence
  SARS-CoV-2/Wuhan/WIV05/2019__EPI_ISL_402128 spike protein mRNA gc (1-1273)(K986P_V987P_N501Y_D614G)
gggaaauaagagagaaaagaagaguaagaagaaauauaagaccccggcgccgccaccauguucguguuccuggugcugcugccccuggugagcagccagugcgugaaccugaccacccggacccagcugcccccugccuacaccaacagcuucacccggggcguguacuaccccgacaagguguuccggagcagcgugcugcacagcacccaggaccuguuccugcccuucuucagcaacgugaccugguuccacgccauccacgugagcggcaccaacggcaccaagcgguucgacaacccagugcugcccuucaacgacggcguguacuucgccagcaccgagaagucaaacaucauccggggcuggaucuucggcaccacccuggacagcaagacacagagccugcugaucgugaacaacgccaccaacguggugaucaaggugugcgaguuucaguucugcaacgaccccuuccugggcguguacuaccacaagaacaacaagagcuggauggagagcgaguuccgggucuacagcagcgcuaacaauugcaccuucgaguacgugagccagcccuuccugauggaccucgagggcaagcagggcaacuucaagaaccugcgggaguucguguucaagaacaucgauggcuacuucaagaucuacagcaagcacacccccaucaaccuggugcgggaccugccccagggauucagcgcccuggagccucugguggaccugcccaucggcaucaacaucaccagguuccagacccugcuggcccugcaccggagcuaccugacccccggcgacagcagcagcggcuggaccgccggcgccgccgcauacuacgugggcuaccugcagccacggaccuuccugcugaaguacaacgagaacggcaccaucaccgacgccguggacugcgcccuggacccccugagcgagaccaagugcacccuaaagagcuucaccguggagaagggcaucuaccagaccagcaacuuccgggugcagcccacugagagcaucgugcgguuccccaacauuaccaaccugugucccuucggcgagguguucaacgccacccgguucgccagcguguacgccuggaaccggaagcggaucagcaacugcguggccgacuacagcgugcuguacaacagcgccagcuucagcaccuucaagugcuacggcgugagcccuaccaagcugaacgaccugugcuucaccaacguguacgcugacagcuucgugauccggggcgacgaggugcggcagaucgcccccggccagaccggcaagaucgccgacuacaacuacaagcugcccgacgacuucaccggcugcgugaucgccuggaacagcaacaaccuggacagcaaggugggcggcaacuacaacuaccuguaccggcuguuccguaagagcaaccugaagccauucgagcgggacaucagcaccgagaucuaccaggccggcagcacccccugcaacgguguggagggcuuuaacugcuacuucccccugcagagcuacggcuuccagcccaccuacggcgugggcuaccagcccuaccgggugguggugcugagcuucgagcugcugcacgcccccgccaccgugugcggcccuaaaaagagcaccaaccuggugaagaacaagugcgugaacuucaacuucaauggccugaccggcaccggcgugcugaccgagagcaacaagaaguuccugcccuuccagcaguucggccgggauaucgccgacaccaccgacgcagugcgggacccccagacccuggagauccuggacaucaccccaugcagcuucggcggcgugagcgucaucacccccggcacaaacaccagcaaccagguggccgugcuguaccagggagugaacugcaccgaggugcccguggccauccacgccgaccagcugacccccaccuggcggguguacagcaccggcagcaacguguuccagacccgggccggcugccugaucggcgccgagcacgugaacaacuccuacgagugcgacauccccaucggcgcuggcaucugcgccagcuaccagacccagaccaacagcccccggcgggcccggagcguggccagccagagcaucaucgccuacaccaugagcuuaggcgccgagaacagcguggccuacagcaacaacagcaucgcgaucccuaccaacuucaccaucagcgugaccaccgagauacugcccgugagcaugaccaagaccagcguggacuguaccauguacaucugcggcgacagcaccgagugcagcaaccugcugcugcaguacggcagcuucugcacccagcugaaccgggcccugaccggcaucgccguggagcaggacaagaacacccaagagguguucgcccaggugaagcagaucuacaagacucccccaaucaaggacuucggcggcuucaacuucagccagauccugcccgaccccagcaagcccagcaagcggagcuucaucgaggaccugcuguucaacaaggugacccuggccgacgccggcuucaucaagcaguacggcgacugccugggggauaucgccgcucgggaccugaucugcgcccagaaguucaacggccugaccgugcugcccccucugcugaccgacgagaugaucgcccaguacaccagcgcccugcuugccggcaccaucaccagcggcuggaccuucggcgccggcgcagcccugcagauccccuucgccaugcagauggccuaccgguucaacggcaucggcgugacccagaacgugcuguacgagaaccagaagcugaucgccaaccaguucaacagcgccaucggcaagauccaggacagccugagcagcaccgccagcgcccugggcaagcugcaggacguggugaaccagaacgcucaggcccugaacacccuggugaagcagcugagcagcaacuucggcgccaucagcucagugcugaacgacauccugagcaggcuggaucccccagaggccgaggugcagaucgaccggcugaucaccggccggcugcagagccugcagaccuacgugacccagcagcugauccgggccgccgagauccgggccagcgccaaucuggcagccaccaagaugagcgagugcgugcugggccagagcaagcggguggacuuuugcggcaagggcuaccaccugaugagcuucccccagagcgcuccccacggcgugguguuccuccacgugacauacguccccgcccaggagaagaacuucaccaccgcccccgccauuugccacgacggcaaggcccacuucccccgggagggaguguucgugagcaacggcacccacugguucgugacccagcggaacuucuacgagccucagaucaucaccaccgacaacaccuucgugagcggcaacugcgacguggugaucggcaucgugaacaacaccguguacgacccccugcagcccgagcuggacagcuucaaggaggagcuggacaaguacuucaagaaccacaccagcccagacguggaccugggcgacaucagcggcaucaacgccagcguggugaacauccagaaggagaucgaccggcugaacgagguggccaagaaccugaacgagagccugaucgaccugcaggagcugggcaaguacgagcaguacaucaaguggcccugguacaucuggcugggcuucaucgccggccugaucgccaucgugauggugaccaucaugcugugcugcaugaccagcugcuguagcugccugaagggcugcugcagcugcggcagcugcugcaaguucgacgaggacgacagcgagcccgugcugaagggcgugaagcugcacuacaccugauaauaggcuggagccucgguggccuagcuucuugccccuugggccuccccccagccccuccuccccuuccugcacccguacccccguggucuuugaauaaagucugagugggcggcaaaaaaaaaaaaaaaaaaaaaaaaaaaaaaaaaaaaaaaaaaaaaaaaaaaaaaaaaaaaaaaaaaaaaaaaaaaaaaaaaaaaaaaaaaaaaaaaaaaaucuag

SEQ ID NO: 26657 - RNA, 4094 nt, Artificial Sequence
  SARS-CoV-2/Wuhan/WIV05/2019__EPI_ISL_402128 spike protein mRNA gc (1-1273)(K986P_V987P_H69del_V70del_D614G)
gggaaauaagagagaaaagaagaguaagaagaaauauaagaccccggcgccgccaccauguucguguuccuggugcugcugccccuggugagcagccagugcgugaaccugaccacccggacccagcugcccccugccuacaccaacagcuucacccggggcguguacuaccccgacaagguguuccggagcagcgugcugcacagcacccaggaccuguuccugcccuucuucagcaacgugaccugguuccacgccaucagcggcaccaacggcaccaagcgguucgacaacccagugcugcccuucaacgacggcguguacuucgccagcaccgagaagucaaacaucauccggggcuggaucuucggcaccacccuggacagcaagacacagagccugcugaucgugaacaacgccaccaacguggugaucaaggugugcgaguuucaguucugcaacgaccccuuccugggcguguacuaccacaagaacaacaagagcuggauggagagcgaguuccggguguacagcagcgcuaacaauugcaccuucgaguacgucagccagcccuuccugauggaccucgagggcaagcagggcaacuucaagaaccugcgggaguucguguucaagaacaucgauggcuacuucaagaucuacagcaagcacacccccaucaaccuggugcgggaccugccccagggauucagcgcccuggagccucugguggaccugcccaucggcaucaacaucaccagguuccagacccugcuggcccugcaccggagcuaccugacccccggcgacagcagcagcggcuggaccgccggcgccgccgcauacuacgugggcuaccugcagccacggaccuuccugcugaaguacaacgagaacggcaccaucaccgacgccguggacugcgcccuggacccccugagcgagaccaagugcacccuaaagagcuucaccguggagaagggcaucuaccagaccagcaacuuccgggugcagcccacugagagcaucgugcgguuccccaacauuaccaaccugugucccuucggcgagguguucaacgccacccgguucgccagcguguacgccuggaaccggaagcggaucagcaacugcguggccgacuacagcgugcuguacaacagcgccagcuucagcaccuucaagugcuacggcgugagcccuaccaagcugaacgaccugugcuucaccaacguguacgcugacagcuucgugauccggggcgacgaggugcggcagaucgcccccggccagaccggcaagaucgccgacuacaacuacaagcugcccgacgacuucaccggcugcgugaucgccuggaacagcaacaaccuggacagcaaggugggcggcaacuacaacuaccuguaccggcuguuccguaagagcaaccugaagccauucgagcgggacaucagcaccgagaucuaccaggccggcagcacccccugcaacgguguggagggcuuuaacugcuacuucccccugcagagcuacggcuuccagcccaccaacggcgugggcuaccagcccuaccgggugguggugcugagcuucgagcugcugcacgcccccgccaccgugugcggcccuaaaaagagcaccaaccuggugaagaacaagugcgugaacuucaauuucaacggccugaccggcaccggcgugcugaccgagagcaacaagaaguuccugcccuuccagcaguucggccgggauaucgccgacaccaccgacgcagugcgggacccccagacccuggagauccuggacaucaccccaugcagcuucggcggcgugagcgugaucacccccggcacaaacaccagcaaccaggucgccgugcuguaccagggagugaacugcaccgaggugcccguggccauccacgccgaccagcugacccccaccuggcggguguacagcaccggcagcaacguguuccagacccgggccggcugccugaucggcgccgagcacgugaacaacuccuacgagugcgacauccccaucggcgcuggcaucugcgccagcuaccagacccagaccaacagcccccggcgggcccggagcguggccagccagagcaucaucgccuacaccaugagcuuaggcgccgagaacagcguggccuacagcaacaacagcaucgcgaucccuaccaacuucaccaucagcgugaccaccgagauacugcccgugagcaugaccaagaccagcguggacuguaccauguacaucugcggcgacagcaccgagugcagcaaccugcugcugcaguacggcagcuucugcacccagcugaaccgggcccugaccggcaucgccguggagcaggacaagaacacccaagagguguucgcccaggugaagcagaucuacaagacucccccaaucaaggacuucggcggcuucaacuucagccagauccugcccgaccccagcaagcccagcaagcggagcuucaucgaggaccugcuguucaacaaggugacccuggccgacgccggcuucaucaagcaguacggcgacugccugggggauaucgccgcucgggaccugaucugcgcccagaaguucaacggccugaccgugcugcccccucugcugaccgacgagaugaucgcccaguacaccagcgcccugcuugccggcaccaucaccagcggcuggaccuucggcgccggcgcagcccugcagauccccuucgccaugcagauggccuaccgguucaacggcaucggcgugacccagaacgugcuguacgagaaccagaagcugaucgccaaccaguucaacagcgccaucggcaagauccaggacagccugagcagcaccgccagcgcccugggcaagcugcaggacguggugaaccagaacgcucaggcccugaacacccuggugaagcagcugagcagcaacuucggcgccaucagcucagugcugaaugacauccugagcaggcuggaucccccagaggccgaggugcagaucgaccggcugaucaccggccggcugcagagccugcagaccuacgugacccagcagcugauccgggccgccgagauccgggccagcgccaaccuggcagccaccaagaugagcgagugcgugcugggccagagcaagcggguggacuuuugcggcaagggcuaccaccugaugagcuucccccagagcgcuccccacggcgugguguuccuccacgugacauacgugcccgcccaggagaagaacuucaccaccgcccccgccauuugccacgacggcaaggcccacuucccccgggagggagucuucgugagcaacggcacccacugguucgugacccagcggaacuucuacgagccucagaucaucaccaccgacaacaccuucgugagcggcaacugcgacguggugaucggcaucgugaacaacaccguguacgacccccugcagcccgagcuggacagcuucaaggaggagcuggacaaguacuucaagaaccacaccagcccagacguggaccugggcgacaucagcggcaucaacgccagcguggugaacauccagaaggagaucgaccggcugaacgagguggccaagaaccugaacgagagccugaucgaccugcaggagcugggcaaguacgagcaguacaucaaguggcccugguacaucuggcugggcuucaucgccggccugaucgccaucgugauggugaccaucaugcugugcugcaugaccagcugcuguagcugccugaagggcugcugcagcugcggcagcugcugcaaguucgacgaggacgacagcgagcccgugcugaagggcgugaagcugcacuacaccugauaauaggcuggagccucgguggccuagcuucuugccccuugggccuccccccagccccuccuccccuuccugcacccguacccccguggucuuugaauaaagucugagugggcggcaaaaaaaaaaaaaaaaaaaaaaaaaaaaaaaaaaaaaaaaaaaaaaaaaaaaaaaaaaaaaaaaaaaaaaaaaaaaaaaaaaaaaaaaaaaaaaaaaaaaucuag

SEQ ID NO: 26658 - RNA, 4100 nt, Artificial Sequence
  SARS-CoV-2/Wuhan/WIV05/2019__EPI_ISL_402128 spike protein mRNA gc (1-1273)(K986P_V987P_Y453F_D614G)
gggaaauaagagagaaaagaagaguaagaagaaauauaagaccccggcgccgccaccauguucguguuccuggugcugcugccccuggugagcagccagugcgugaaccugaccacccggacccagcugcccccugccuacaccaacagcuucacccggggcguguacuaccccgacaagguguuccggagcagcgugcugcacagcacccaggaccuguuccugcccuucuucagcaacgugaccugguuccacgccauccacgugagcggcaccaacggcaccaagcgguucgacaacccagugcugcccuucaacgacggcguguacuucgccagcaccgagaagucaaacaucauccggggcuggaucuucggcaccacccuggacagcaagacacagagccugcugaucgugaacaacgccaccaacguggugaucaaggugugcgaguuucaguucugcaacgaccccuuccugggcguguacuaccacaagaacaacaagagcuggauggagagcgaguuccgggucuacagcagcgcuaacaauugcaccuucgaguacgugagccagcccuuccugauggaccucgagggcaagcagggcaacuucaagaaccugcgggaguucguguucaagaacaucgauggcuacuucaagaucuacagcaagcacacccccaucaaccuggugcgggaccugccccagggauucagcgcccuggagccucugguggaccugcccaucggcaucaacaucaccagguuccagacccugcuggcccugcaccggagcuaccugacccccggcgacagcagcagcggcuggaccgccggcgccgccgcauacuacgugggcuaccugcagccacggaccuuccugcugaaguacaacgagaacggcaccaucaccgacgccguggacugcgcccuggacccccugagcgagaccaagugcacccuaaagagcuucaccguggagaagggcaucuaccagaccagcaacuuccgggugcagcccacugagagcaucgugcgguuccccaacauuaccaaccugugucccuucggcgagguguucaacgccacccgguucgccagcguguacgccuggaaccggaagcggaucagcaacugcguggccgacuacagcgugcuguacaacagcgccagcuucagcaccuucaagugcuacggcgugagcccuaccaagcugaacgaccugugcuucaccaacguguacgcugacagcuucgugauccggggcgacgaggugcggcagaucgcccccggccagaccggcaagaucgccgacuacaacuacaagcugcccgacgacuucaccggcugcgugaucgccuggaacagcaacaaccuggacagcaaggugggcggcaacuacaacuaccuguuccggcuguuccguaagagcaaccugaagccauuugagcgggacaucagcaccgagaucuaccaggccggcagcacccccugcaacgguguggagggcuucaacugcuacuucccccugcagagcuacggcuuccagcccaccaacggcgugggcuaccagcccuaccgggugguggugcugagcuucgagcugcugcacgcccccgccaccgugugcggcccuaaaaagagcaccaaccuggugaagaacaagugcgugaacuucaauuucaacggccugaccggcaccggcgugcugaccgagagcaacaagaaguuccugcccuuccagcaguucggccgggauaucgccgacaccaccgacgcagugcgggacccccagacccuggagauccuggacaucaccccaugcagcuucggcggcgugagcgucaucacccccggcacaaacaccagcaaccagguggccgugcuguaccagggagugaacugcaccgaggugcccguggccauccacgccgaccagcugacccccaccuggcggguguacagcaccggcagcaacguguuccagacccgggccggcugccugaucggcgccgagcacgugaacaacuccuacgagugcgacauccccaucggcgcuggcaucugcgccagcuaccagacccagaccaacagcccccggcgggcccggagcguggccagccagagcaucaucgccuacaccaugagcuuaggcgccgagaacagcguggccuacagcaacaacagcaucgcgaucccuaccaacuucaccaucagcgugaccaccgagauacugcccgugagcaugaccaagaccagcguggacuguaccauguacaucugcggcgacagcaccgagugcagcaaccugcugcugcaguacggcagcuucugcacccagcugaaccgggcccugaccggcaucgccguggagcaggacaagaacacccaagagguguucgcccaggugaagcagaucuacaagacucccccaaucaaggacuucggcggcuucaacuucagccagauccugcccgaccccagcaagcccagcaagcggagcuucaucgaggaccugcuguucaacaaggugacccuggccgacgccggcuucaucaagcaguacggcgacugccugggggauaucgccgcucgggaccugaucugcgcccagaaguucaacggccugaccgugcugcccccucugcugaccgacgagaugaucgcccaguacaccagcgcccugcuugccggcaccaucaccagcggcuggaccuucggcgccggcgcagcccugcagauccccuucgccaugcagauggccuaccgguucaacggcaucggcgugacccagaacgugcuguacgagaaccagaagcugaucgccaaccaguucaacagcgccaucggcaagauccaggacagccugagcagcaccgccagcgcccugggcaagcugcaggacguggugaaccagaacgcucaggcccugaacacccuggugaagcagcugagcagcaacuuuggcgccaucagcucagugcugaaugacauccugagcaggcuggaucccccagaggccgaggugcagaucgaccggcugaucaccggccggcugcagagccugcagaccuacgugacccagcagcugauccgggccgccgagauccgggccagcgccaaccuggcagccaccaagaugagcgagugcgugcugggccagagcaagcggguggacuucugcggcaagggcuaccaccugaugagcuucccccagagcgcuccccacggcgugguguuccuccacgugacauacguccccgcccaggagaagaacuucaccaccgcccccgccauuugccacgacggcaaggcccacuucccccgggagggaguguucgugagcaacggcacccacugguucgugacccagcggaacuucuacgagccucagaucaucaccaccgacaacaccuucgugagcggcaacugcgacguggugaucggcaucgugaacaacaccguguacgacccccugcagcccgagcuggacagcuucaaggaggagcuggacaaguacuucaagaaccacaccagcccagacguggaccugggcgacaucagcggcaucaacgccagcguggugaacauccagaaggagaucgaccggcugaacgagguggccaagaaccugaacgagagccugaucgaccugcaggagcugggcaaguacgagcaguacaucaaguggcccugguacaucuggcugggcuucaucgccggccugaucgccaucgugauggugaccaucaugcugugcugcaugaccagcugcuguagcugccugaagggcugcugcagcugcggcagcugcugcaaguucgacgaggacgacagcgagcccgugcugaagggcgugaagcugcacuacaccugauaauaggcuggagccucgguggccuagcuucuugccccuugggccuccccccagccccuccuccccuuccugcacccguacccccguggucuuugaauaaagucugagugggcggcaaaaaaaaaaaaaaaaaaaaaaaaaaaaaaaaaaaaaaaaaaaaaaaaaaaaaaaaaaaaaaaaaaaaaaaaaaaaaaaaaaaaaaaaaaaaaaaaaaaaucuag

SEQ ID NO: 26659 - RNA, 4100 nt, Artificial Sequence
  SARS-CoV-2/Wuhan/WIV05/2019__EPI_ISL_402128 spike protein mRNA gc (1-1273)(K986P_V987P_D614G_I692V)
gggaaauaagagagaaaagaagaguaagaagaaauauaagaccccggcgccgccaccauguucguguuccuggugcugcugccccuggugagcagccagugcgugaaccugaccacccggacccagcugcccccugccuacaccaacagcuucacccggggcguguacuaccccgacaagguguuccggagcagcgugcugcacagcacccaggaccuguuccugcccuucuucagcaacgugaccugguuccacgccauccacgugagcggcaccaacggcaccaagcgguucgacaacccagugcugcccuucaacgacggcguguacuucgccagcaccgagaagucaaacaucauccggggcuggaucuucggcaccacccuggacagcaagacacagagccugcugaucgugaacaacgccaccaacguggugaucaaggugugcgaguuucaguucugcaacgaccccuuccugggcguguacuaccacaagaacaacaagagcuggauggagagcgaguuccgggucuacagcagcgcuaacaauugcaccuucgaguacgugagccagcccuuccugauggaccucgagggcaagcagggcaacuucaagaaccugcgggaguucguguucaagaacaucgauggcuacuucaagaucuacagcaagcacacccccaucaaccuggugcgggaccugccccagggauucagcgcccuggagccucugguggaccugcccaucggcaucaacaucaccagguuccagacccugcuggcccugcaccggagcuaccugacccccggcgacagcagcagcggcuggaccgccggcgccgccgcauacuacgugggcuaccugcagccacggaccuuccugcugaaguacaacgagaacggcaccaucaccgacgccguggacugcgcccuggacccccugagcgagaccaagugcacccuaaagagcuucaccguggagaagggcaucuaccagaccagcaacuuccgggugcagcccacugagagcaucgugcgguuccccaacauuaccaaccugugucccuucggcgagguguucaacgccacccgguucgccagcguguacgccuggaaccggaagcggaucagcaacugcguggccgacuacagcgugcuguacaacagcgccagcuucagcaccuucaagugcuacggcgugagcccuaccaagcugaacgaccugugcuucaccaacguguacgcugacagcuucgugauccggggcgacgaggugcggcagaucgcccccggccagaccggcaagaucgccgacuacaacuacaagcugcccgacgacuucaccggcugcgugaucgccuggaacagcaacaaccuggacagcaaggugggcggcaacuacaacuaccuguaccggcuguuccguaagagcaaccugaagccauucgagcgggacaucagcaccgagaucuaccaggccggcagcacccccugcaacgguguggagggcuuuaacugcuacuucccccugcagagcuacggcuuccagcccaccaacggcgugggcuaccagcccuaccgggugguggugcugagcuucgagcugcugcacgcccccgccaccgugugcggcccuaaaaagagcaccaaccuggugaagaacaagugcgugaacuucaauuucaacggccugaccggcaccggcgugcugaccgagagcaacaagaaguuccugcccuuccagcaguucggccgggauaucgccgacaccaccgacgcagugcgggacccccagacccuggagauccuggacaucaccccaugcagcuucggcggcgugagcgucaucacccccggcacaaacaccagcaaccagguggccgugcuguaccagggagugaacugcaccgaggugcccguggccauccacgccgaccagcugacccccaccuggcggguguacagcaccggcagcaacguguuccagacccgggccggcugccugaucggcgccgagcacgugaacaacuccuacgagugcgacauccccaucggcgcuggcaucugcgccagcuaccagacccagaccaacagcccccggcgggcccggagcguggccagccagagcgugaucgccuacaccaugagcuuaggcgccgagaacagcguggccuacagcaacaacagcaucgcgaucccuaccaacuucaccaucagcgugaccaccgagauccugcccgugagcaugaccaagaccagcguggacuguaccauguacauaugcggcgacagcaccgagugcagcaaccugcugcugcaguacggcagcuucugcacccagcugaaccgggcccugaccggcaucgccguggagcaggacaagaacacccaagagguguucgcccaggugaagcagaucuacaagacucccccaaucaaggacuucggcggcuucaacuucagccagauccugcccgaccccagcaagcccagcaagcggagcuucaucgaggaccugcuguucaacaaggugacccuggccgacgccggcuucaucaagcaguacggcgacugccugggggauaucgccgcucgggaccugaucugcgcccagaaguucaacggccugaccgugcugcccccucugcugaccgacgagaugaucgcccaguacaccagcgcccugcuugccggcaccaucaccagcggcuggaccuucggcgccggcgcagcccugcagauccccuucgccaugcagauggccuaccgguucaacggcaucggcgugacccagaacgugcuguacgagaaccagaagcugaucgccaaccaguucaacagcgccaucggcaagauccaggacagccugagcagcaccgccagcgcccugggcaagcugcaggacguggugaaccagaacgcucaggcccugaacacccuggugaagcagcugagcagcaacuucggcgccaucagcucagugcugaaugacauccugagcaggcuggaucccccagaggccgaggugcagaucgaccggcugaucaccggccggcugcagagccugcagaccuacgugacccagcagcugauccgggccgccgagauccgggccagcgccaaccuggcagccaccaagaugagcgagugcgugcugggccagagcaagcggguggacuuuugcggcaagggcuaccaccugaugagcuucccccagagcgcuccccacggcgugguguuccuccacgucacauacgugcccgcccaggagaagaacuucaccaccgcccccgccaucugccacgacggcaaggcccacuucccccgggagggaguguucgugagcaacggcacccacugguucgugacccagcggaacuucuacgagccucagauuaucaccaccgacaacaccuucgugagcggcaacugcgacguggugaucggcaucgugaacaacaccguguacgacccccugcagcccgagcuggacagcuucaaggaggagcuggacaaguacuucaagaaccacaccagcccagacguggaccugggcgacaucagcggcaucaacgccagcguggugaacauccagaaggagaucgaccggcugaacgagguggccaagaaccugaacgagagccugaucgaccugcaggagcugggcaaguacgagcaguacaucaaguggcccugguacaucuggcugggcuucaucgccggccugaucgccaucgugauggugaccaucaugcugugcugcaugaccagcugcuguagcugccugaagggcugcugcagcugcggcagcugcugcaaguucgacgaggacgacagcgagcccgugcugaagggcgugaagcugcacuacaccugauaauaggcuggagccucgguggccuagcuucuugccccuugggccuccccccagccccuccuccccuuccugcacccguacccccguggucuuugaauaaagucugagugggcggcaaaaaaaaaaaaaaaaaaaaaaaaaaaaaaaaaaaaaaaaaaaaaaaaaaaaaaaaaaaaaaaaaaaaaaaaaaaaaaaaaaaaaaaaaaaaaaaaaaaaucuag

SEQ ID NO: 26660 - RNA, 4100 nt, Artificial Sequence
  SARS-CoV-2/Wuhan/WIV05/2019__EPI_ISL_402128 spike protein mRNA gc (1-1273)(K986P_V987P_D614G_M1229I)
gggaaauaagagagaaaagaagaguaagaagaaauauaagaccccggcgccgccaccauguucguguuccuggugcugcugccccuggugagcagccagugcgugaaccugaccacccggacccagcugcccccugccuacaccaacagcuucacccggggcguguacuaccccgacaagguguuccggagcagcgugcugcacagcacccaggaccuguuccugcccuucuucagcaacgugaccugguuccacgccauccacgugagcggcaccaacggcaccaagcgguucgacaacccagugcugcccuucaacgacggcguguacuucgccagcaccgagaagucaaacaucauccggggcuggaucuucggcaccacccuggacagcaagacacagagccugcugaucgugaacaacgccaccaacguggugaucaaggugugcgaguuucaguucugcaacgaccccuuccugggcguguacuaccacaagaacaacaagagcuggauggagagcgaguuccgggucuacagcagcgcuaacaauugcaccuucgaguacgugagccagcccuuccugauggaccucgagggcaagcagggcaacuucaagaaccugcgggaguucguguucaagaacaucgauggcuacuucaagaucuacagcaagcacacccccaucaaccuggugcgggaccugccccagggauucagcgcccuggagccucugguggaccugcccaucggcaucaacaucaccagguuccagacccugcuggcccugcaccggagcuaccugacccccggcgacagcagcagcggcuggaccgccggcgccgccgcauacuacgugggcuaccugcagccacggaccuuccugcugaaguacaacgagaacggcaccaucaccgacgccguggacugcgcccuggacccccugagcgagaccaagugcacccuaaagagcuucaccguggagaagggcaucuaccagaccagcaacuuccgggugcagcccacugagagcaucgugcgguuccccaacauuaccaaccugugucccuucggcgagguguucaacgccacccgguucgccagcguguacgccuggaaccggaagcggaucagcaacugcguggccgacuacagcgugcuguacaacagcgccagcuucagcaccuucaagugcuacggcgugagcccuaccaagcugaacgaccugugcuucaccaacguguacgcugacagcuucgugauccggggcgacgaggugcggcagaucgcccccggccagaccggcaagaucgccgacuacaacuacaagcugcccgacgacuucaccggcugcgugaucgccuggaacagcaacaaccuggacagcaaggugggcggcaacuacaacuaccuguaccggcuguuccguaagagcaaccugaagccauucgagcgggacaucagcaccgagaucuaccaggccggcagcacccccugcaacgguguggagggcuuuaacugcuacuucccccugcagagcuacggcuuccagcccaccaacggcgugggcuaccagcccuaccgggugguggugcugagcuucgagcugcugcacgcccccgccaccgugugcggcccuaaaaagagcaccaaccuggugaagaacaagugcgugaacuucaauuucaacggccugaccggcaccggcgugcugaccgagagcaacaagaaguuccugcccuuccagcaguucggccgggauaucgccgacaccaccgacgcagugcgggacccccagacccuggagauccuggacaucaccccaugcagcuucggcggcgugagcgucaucacccccggcacaaacaccagcaaccagguggccgugcuguaccagggagugaacugcaccgaggugcccguggccauccacgccgaccagcugacccccaccuggcggguguacagcaccggcagcaacguguuccagacccgggccggcugccugaucggcgccgagcacgugaacaacuccuacgagugcgacauccccaucggcgcuggcaucugcgccagcuaccagacccagaccaacagcccccggcgggcccggagcguggccagccagagcaucaucgccuacaccaugagcuuaggcgccgagaacagcguggccuacagcaacaacagcaucgcgaucccuaccaacuucaccaucagcgugaccaccgagauacugcccgugagcaugaccaagaccagcguggacuguaccauguacaucugcggcgacagcaccgagugcagcaaccugcugcugcaguacggcagcuucugcacccagcugaaccgggcccugaccggcaucgccguggagcaggacaagaacacccaagagguguucgcccaggugaagcagaucuacaagacucccccaaucaaggacuucggcggcuucaacuucagccagauccugcccgaccccagcaagcccagcaagcggagcuucaucgaggaccugcuguucaacaaggugacccuggccgacgccggcuucaucaagcaguacggcgacugccugggggauaucgccgcucgggaccugaucugcgcccagaaguucaacggccugaccgugcugcccccucugcugaccgacgagaugaucgcccaguacaccagcgcccugcuugccggcaccaucaccagcggcuggaccuucggcgccggcgcagcccugcagauccccuucgccaugcagauggccuaccgguucaacggcaucggcgugacccagaacgugcuguacgagaaccagaagcugaucgccaaccaguucaacagcgccaucggcaagauccaggacagccugagcagcaccgccagcgcccugggcaagcugcaggacguggugaaccagaacgcucaggcccugaacacccuggugaagcagcugagcagcaacuucggcgccaucagcucagugcugaaugacauccugagcaggcuggaucccccagaggccgaggugcagaucgaccggcugaucaccggccggcugcagagccugcagaccuacgugacccagcagcugauccgggccgccgagauccgggccagcgccaaccuggcagccaccaagaugagcgagugcgugcugggccagagcaagcggguggacuuuugcggcaagggcuaccaccugaugagcuucccccagagcgcuccccacggcgugguguuccuccacgugacauacguccccgcccaggagaagaacuucaccaccgcccccgccauuugccacgacggcaaggcccacuucccccgggagggaguguucgugagcaacggcacccacugguucgugacccagcggaacuucuacgagccucagaucaucaccaccgacaacaccuucgugagcggcaacugcgacguggugaucggcaucgugaacaacaccguguacgacccccugcagcccgagcuggacagcuucaaggaggagcuggacaaguacuucaagaaccacaccagcccagacguggaccugggcgacaucagcggcaucaacgccagcguggugaacauccagaaggagaucgaccggcugaacgagguggccaagaaccugaacgagagccugaucgaccugcaggagcugggcaaguacgagcaguacaucaaguggcccugguacaucuggcugggcuucaucgccggccugaucgccaucgugaucgugaccaucaugcugugcugcaugaccagcugcuguagcugccugaagggcugcugcagcugcggcagcugcugcaaguucgacgaggacgacagcgagcccgugcugaagggcgugaagcugcacuacaccugauaauaggcuggagccucgguggccuagcuucuugccccuugggccuccccccagccccuccuccccuuccugcacccguacccccguggucuuugaauaaagucugagugggcggcaaaaaaaaaaaaaaaaaaaaaaaaaaaaaaaaaaaaaaaaaaaaaaaaaaaaaaaaaaaaaaaaaaaaaaaaaaaaaaaaaaaaaaaaaaaaaaaaaaaaucuag

SEQ ID NO: 26661 - RNA, 4094 nt, Artificial Sequence
  SARS-CoV-2/Wuhan/WIV05/2019__EPI_ISL_402128 spike protein mRNA gc (1-1273)(K986P_V987P_H69del_V70del_A222V_Y453F_S477N_D614G_I692V)
gggaaauaagagagaaaagaagaguaagaagaaauauaagaccccggcgccgccaccauguucguguuccuggugcugcugccccuggugagcagccagugcgugaaccugaccacccggacccagcugcccccugccuacaccaacagcuucacccggggcguguacuaccccgacaagguguuccggagcagcgugcugcacagcacccaggaccuguuccugcccuucuucagcaacgugaccugguuccacgccaucagcggcaccaacggcaccaagcgguucgacaacccagugcugcccuucaacgacggcguguacuucgccagcaccgagaagucaaacaucauccggggcuggaucuucggcaccacccuggacagcaagacacagagccugcugaucgugaacaacgccaccaacguggugaucaaggugugcgaguuucaguucugcaacgaccccuuccugggcguguacuaccacaagaacaacaagagcuggauggagagcgaguuccggguguacagcagcgcuaacaauugcaccuucgaguacgucagccagcccuuccugauggaccucgagggcaagcagggcaacuucaagaaccugcgggaguucguguucaagaacaucgauggcuacuucaagaucuacagcaagcacacccccaucaaccuggugcgggaccugccccagggauucagcgugcuggagccucugguggaccugcccaucggcaucaacaucaccagguuccagacccugcuggcccugcaccggagcuaccugacccccggcgacagcagcagcggcuggaccgccggcgccgccgccuacuacgugggcuaccugcagccacggaccuuccugcugaaguacaacgagaacggcaccaucaccgacgcaguggacugcgcccuggacccccugagcgagaccaagugcacccuaaagagcuucaccguggagaagggcaucuaccagaccagcaacuuccgggugcagcccacugagagcaucgugcgguuccccaacauuaccaaccugugucccuucggcgagguguucaacgccacccgguucgccagcguguacgccuggaaccggaagcggaucagcaacugcguggccgacuacagcgugcuguacaacagcgccagcuucagcaccuucaagugcuacggcgugagcccuaccaagcugaacgaccugugcuucaccaacguguacgccgacagcuucgugauccggggcgacgaggugcggcagaucgcucccggccagaccggcaagaucgccgacuacaacuacaagcugcccgacgacuucaccggcugcgugaucgccuggaacagcaacaaccuggacagcaaggugggcggcaacuacaacuaccuguuccggcuguuccguaagagcaaccugaagccauuugagcgggacaucagcaccgagaucuaccaggccggcaacacccccugcaacgguguggagggcuucaacugcuacuucccccugcagagcuacggcuuccagcccaccaacggcgugggcuaccagcccuaccgggugguggugcugagcuucgagcugcugcacgcccccgccaccgugugcggcccuaaaaagagcaccaaccuggugaagaacaagugcgugaauuucaacuucaacggccugaccggcaccggcgugcugaccgagagcaacaagaaguuccugcccuuccagcaguucggccgggauaucgccgacaccaccgacgccgugcgggacccccagacccuggagauccuggacaucaccccaugcagcuucggcggcgugagcgucaucacccccggcacaaacaccagcaaccagguggcagugcuguaccagggagugaacugcaccgaggugcccguggccauccacgccgaccagcugacccccaccuggcggguguacagcaccggcagcaacguguuccagacccgggccggcugccugaucggcgccgagcacgugaacaacagcuacgagugcgacauccccaucggcgccggcaucugcgcuuccuaccagacccagaccaacagcccccggcgggcccggagcguggccagccagagcgugaucgccuacaccaugagcuuaggcgccgagaacagcguggccuacagcaacaacagcaucgccaucccuaccaacuucaccaucagcgugaccaccgagauccugcccgugagcaugaccaagaccagcguggacuguaccauguacauaugcggcgacagcaccgagugcagcaaccugcugcugcaguacggcagcuucugcacccagcugaaccgggcgcugaccggcaucgccguggagcaggacaagaacacccaagagguguucgcccaggugaagcagaucuacaagacucccccaaucaaggacuucggcggcuucaacuucagccagauccugcccgaccccagcaagcccagcaagcggagcuucaucgaggaccugcuguucaacaaggugacccuggccgacgccggcuucaucaagcaguacggcgacugccugggggauaucgccgcccgggaccugaucugcgcucagaaguucaacggccugaccgugcugcccccucugcugaccgacgagaugaucgcccaguacaccagcgcccugcuugccggcaccaucaccagcggcuggaccuucggcgccggcgccgcacugcagauccccuucgccaugcagauggccuaccgguucaacggcaucggcgugacccagaacgugcuguacgagaaccagaagcugaucgccaaccaguucaacagcgccaucggcaagauccaggacagccugagcagcaccgccagcgcccugggcaagcugcaggacguggugaaccagaacgcccaggcucugaacacccuggugaagcagcugagcagcaauuuuggcgccaucagcagcgugcugaacgacauccugucaaggcuggaucccccagaggccgaggugcagaucgaccggcugaucaccggccggcugcagagccugcagaccuacgugacccagcagcugauccgggccgccgagauccgggccagcgccaaccuggccgcaaccaagaugagcgagugcgugcugggccagagcaagcggguggacuucugcggcaagggcuaccaccugaugagcuucccccagagcgcuccccacggcgugguguuccuccacgucacauacgugcccgcccaggagaagaacuucaccaccgcccccgccaucugccacgacggcaaggcccacuucccccgggagggaguguucgugagcaacggcacccacugguucgugacccagcggaacuucuacgagccucagauuaucaccaccgacaacaccuucgugagcggcaacugcgacguggugaucggcaucgugaacaacaccguguacgacccccugcagcccgagcuggacagcuucaaggaggagcuggacaaguacuucaagaaccacaccagcccagacguggaccugggcgacaucagcggcaucaacgccagcguggugaacauccagaaggagaucgaccggcugaacgagguggccaagaaccugaacgagagccugaucgaccugcaggagcugggcaaguacgagcaguacaucaaguggcccugguacaucuggcugggcuucaucgccggccugaucgccaucgugauggugaccaucaugcugugcugcaugaccagcugcuguagcugccugaagggcugcugcagcugcggcagcugcugcaaguucgacgaggacgacagcgagcccgugcugaagggcgugaagcugcacuacaccugauaauaggcuggagccucgguggccuagcuucuugccccuugggccuccccccagccccuccuccccuuccugcacccguacccccguggucuuugaauaaagucugagugggcggcaaaaaaaaaaaaaaaaaaaaaaaaaaaaaaaaaaaaaaaaaaaaaaaaaaaaaaaaaaaaaaaaaaaaaaaaaaaaaaaaaaaaaaaaaaaaaaaaaaaaucuag

SEQ ID NO: 26662 - RNA, 4094 nt, Artificial Sequence
  SARS-CoV-2/Wuhan/WIV05/2019__EPI_ISL_402128 spike protein mRNA gc (1-1273)(K986P_V987P_H69del_V70del_Y453F_D614G_I692V_M1229I)
gggaaauaagagagaaaagaagaguaagaagaaauauaagaccccggcgccgccaccauguucguguuccuggugcugcugccccuggugagcagccagugcgugaaccugaccacccggacccagcugcccccugccuacaccaacagcuucacccggggcguguacuaccccgacaagguguuccggagcagcgugcugcacagcacccaggaccuguuccugcccuucuucagcaacgugaccugguuccacgccaucagcggcaccaacggcaccaagcgguucgacaacccagugcugcccuucaacgacggcguguacuucgccagcaccgagaagucaaacaucauccggggcuggaucuucggcaccacccuggacagcaagacacagagccugcugaucgugaacaacgccaccaacguggugaucaaggugugcgaguuucaguucugcaacgaccccuuccugggcguguacuaccacaagaacaacaagagcuggauggagagcgaguuccggguguacagcagcgcuaacaauugcaccuucgaguacgucagccagcccuuccugauggaccucgagggcaagcagggcaacuucaagaaccugcgggaguucguguucaagaacaucgauggcuacuucaagaucuacagcaagcacacccccaucaaccuggugcgggaccugccccagggauucagcgcccuggagccucugguggaccugcccaucggcaucaacaucaccagguuccagacccugcuggcccugcaccggagcuaccugacccccggcgacagcagcagcggcuggaccgccggcgccgccgcauacuacgugggcuaccugcagccacggaccuuccugcugaaguacaacgagaacggcaccaucaccgacgccguggacugcgcccuggacccccugagcgagaccaagugcacccuaaagagcuucaccguggagaagggcaucuaccagaccagcaacuuccgggugcagcccacugagagcaucgugcgguuccccaacauuaccaaccugugucccuucggcgagguguucaacgccacccgguucgccagcguguacgccuggaaccggaagcggaucagcaacugcguggccgacuacagcgugcuguacaacagcgccagcuucagcaccuucaagugcuacggcgugagcccuaccaagcugaacgaccugugcuucaccaacguguacgcugacagcuucgugauccggggcgacgaggugcggcagaucgcccccggccagaccggcaagaucgccgacuacaacuacaagcugcccgacgacuucaccggcugcgugaucgccuggaacagcaacaaccuggacagcaaggugggcggcaacuacaacuaccuguuccggcuguuccguaagagcaaccugaagccauuugagcgggacaucagcaccgagaucuaccaggccggcagcacccccugcaacgguguggagggcuucaacugcuacuucccccugcagagcuacggcuuccagcccaccaacggcgugggcuaccagcccuaccgggugguggugcugagcuucgagcugcugcacgcccccgccaccgugugcggcccuaaaaagagcaccaaccuggugaagaacaagugcgugaacuucaauuucaacggccugaccggcaccggcgugcugaccgagagcaacaagaaguuccugcccuuccagcaguucggccgggauaucgccgacaccaccgacgcagugcgggacccccagacccuggagauccuggacaucaccccaugcagcuucggcggcgugagcgugaucacccccggcacaaacaccagcaaccaggucgccgugcuguaccagggagugaacugcaccgaggugcccguggccauccacgccgaccagcugacccccaccuggcggguguacagcaccggcagcaacguguuccagacccgggccggcugccugaucggcgccgagcacgugaacaacuccuacgagugcgacauccccaucggcgcuggcaucugcgccagcuaccagacccagaccaacagcccccggcgggcccggagcguggccagccagagcgugaucgccuacaccaugagcuuaggcgccgagaacagcguggccuacagcaacaacagcaucgcgaucccuaccaacuucaccaucagcgugaccaccgagauccugcccgugagcaugaccaagaccagcguggacuguaccauguacauaugcggcgacagcaccgagugcagcaaccugcugcugcaguacggcagcuucugcacccagcugaaccgggcccugaccggcaucgccguggagcaggacaagaacacccaagagguguucgcccaggugaagcagaucuacaagacucccccaaucaaggacuucggcggcuucaacuucagccagauccugcccgaccccagcaagcccagcaagcggagcuucaucgaggaccugcuguucaacaaggugacccuggccgacgccggcuucaucaagcaguacggcgacugccugggggauaucgccgcucgggaccugaucugcgcccagaaguucaacggccugaccgugcugcccccucugcugaccgacgagaugaucgcccaguacaccagcgcccugcuugccggcaccaucaccagcggcuggaccuucggcgccggcgcagcccugcagauccccuucgccaugcagauggccuaccgguucaacggcaucggcgugacccagaacgugcuguacgagaaccagaagcugaucgccaaccaguucaacagcgccaucggcaagauccaggacagccugagcagcaccgccagcgcccugggcaagcugcaggacguggugaaccagaacgcucaggcccugaacacccuggugaagcagcugagcagcaacuuuggcgccaucagcucagugcugaaugacauccugagcaggcuggaucccccagaggccgaggugcagaucgaccggcugaucaccggccggcugcagagccugcagaccuacgugacccagcagcugauccgggccgccgagauccgggccagcgccaaccuggcagccaccaagaugagcgagugcgugcugggccagagcaagcggguggacuucugcggcaagggcuaccaccugaugagcuucccccagagcgcuccccacggcgugguguuccuccacgugacauacguccccgcccaggagaagaacuucaccaccgcccccgccaucugccacgacggcaaggcccacuucccccgggagggaguguucgugagcaacggcacccacugguucgugacccagcggaacuucuacgagccucagauuaucaccaccgacaacaccuucgugagcggcaacugcgacguggugaucggcaucgugaacaacaccguguacgacccccugcagcccgagcuggacagcuucaaggaggagcuggacaaguacuucaagaaccacaccagcccagacguggaccugggcgacaucagcggcaucaacgccagcguggugaacauccagaaggagaucgaccggcugaacgagguggccaagaaccugaacgagagccugaucgaccugcaggagcugggcaaguacgagcaguacaucaaguggcccugguacaucuggcugggcuucaucgccggccugaucgccaucgugaucgugaccaucaugcugugcugcaugaccagcugcuguagcugccugaagggcugcugcagcugcggcagcugcugcaaguucgacgaggacgacagcgagcccgugcugaagggcgugaagcugcacuacaccugauaauaggcuggagccucgguggccuagcuucuugccccuugggccuccccccagccccuccuccccuuccugcacccguacccccguggucuuugaauaaagucugagugggcggcaaaaaaaaaaaaaaaaaaaaaaaaaaaaaaaaaaaaaaaaaaaaaaaaaaaaaaaaaaaaaaaaaaaaaaaaaaaaaaaaaaaaaaaaaaaaaaaaaaaaucuag

SEQ ID NO: 26663 - RNA, 4091 nt, Artificial Sequence
  SARS-CoV-2/Wuhan/WIV05/2019__EPI_ISL_402128 spike protein mRNA gc (1-1273)(K986P_V987P_K986P_V987P_H69del_V70del_Y144del_N501Y_A570 D_D614G_P681H_T716I_S982A_D1118H)
gggaaauaagagagaaaagaagaguaagaagaaauauaagaccccggcgccgccaccauguucguguuccuggugcugcugccccuggugagcagccagugcgugaaccugaccacccggacccagcugcccccugccuacaccaacagcuucacccggggcguguacuaccccgacaagguguuccggagcagcgugcugcacagcacccaggaccuguuccugcccuucuucagcaacgugaccugguuccacgccaucagcggcaccaacggcaccaagcgguucgacaacccagugcugcccuucaacgacggcguguacuucgccagcaccgagaagucaaacaucauccggggcuggaucuucggcaccacccuggacagcaagacacagagccugcugaucgugaacaacgccaccaacguggugaucaaggugugcgaguuucaguucugcaacgaccccuuccugggcguguaccacaagaacaacaagagcuggauggagagcgaguuccggguguacagcagcgcuaacaauugcaccuucgaguacgucagccagcccuuccugauggaccucgagggcaagcagggcaacuucaagaaccugcgggaguucguguucaagaacaucgauggcuacuucaagaucuacagcaagcacacccccaucaaccuggugcgggaccugccccagggauucagcgcccuggagccucugguggaccugcccaucggcaucaacaucaccagguuccagacccugcuggcccugcaccggagcuaccugacccccggcgacagcagcagcggcuggaccgccggcgccgccgcauacuacgugggcuaccugcagccacggaccuuccugcugaaguacaacgagaacggcaccaucaccgacgccguggacugcgcccuggacccccugagcgagaccaagugcacccuaaagagcuucaccguggagaagggcaucuaccagaccagcaacuuccgggugcagcccacugagagcaucgugcgguuccccaacauuaccaaccugugucccuucggcgagguguucaacgccacccgguucgccagcguguacgccuggaaccggaagcggaucagcaacugcguggccgacuacagcgugcuguacaacagcgccagcuucagcaccuucaagugcuacggcgugagcccuaccaagcugaacgaccugugcuucaccaacguguacgcugacagcuucgugauccggggcgacgaggugcggcagaucgcccccggccagaccggcaagaucgccgacuacaacuacaagcugcccgacgacuucaccggcugcgugaucgccuggaacagcaacaaccuggacagcaaggugggcggcaacuacaacuaccuguaccggcuguuccguaagagcaaccugaagccauucgagcgggacaucagcaccgagaucuaccaggccggcagcacccccugcaacgguguggagggcuuuaacugcuacuucccccugcagagcuacggcuuccagcccaccuacggcgugggcuaccagcccuaccgggugguggugcugagcuucgagcugcugcacgcccccgccaccgugugcggcccuaaaaagagcaccaaccuggugaagaacaagugcgugaacuucaacuucaauggccugaccggcaccggcgugcugaccgagagcaacaagaaguuccugcccuuccagcaguucggccgggauaucgacgacaccaccgacgccgugcgggacccccagacccuggagauccuggacaucaccccaugcagcuucggcggcgugagcgugaucacccccggcacaaacaccagcaaccaggucgcagugcuguaccagggagugaacugcaccgaggugcccguggccauccacgccgaccagcugacccccaccuggcggguguacagcaccggcagcaacguguuccagacccgggccggcugccugaucggcgccgagcacgugaacaacuccuacgagugcgacauccccaucggcgccggcaucugcgcuagcuaccagacccagaccaacagccaccggcgggcccggagcguggccagccagagcaucaucgccuacaccaugagcuuaggcgccgagaacagcguggccuacagcaacaacagcaucgccauccccaucaacuucaccauaagcgugaccaccgagauccugccugugagcaugaccaagaccagcguggacuguaccauguacaucugcggcgacagcaccgagugcagcaaccugcugcugcaguacggcagcuucugcacccagcugaaccgggcgcugaccggcaucgccguggagcaggacaagaacacccaagagguguucgcccaggugaagcagaucuacaagaccccacccaucaaggacuucggcggcuucaacuucagccagauccugcccgaccccagcaagcccagcaagcggagcuucaucgaggaccugcuguucaacaaggugacucuggccgacgccggcuucaucaagcaguacggcgauugccugggggacaucgccgcccgggaccugaucugcgcucagaaguucaacggccugaccgugcugccuccccugcugaccgacgagaugaucgcccaguacaccagcgcccugcuugccggcaccaucaccagcggcuggaccuucggcgccggcgccgcacugcagauccccuucgccaugcagauggccuaccgguucaacggcaucggcgugacccagaacgugcuguacgagaaccagaagcugaucgccaaccaguucaacagcgccaucggcaagauccaggacagccugagcagcaccgccagcgcccugggcaagcugcaggacguggugaaccagaacgcccaggcucugaacacccuggugaagcagcugagcagcaacuucggcgccaucagcucagugcugaacgacauccuggccaggcuggacccacccgaggccgaggugcagaucgaccggcugaucaccggccggcugcagagccugcagaccuacgugacccagcagcugauccgggccgccgagauucgggccagcgccaaucuggcagccaccaagaugagcgagugcgugcugggccagagcaagcggguggacuuuugcggcaagggcuaccaccugaugagcuucccccagagcgcuccccacggcgugguguuccuccacgugaccuacgugcccgcccaggagaagaacuucacaaccgcccccgccaucugccacgacggcaaggcccacuucccccgggagggagucuucgugagcaacggcacccacugguucgugacccagcggaacuucuacgagccccagaucaucaccacccacaacaccuucgugagcggcaacugcgacguggugaucggcaucgugaacaacaccguguacgacccucugcagcccgagcuggacagcuucaaggaggagcuggacaaguacuucaagaaccacaccagccccgacguggaucugggcgacaucagcggcaucaacgccagcguggugaacauccagaaggagaucgaccggcugaacgagguggccaagaaccugaacgagagccugaucgaccugcaggagcugggcaaguacgagcaguacaucaaguggccaugguacaucuggcugggcuucaucgccggccugaucgccaucgugauggugaccaucaugcugugcugcaugaccagcugcuguagcugccugaagggcugcugcagcugcggcagcugcugcaaguucgacgaggacgacagcgagcccgugcugaagggcgugaagcugcacuacaccugauaauaggcuggagccucgguggccuagcuucuugccccuugggccuccccccagccccuccuccccuuccugcacccguacccccguggucuuugaauaaagucugagugggcggcaaaaaaaaaaaaaaaaaaaaaaaaaaaaaaaaaaaaaaaaaaaaaaaaaaaaaaaaaaaaaaaaaaaaaaaaaaaaaaaaaaaaaaaaaaaaaaaaaaaaucuag

SEQ ID NO: 26664 - RNA, 4100 nt, Artificial Sequence
  SARS-CoV-2/Wuhan/WIV05/2019__EPI_ISL_402128 spike protein mRNA gc (1-1273)(K986P_V987P_K986P_V987P_K417N_E484K_N501Y_D614G)
gggaaauaagagagaaaagaagaguaagaagaaauauaagaccccggcgccgccaccauguucguguuccuggugcugcugccccuggugagcagccagugcgugaaccugaccacccggacccagcugcccccugccuacaccaacagcuucacccggggcguguacuaccccgacaagguguuccggagcagcgugcugcacagcacccaggaccuguuccugcccuucuucagcaacgugaccugguuccacgccauccacgugagcggcaccaacggcaccaagcgguucgacaacccagugcugcccuucaacgacggcguguacuucgccagcaccgagaagucaaacaucauccggggcuggaucuucggcaccacccuggacagcaagacacagagccugcugaucgugaacaacgccaccaacguggugaucaaggugugcgaguuucaguucugcaacgaccccuuccugggcguguacuaccacaagaacaacaagagcuggauggagagcgaguuccgggucuacagcagcgcuaacaauugcaccuucgaguacgugagccagcccuuccugauggaccucgagggcaagcagggcaacuucaagaaccugcgggaguucguguucaagaacaucgauggcuacuucaagaucuacagcaagcacacccccaucaaccuggugcgggaccugccccagggauucagcgcccuggagccucugguggaccugcccaucggcaucaacaucaccagguuccagacccugcuggcccugcaccggagcuaccugacccccggcgacagcagcagcggcuggaccgccggcgccgccgcauacuacgugggcuaccugcagccacggaccuuccugcugaaguacaacgagaacggcaccaucaccgacgccguggacugcgcccuggacccccugagcgagaccaagugcacccuaaagagcuucaccguggagaagggcaucuaccagaccagcaacuuccgggugcagcccacugagagcaucgugcgguuccccaacauuaccaaccugugucccuucggcgagguguucaacgccacccgguucgccagcguguacgccuggaaccggaagcggaucagcaacugcguggccgacuacagcgugcuguacaacagcgccagcuucagcaccuucaagugcuacggcgugagcccuaccaagcugaacgaccugugcuucaccaacguguacgcugacagcuucgugauccggggcgacgaggugcggcagaucgcccccggccagaccggcaacaucgccgacuacaacuacaagcugcccgacgacuucaccggcugcgugaucgccuggaacagcaacaaccuggacagcaaggugggcggcaacuacaacuaccuguaccggcuguuccguaagagcaaccugaagccauucgagcgggacaucagcaccgagaucuaccaggccggcagcacccccugcaacggugugaagggcuuuaacugcuacuucccccugcagagcuacggcuuccagcccaccuacggcgugggcuaccagcccuaccgggugguggugcugagcuucgagcugcugcacgcccccgccaccgugugcggcccuaaaaagagcaccaaccuggugaagaacaagugcgugaacuucaauuucaacggccugaccggcaccggcgugcugaccgagagcaacaagaaguuccugcccuuccagcaguucggccgggauaucgccgacaccaccgacgcagugcgggacccccagacccuggagauccuggacaucaccccaugcagcuucggcggcgugagcgucaucacccccggcacaaacaccagcaaccagguggccgugcuguaccagggagugaacugcaccgaggugcccguggccauccacgccgaccagcugacccccaccuggcggguguacagcaccggcagcaacguguuccagacccgggccggcugccugaucggcgccgagcacgugaacaacuccuacgagugcgacauccccaucggcgcuggcaucugcgccagcuaccagacccagaccaacagcccccggcgggcccggagcguggccagccagagcaucaucgccuacaccaugagcuuaggcgccgagaacagcguggccuacagcaacaacagcaucgcgaucccuaccaacuucaccaucagcgugaccaccgagauacugcccgugagcaugaccaagaccagcguggacuguaccauguacaucugcggcgacagcaccgagugcagcaaccugcugcugcaguacggcagcuucugcacccagcugaaccgggcccugaccggcaucgccguggagcaggacaagaacacccaagagguguucgcccaggugaagcagaucuacaagacucccccaaucaaggacuucggcggcuucaacuucagccagauccugcccgaccccagcaagcccagcaagcggagcuucaucgaggaccugcuguucaacaaggugacccuggccgacgccggcuucaucaagcaguacggcgacugccugggggauaucgccgcucgggaccugaucugcgcccagaaguucaacggccugaccgugcugcccccucugcugaccgacgagaugaucgcccaguacaccagcgcccugcuugccggcaccaucaccagcggcuggaccuucggcgccggcgcagcccugcagauccccuucgccaugcagauggccuaccgguucaacggcaucggcgugacccagaacgugcuguacgagaaccagaagcugaucgccaaccaguucaacagcgccaucggcaagauccaggacagccugagcagcaccgccagcgcccugggcaagcugcaggacguggugaaccagaacgcucaggcccugaacacccuggugaagcagcugagcagcaacuucggcgccaucagcucagugcugaaugacauccugagcaggcuggaucccccagaggccgaggugcagaucgaccggcugaucaccggccggcugcagagccugcagaccuacgugacccagcagcugauccgggccgccgagauccgggccagcgccaaccuggcagccaccaagaugagcgagugcgugcugggccagagcaagcggguggacuuuugcggcaagggcuaccaccugaugagcuucccccagagcgcuccccacggcgugguguuccuccacgugacauacguccccgcccaggagaagaacuucaccaccgcccccgccauuugccacgacggcaaggcccacuucccccgggagggaguguucgugagcaacggcacccacugguucgugacccagcggaacuucuacgagccucagaucaucaccaccgacaacaccuucgugagcggcaacugcgacguggugaucggcaucgugaacaacaccguguacgacccccugcagcccgagcuggacagcuucaaggaggagcuggacaaguacuucaagaaccacaccagcccagacguggaccugggcgacaucagcggcaucaacgccagcguggugaacauccagaaggagaucgaccggcugaacgagguggccaagaaccugaacgagagccugaucgaccugcaggagcugggcaaguacgagcaguacaucaaguggcccugguacaucuggcugggcuucaucgccggccugaucgccaucgugauggugaccaucaugcugugcugcaugaccagcugcuguagcugccugaagggcugcugcagcugcggcagcugcugcaaguucgacgaggacgacagcgagcccgugcugaagggcgugaagcugcacuacaccugauaauaggcuggagccucgguggccuagcuucuugccccuugggccuccccccagccccuccuccccuuccugcacccguacccccguggucuuugaauaaagucugagugggcggcaaaaaaaaaaaaaaaaaaaaaaaaaaaaaaaaaaaaaaaaaaaaaaaaaaaaaaaaaaaaaaaaaaaaaaaaaaaaaaaaaaaaaaaaaaaaaaaaaaaaucuag

SEQ ID NO: 26665 - RNA, 4091 nt, Artificial Sequence
  SARS-CoV-2/Wuhan/WIV05/2019__EPI_ISL_402128 spike protein mRNA gc (1-1273)(K986P_V987P_K986P_V987P_L18F_D80A_D215G_L242del_A243del_ L244del_R246I_K417N_E484K_N501Y_D614G_A701V)
gggaaauaagagagaaaagaagaguaagaagaaauauaagaccccggcgccgccaccauguucguguuccuggugcugcugccccuggugagcagccagugcgugaacuucaccacccggacccagcugcccccugccuacaccaacagcuucacccggggcguguacuaccccgacaagguguuccggagcagcgugcugcacagcacccaggaccuguuccugcccuucuucagcaacgugaccugguuccacgccauccacgugagcggcaccaacggcaccaagcgguucgccaacccagugcugcccuucaacgacggcguguacuucgccagcaccgagaagucaaacaucauccggggcuggaucuuuggcaccacccuggacagcaagacacagagccugcugaucgugaacaacgcuaccaacguggugaucaaggugugcgaguuccaguucugcaacgaccccuuccugggcguguacuaccacaagaacaacaagagcuggauggagagcgaguuccgggucuacagcagcgccaacaauugcaccuucgaguacgugagccagcccuuccugauggaccuggagggcaagcagggcaacuucaagaaccuccgggaguucguguucaagaacaucgacggcuacuucaagaucuacagcaagcacacccccaucaaccuggugcggggacugccccagggcuucagcgcccuggagccucugguggaucugcccaucggcaucaacaucaccagguuccagacccugcacaucagcuaccugacccccggcgacagcagcagcggcuggaccgccggcgccgccgcauacuacgugggcuaccugcagccacggaccuuccugcugaaguacaacgagaacggcaccaucaccgacgccguggacugcgcccuggacccccugagcgagaccaagugcacccuuaagagcuucaccguggagaagggcaucuaccagaccagcaacuuccgggugcagcccacugagagcauugugcgguuccccaacaucaccaaccugugucccuucggcgagguguucaacgccacccgguucgccagcguguacgccuggaaccggaagcggaucagcaacugcguggccgacuacagcgugcuguacaacagcgccagcuucagcaccuucaagugcuacggcgugagcccuaccaagcugaacgaccugugcuucaccaacguguacgcugacagcuucgugauccggggcgacgaggugcggcagaucgcccccggccagaccggcaacaucgccgacuacaacuacaagcugcccgacgacuucaccggcugcgugaucgccuggaacagcaacaaccuggacagcaaggugggcggcaacuacaacuaccuguaccggcuauuccguaagagcaaccugaagccauuugagcgggacaucagcaccgagaucuaccaggccgguagcacccccugcaacggcgugaagggcuucaacugcuacuucccccugcagagcuacggcuuccagcccaccuacggcgugggcuaccagcccuaccgggugguggugcugagcuucgagcugcugcacgcccccgccaccgugugcggcccuaaaaagagcaccaaccuggugaagaacaagugcgugaacuucaauuucaacggccugaccggcaccggcgugcugaccgagagcaacaagaaguuccugcccuuccagcaguucggccgggacaucgccgacaccaccgaugcagugcgggacccccagacccuggagauccuggacaucaccccaugcagcuucggcggcgugagcgucaucacccccggaacaaacaccagcaaccagguggccgugcuguaccagggcgugaacugcaccgaggugcccguggccauccacgccgaccagcugacccccaccuggcggguguacagcaccggcagcaacguguuccagacccgggccggcugccugaucggcgccgagcacgugaacaacuccuacgagugcgacauccccaucggcgcuggcaucugcgccagcuaccagacccagaccaacagcccccggcgggcccggagcguggccagccagagcaucaucgccuacaccaugagccugggcguggagaacagcguggccuacagcaacaacagcaucgccaucccuaccaacuucaccauaagcgugaccaccgagauccugcccgugagcaugaccaagaccagcguggacuguaccauguacaucugcggcgacagcaccgagugcagcaaccuguuacugcaguacggcagcuucugcacccagcugaaccgggcgcugaccggcaucgccguggagcaggacaagaacacccaagagguguucgcccaggugaagcagaucuacaagacucccccaaucaaggacuucggcggcuucaacuucagccagauccugcccgaccccagcaagcccagcaagcggagcuucaucgaggaccugcuguucaacaaggugacccuggccgacgccggcuucaucaagcaguacggggacugccugggcgacaucgccgcccgggaccugaucugcgcucagaaguucaacggccugaccgugcugcccccucugcugaccgaugagaugaucgcccaguacaccagcgcccugcuggccggcaccaucaccagcggcuggaccuucggcgccggcgccgcacugcagauccccuucgccaugcagauggccuaccgguucaacggcaucggcgugacccagaacgugcuguacgagaaccagaagcugaucgccaaccaguucaacagcgccaucggcaagauccaggacagccugagcagcaccgccagcgcccugggcaagcugcaggacguggugaaccagaacgcccaggcucugaacacccuggugaagcagcugagcagcaacuuuggcgccaucagcucagugcugaaugacauccugagccggcuggaucccccagaggccgaggugcagaucgacaggcugaucaccggccggcugcagagccugcagaccuacgugacccagcagcugauccgggccgccgagauucgggccagcgccaaccuggccgcaaccaagaugagcgagugcgugcugggccagagcaagcggguggacuucugcggcaagggcuaccaccugaugagcuucccccagagcgcuccccacggcgugguguuccugcacgucacauacgugcccgcccaggagaagaacuucaccaccgcccccgccaucugccacgacggaaaggcccacuucccccgggagggcguguucgugagcaacggcacccacugguucgugacccagcggaacuucuacgagccucagaucaucaccaccgacaacaccuucgugagcggcaacugcgacguggugaucggcaucgugaacaacaccguguacgacccccugcagcccgagcuggacagcuucaaggaggagcucgacaaguacuucaagaaccacaccagcccagacguggaccugggcgacaucagcggcaucaacgccagcguggugaacauccagaaggagaucgaccggcugaacgagguggccaagaaccugaacgagagccugaucgaccugcaggagcugggcaaguacgagcaguacaucaaguggcccugguacaucuggcugggcuucaucgccggccugaucgccaucgugauggugaccaucaugcugugcugcaugaccagcugcuguagcugccugaagggcugcugcagcugcggcagcugcugcaaguucgacgaggacgacagcgagcccgugcugaagggcgugaagcugcacuacaccugauaauaggcuggagccucgguggccuagcuucuugccccuugggccuccccccagccccuccuccccuuccugcacccguacccccguggucuuugaauaaagucugagugggcggcaaaaaaaaaaaaaaaaaaaaaaaaaaaaaaaaaaaaaaaaaaaaaaaaaaaaaaaaaaaaaaaaaaaaaaaaaaaaaaaaaaaaaaaaaaaaaaaaaaaaucuag

SEQ ID NO: 26666 - RNA, 4100 nt, Artificial Sequence
  SARS-CoV-2/Wuhan/WIV05/2019__EPI_ISL_402128 spike protein mRNA gc (1-1273)(K986P_V987P_K986P_V987P_E484K_D614G)
gggaaauaagagagaaaagaagaguaagaagaaauauaagaccccggcgccgccaccauguucguguuccuggugcugcugccccuggugagcagccagugcgugaaccugaccacccggacccagcugcccccugccuacaccaacagcuucacccggggcguguacuaccccgacaagguguuccggagcagcgugcugcacagcacccaggaccuguuccugcccuucuucagcaacgugaccugguuccacgccauccacgugagcggcaccaacggcaccaagcgguucgacaacccagugcugcccuucaacgacggcguguacuucgccagcaccgagaagucaaacaucauccggggcuggaucuucggcaccacccuggacagcaagacacagagccugcugaucgugaacaacgccaccaacguggugaucaaggugugcgaguuucaguucugcaacgaccccuuccugggcguguacuaccacaagaacaacaagagcuggauggagagcgaguuccgggucuacagcagcgcuaacaauugcaccuucgaguacgugagccagcccuuccugauggaccucgagggcaagcagggcaacuucaagaaccugcgggaguucguguucaagaacaucgauggcuacuucaagaucuacagcaagcacacccccaucaaccuggugcgggaccugccccagggauucagcgcccuggagccucugguggaccugcccaucggcaucaacaucaccagguuccagacccugcuggcccugcaccggagcuaccugacccccggcgacagcagcagcggcuggaccgccggcgccgccgcauacuacgugggcuaccugcagccacggaccuuccugcugaaguacaacgagaacggcaccaucaccgacgccguggacugcgcccuggacccccugagcgagaccaagugcacccuaaagagcuucaccguggagaagggcaucuaccagaccagcaacuuccgggugcagcccacugagagcaucgugcgguuccccaacauuaccaaccugugucccuucggcgagguguucaacgccacccgguucgccagcguguacgccuggaaccggaagcggaucagcaacugcguggccgacuacagcgugcuguacaacagcgccagcuucagcaccuucaagugcuacggcgugagcccuaccaagcugaacgaccugugcuucaccaacguguacgcugacagcuucgugauccggggcgacgaggugcggcagaucgcccccggccagaccggcaagaucgccgacuacaacuacaagcugcccgacgacuucaccggcugcgugaucgccuggaacagcaacaaccuggacagcaaggugggcggcaacuacaacuaccuguaccggcuguuccguaagagcaaccugaagccauucgagcgggacaucagcaccgagaucuaccaggccggcagcacccccugcaacggugugaagggcuuuaacugcuacuucccccugcagagcuacggcuuccagcccaccaacggcgugggcuaccagcccuaccgggugguggugcugagcuucgagcugcugcacgcccccgccaccgugugcggcccuaaaaagagcaccaaccuggugaagaacaagugcgugaacuucaauuucaacggccugaccggcaccggcgugcugaccgagagcaacaagaaguuccugcccuuccagcaguucggccgggauaucgccgacaccaccgacgcagugcgggacccccagacccuggagauccuggacaucaccccaugcagcuucggcggcgugagcgucaucacccccggcacaaacaccagcaaccagguggccgugcuguaccagggagugaacugcaccgaggugcccguggccauccacgccgaccagcugacccccaccuggcggguguacagcaccggcagcaacguguuccagacccgggccggcugccugaucggcgccgagcacgugaacaacuccuacgagugcgacauccccaucggcgcuggcaucugcgccagcuaccagacccagaccaacagcccccggcgggcccggagcguggccagccagagcaucaucgccuacaccaugagcuuaggcgccgagaacagcguggccuacagcaacaacagcaucgcgaucccuaccaacuucaccaucagcgugaccaccgagauacugcccgugagcaugaccaagaccagcguggacuguaccauguacaucugcggcgacagcaccgagugcagcaaccugcugcugcaguacggcagcuucugcacccagcugaaccgggcccugaccggcaucgccguggagcaggacaagaacacccaagagguguucgcccaggugaagcagaucuacaagacucccccaaucaaggacuucggcggcuucaacuucagccagauccugcccgaccccagcaagcccagcaagcggagcuucaucgaggaccugcuguucaacaaggugacccuggccgacgccggcuucaucaagcaguacggcgacugccugggggauaucgccgcucgggaccugaucugcgcccagaaguucaacggccugaccgugcugcccccucugcugaccgacgagaugaucgcccaguacaccagcgcccugcuugccggcaccaucaccagcggcuggaccuucggcgccggcgcagcccugcagauccccuucgccaugcagauggccuaccgguucaacggcaucggcgugacccagaacgugcuguacgagaaccagaagcugaucgccaaccaguucaacagcgccaucggcaagauccaggacagccugagcagcaccgccagcgcccugggcaagcugcaggacguggugaaccagaacgcucaggcccugaacacccuggugaagcagcugagcagcaacuucggcgccaucagcucagugcugaaugacauccugagcaggcuggaucccccagaggccgaggugcagaucgaccggcugaucaccggccggcugcagagccugcagaccuacgugacccagcagcugauccgggccgccgagauccgggccagcgccaaccuggcagccaccaagaugagcgagugcgugcugggccagagcaagcggguggacuuuugcggcaagggcuaccaccugaugagcuucccccagagcgcuccccacggcgugguguuccuccacgugacauacguccccgcccaggagaagaacuucaccaccgcccccgccauuugccacgacggcaaggcccacuucccccgggagggaguguucgugagcaacggcacccacugguucgugacccagcggaacuucuacgagccucagaucaucaccaccgacaacaccuucgugagcggcaacugcgacguggugaucggcaucgugaacaacaccguguacgacccccugcagcccgagcuggacagcuucaaggaggagcuggacaaguacuucaagaaccacaccagcccagacguggaccugggcgacaucagcggcaucaacgccagcguggugaacauccagaaggagaucgaccggcugaacgagguggccaagaaccugaacgagagccugaucgaccugcaggagcugggcaaguacgagcaguacaucaaguggcccugguacaucuggcugggcuucaucgccggccugaucgccaucgugauggugaccaucaugcugugcugcaugaccagcugcuguagcugccugaagggcugcugcagcugcggcagcugcugcaaguucgacgaggacgacagcgagcccgugcugaagggcgugaagcugcacuacaccugauaauaggcuggagccucgguggccuagcuucuugccccuugggccuccccccagccccuccuccccuuccugcacccguacccccguggucuuugaauaaagucugagugggcggcaaaaaaaaaaaaaaaaaaaaaaaaaaaaaaaaaaaaaaaaaaaaaaaaaaaaaaaaaaaaaaaaaaaaaaaaaaaaaaaaaaaaaaaaaaaaaaaaaaaaucuag

SEQ ID NO: 26667 - RNA, 4100 nt, Artificial Sequence
  SARS-CoV-2/Wuhan/WIV05/2019__EPI_ISL_402128 spike protein mRNA gc (1-1273)(K986P_V987P_K986P_V987P_L18F_T20N_P26S_D138Y_R190S_K417T _E484K_N501Y_D614G_H655Y_T1027I)
gggaaauaagagagaaaagaagaguaagaagaaauauaagaccccggcgccgccaccauguucguguuccuggugcugcugccccuggugagcagccagugcgugaacuucaccaaccggacccagcugcccagcgccuacaccaacagcuucacccggggcguguacuacccugacaagguguuccggagcagcgugcugcacagcacccaggaccuguuccugcccuucuucagcaacgugaccugguuccacgccauccacgugagcggcaccaacggcaccaagcgguucgacaaccccgugcugccauucaacgacggcguguacuucgccagcaccgagaagucaaacaucauccggggcuggaucuuuggcaccacccuggacagcaagacccagagccugcugaucgugaacaacgccacaaacguggugaucaaggugugcgaguuccaguucugcaacuaccccuuccugggcguguacuaccacaagaacaacaagagcuggauggagagcgaguuccgggucuacagcagcgcuaauaacugcaccuucgaguacgugagccagcccuuccugauggaccuggagggcaagcagggcaacuucaagaaccucagcgaguucguguucaagaacaucgacggcuacuucaagaucuacagcaagcacacccccaucaaccuggugcgggaucugccccagggauucagcgcccuggagccccugguggaccugccuaucggcaucaacaucacccgguuccagacccugcuggcccugcacaggagcuaccugacccccggcgacagcagcagcggcuggaccgccggcgccgccgcauacuacgugggcuaccugcagccccggaccuuccugcugaaguacaacgagaacggcaccaucaccgacgccguggacugcgcccuggacccacugagcgagaccaagugcacccuaaagagcuucaccguggagaagggcaucuaccagaccagcaacuuccgggugcagcccaccgagagcaucgugcgguuccccaacauuacuaaccugugucccuucggcgagguguucaacgccacccgguucgccagcguguacgccuggaaccggaagcggaucagcaacugcguggccgacuacagcgugcuguacaacagcgccagcuucagcaccuucaagugcuacggcgugagccccaccaagcugaacgaccugugcuucaccaacguguacgcugacagcuucgugauccggggcgacgaggugcggcagaucgccccuggccagaccggcaccaucgccgacuacaacuacaagcugcccgacgacuucaccggcugcgugaucgccuggaacagcaacaaccuggacagcaaggugggcggcaacuacaacuaccuguaccggcuguuccguaagagcaaccugaagcccuuugagcgggacaucagcaccgagaucuaccaggccggcagcaccccaugcaacggugugaagggcuucaacugcuacuucccccugcagagcuacggcuuccagcccaccuacggcgugggcuaccagcccuaccgggugguggugcugagcuucgagcugcugcacgcccccgccaccgugugcggccccaaaaagagcaccaaccuggugaagaacaagugcgugaacuucaauuucaacggccugaccggcaccggcgugcugaccgagagcaacaagaaguuccugccuuuccagcaguucggccgggacaucgccgauaccaccgacgcagugcgggacccccagacccuggagauccuggacaucacccccugcagcuucggcggcgugagcgucaucaccccaggcacaaacaccagcaaccagguggccgugcuguaccagggagugaacugcaccgaggugcccguggccauccacgccgaccagcugacccccaccuggcggguguacuccaccggcagcaacguguuccagacccgggccggcugccugaucggcgccgaguacgugaacaacagcuacgagugcgacauccccaucggcgcuggcaucugcgccagcuaccagacccagaccaacagcccccggcgggcccggagcguggccagccagagcaucaucgccuacaccaugagccugggcgccgagaacagcguggccuacagcaacaacagcaucgcgauccccaccaacuucaccaucagcgugaccaccgagauauuaccugugagcaugaccaagaccagcguggacuguaccauguacaucugcggcgacagcaccgagugcagcaaccugcugcugcaguacggcagcuucugcacccagcugaaccgggcccugaccggcaucgccguggagcaggacaagaacacccaagagguguucgcccaggugaagcagaucuacaagacuccacccaucaaggacuucggcggcuucaacuucagccagauccugcccgaccccagcaagcccagcaagcggagcuucaucgaggaccugcuguucaacaaggugacccuggccgacgccggcuucaucaagcaguacggcgacugccugggggacaucgccgcucgggaucugaucugcgcccagaaguucaacggccugaccgugcugccuccccugcugaccgacgagaugaucgcccaguacaccagcgcccugcuggccggcaccaucaccagcggcuggaccuucggcgccggcgcagcccuucagauccccuucgccaugcagauggccuaccgguucaacggcaucggcgugacccagaacgugcuguacgagaaccagaagcugaucgccaaccaguucaacagcgccaucggcaagauccaggacagccugagcagcaccgccagcgcccugggcaagcugcaggacguggugaaccagaacgcucaggcccugaacacccuggugaagcagcugagcucaaacuuuggcgccaucagcagcgugcugaaugacauccugagccggcuggacccacccgaggccgaggugcagaucgacaggcugaucaccggccggcugcagagccugcagaccuacgugacccagcagcugauccgggccgccgagauccgggccagcgccaaccuggcagccauuaagaugagcgagugcgugcugggccagagcaagcggguggacuucugcggcaagggcuaccaccugaugagcuucccccagagcgcuccccacggcgugguguuccugcacgugaccuacguccccgcccaggagaagaacuucacaaccgcccccgccaucugccacgacggcaaggcccacuucccccgggagggaguguucgugagcaacggcacccacugguucgugacccagcggaacuucuacgagccccagaucaucaccaccgacaacaccuucgugagcggcaacugcgacguggugaucggcaucgugaacaacaccguguacgacccucuccagcccgagcuggacagcuucaaggaggagcuggacaaguacuucaagaaccacaccagccccgacguggaccugggcgauaucagcggcaucaacgccagcguggugaacauccagaaggagaucgaccggcugaacgagguggccaagaaccugaacgagagccugaucgaccugcaggagcugggcaaguacgagcaguacaucaaguggccaugguacaucuggcugggcuucaucgccggccugaucgccaucgugauggugaccaucaugcugugcugcaugaccagcugcuguagcugccugaagggcugcugcagcugcggcagcugcugcaaguucgacgaggacgacagcgagcccgugcugaagggcgugaagcugcacuacaccugauaauaggcuggagccucgguggccuagcuucuugccccuugggccuccccccagccccuccuccccuuccugcacccguacccccguggucuuugaauaaagucugagugggcggcaaaaaaaaaaaaaaaaaaaaaaaaaaaaaaaaaaaaaaaaaaaaaaaaaaaaaaaaaaaaaaaaaaaaaaaaaaaaaaaaaaaaaaaaaaaaaaaaaaaaucuag

SEQ ID NO: 26668 - RNA, 4100 nt, Artificial Sequence
  SARS-CoV-2/Wuhan/WIV05/2019__EPI_ISL_402128 spike protein mRNA gc (1-1273)(K986P_V987P_K986P_V987P_S13I_W152C_L452R_D614G)
gggaaauaagagagaaaagaagaguaagaagaaauauaagaccccggcgccgccaccauguucguguuccuggugcugcugccccuggugagcauccagugcgugaaccugaccacccggacccagcugcccccugccuacaccaacagcuucacccggggcguguacuaccccgacaagguguuccggagcagcgugcugcacagcacccaggaccuguuccugcccuucuucagcaacgugaccugguuccacgccauccacgugagcggcaccaacggcaccaagcgguucgacaacccagugcugcccuucaacgacggcguguacuucgccagcaccgagaagucaaacaucauccggggcuggaucuucggcaccacccuggacagcaagacacagagccugcugaucgugaacaacgccaccaacguggugaucaaggugugcgaguuucaguucugcaacgaccccuuccugggcguguacuaccacaagaacaacaagagcugcauggagagcgaguuccgggucuacagcagcgcuaacaauugcaccuucgaguacgugagccagcccuuccugauggaccucgagggcaagcagggcaacuucaagaaccugcgggaguucguguucaagaacaucgauggcuacuucaagaucuacagcaagcacacccccaucaaccuggugcgggaccugccccagggauucagcgcccuggagccucugguggaccugcccaucggcaucaacaucaccagguuccagacccugcuggcccugcaccggagcuaccugacccccggcgacagcagcagcggcuggaccgccggcgccgccgcauacuacgugggcuaccugcagccacggaccuuccugcugaaguacaacgagaacggcaccaucaccgacgccguggacugcgcccuggacccccugagcgagaccaaguguacccuaaagagcuucaccguggagaagggcaucuaccagaccagcaacuuccgggugcagcccacugagagcauugugcgguuccccaacaucaccaaccugugccccuucggcgagguguucaacgccacccgguucgccagcguguacgccuggaaccggaagcggaucagcaacugcguggccgacuacagcgugcuguacaacagcgccagcuucagcaccuucaagugcuacggcgugagcccuaccaagcugaacgaccugugcuucaccaacguguacgcugacagcuucgugauccggggcgacgaggugcggcagaucgcccccggccagaccggcaagaucgccgacuacaacuacaagcugcccgacgacuucaccggcugcgugaucgccuggaacagcaacaaccuggacagcaaggugggcggcaacuacaacuaccgguaccggcuguuccguaagagcaaccugaagccauucgagcgggacaucagcaccgagaucuaccaggccggcagcacccccugcaacgguguggagggcuuuaacugcuacuucccccugcagagcuacggcuuccagcccaccaacggcgugggcuaccagcccuaccgggugguggugcugagcuucgagcugcugcacgcccccgccaccgugugcggcccuaaaaagagcaccaaccuggugaagaacaagugcgugaacuucaauuucaacggccugaccggcaccggcgugcugaccgagagcaacaagaaguuccugcccuuccagcaguucggccgggauaucgccgacaccaccgacgcagugcgggacccccagacccuggagauccuggacaucaccccaugcagcuucggcggcgugagcgucaucacccccggcacaaacaccagcaaccagguggccgugcuguaccagggagugaacugcaccgaggugcccguggccauccacgccgaccagcugacccccaccuggcggguguacagcaccggcagcaacguguuccagacccgggccggcugccugaucggcgccgagcacgugaacaacagcuacgagugcgacauccccaucggcgcuggcaucugugccuccuaccagacccagaccaacagcccccggcgggcccggagcguggccagccagagcaucaucgccuacaccaugagccugggcgccgagaacagcguggccuacagcaacaacagcaucgcgaucccuaccaacuucaccauaagcgugaccaccgagaucuuacccgugagcaugaccaagaccagcguggacugcaccauguacaucugcggcgacagcaccgagugcagcaaccugcugcugcaguacggcagcuucugcacccagcugaaccgggcccugaccggcaucgccguggagcaggacaagaacacccaagagguguucgcccaggugaagcagaucuacaagacucccccaaucaaggacuucggcggcuucaacuucagccagauccugcccgaccccagcaagcccagcaagcggagcuucaucgaggaccugcuguucaacaaggugacccuggccgacgccggcuucaucaagcaguacggcgacugccugggggauaucgccgcucgggaccugaucugcgcccagaaguucaacggccugaccgugcugcccccucugcugaccgacgagaugaucgcccaguacaccagcgcccugcuggccggcaccaucaccagcggcuggaccuucggcgccggcgcagcccuucagauccccuucgccaugcagauggccuacagguucaacggcaucggcgugacccagaacgugcuguacgagaaccagaagcugaucgccaaccaguucaacagcgccaucggcaagauccaggacagccugagcagcaccgccagcgcccugggcaagcugcaggacguggugaaccagaacgcucaggcccugaacacccuggugaagcagcugagcagcaacuucggcgccaucagcagcgugcugaaugacauccugucacggcuggaucccccagaggccgaggugcagaucgaccggcugaucaccggccggcugcagagccugcagaccuacgugacccagcagcugauccgggccgccgagauucgggccagcgccaaccuggcagccaccaagaugagcgagugcgugcugggccagagcaagcggguggacuuuugcggcaagggcuaccaccugaugagcuucccccagagcgcuccccacggcgugguguuccugcacgugacauacguccccgcccaggagaagaacuucaccaccgcccccgccaucugccacgacggcaaggcccacuucccccgggagggaguguucgugagcaacggcacccacugguucgugacccagcggaacuucuacgagccucagaucaucaccaccgacaacaccuucgugagcggcaacugcgacguggugaucggcaucgugaacaacaccguguacgacccccuccagcccgagcuggacagcuucaaggaggagcuggacaaguacuucaagaaccacaccagcccagacguggaccugggcgacaucagcggcaucaacgccagcguggugaacauccagaaggagaucgaccggcugaacgagguggccaagaaccugaacgagagccugaucgaccugcaggagcugggcaaguacgagcaguacaucaaguggcccugguacaucuggcugggcuucaucgccggccugaucgccaucgugauggugaccaucaugcugugcugcaugaccagcuguugcagcugccugaagggcugcugcagcugcggcagcugcugcaaguucgacgaggacgacagcgagcccgugcugaagggcgugaagcugcacuacaccugauaauaggcuggagccucgguggccuagcuucuugccccuugggccuccccccagccccuccuccccuuccugcacccguacccccguggucuuugaauaaagucugagugggcggcaaaaaaaaaaaaaaaaaaaaaaaaaaaaaaaaaaaaaaaaaaaaaaaaaaaaaaaaaaaaaaaaaaaaaaaaaaaaaaaaaaaaaaaaaaaaaaaaaaaaucuag

SEQ ID NO: 26669 - RNA, 4100 nt, Artificial Sequence
  SARS-CoV-2/Wuhan/WIV05/2019__EPI_ISL_402128 spike protein mRNA gc mod (1-1273)(K986P_V987P)
gggaaauaagagagaaaagaagaguaagaagaaauauaagaccccggcgccgccaccauguucguguuucuggugcugcugccccugguguccagccagugugugaaccugaccaccagaacacagcugccuccagccuacaccaacagcuucaccagaggcguguacuaccccgacaagguguucagauccagcgugcugcacucuacccaggaccuguuccugccuuucuucagcaacgugaccugguuccacgccauccacguguccggcaccaauggcaccaagagauucgacaaccccgugcugcccuucaacgacgggguguacuuugccagcaccgagaaguccaacaucaucagaggcuggaucuucggcaccacacuggacagcaagacccagagccugcugaucgugaacaacgccaccaacguggucaucaaagugugcgaguuccaguucugcaacgaccccuuccugggcgucuacuaccacaagaacaacaagagcuggauggaaagcgaguuccggguguacagcagcgccaacaacugcaccuucgaguacgugucccagccuuuccugauggaccuggaaggcaagcagggcaacuucaagaaccugcgcgaguucguguucaagaacaucgacggcuacuucaaaaucuacagcaagcacaccccuaucaaccucgugcgggaucugccucagggcuucucugcucuggaaccccugguggaucugcccaucggcaucaacaucacccgguuucagacacugcuggcccugcacagaagcuaccugacaccuggcgauagcagcagcggauggacagcuggugccgccgcuuacuaugugggcuaccugcagccuagaaccuuccugcugaaguacaacgagaacggcaccaucaccgacgccguggauugugcucuggauccucugagcgagacaaagugcacccugaaguccuucaccguggaaaagggcaucuaccagaccagcaacuuccgggugcagcccaccgaauccaucgugcgguuccccaauaucaccaaucugugccccuucggcgagguguucaaugccaccagauucgccucuguguacgccuggaaccggaagcggaucagcaauugcguggccgacuacuccgugcuguacaacuccgccagcuucagcaccuucaagugcuacggcguguccccuaccaagcugaacgaccugugcuucacaaacguguacgccgacagcuucgugauccggggagaugaagugcggcagauugccccuggacagacaggcaagaucgccgacuacaacuacaagcugcccgacgacuucaccggcugugugauugccuggaacagcaacaaccuggacuccaaagucggcggcaacuacaauuaccuguaccggcuguuccggaaguccaaucugaagcccuucgagcgggacaucagcaccgaaaucuaucaggccggcagcaccccuugcaacggcguggaaggcuucaacugcuacuucccacugcaguccuacggcuuucagcccacaaauggcgugggcuaucagcccuacagagugguggugcugagcuucgaacugcugcaugcuccugccacagugugcggcccuaagaaaagcaccaaucucgugaagaacaaaugcgugaacuucaacuucaacggccugaccggcaccggcgugcugacagagagcaacaagaaguuccugccauuccagcaguuuggccgggauaucgccgauaccacagacgccguuagagauccccagacacuggaaauccuggacaucaccccaugcagcuucggcggagugucugugaucaccccuggcaccaacaccagcaaucagguggcagugcuguaccaggacgugaacuguaccgaagugcccguggccauucacgccgaucagcugacaccuacauggcggguguacuccaccggcagcaauguguuucagaccagagccggcugucugaucggagccgagcacgugaacaauagcuacgagugcgacauccccaucggcgcuggcaucugugccagcuaccagacacagacaaacagccccagacgggcuagaagcguggccagccagagcaucauugccuacacaaugucucugggcgccgagaacagcguggccuacuccaacaacucuaucgcuauccccaccaacuucaccaucagcgugaccaccgagauccugccuguguccaugaccaagaccagcguggacugcaccauguacaucugcggcgauuccaccgagugcuccaaccugcugcugcaguacggcagcuucugcacccagcugaauagagcccugacagggaucgccguggaacaggacaagaacacccaagagguguucgcccaagugaagcaaaucuacaagaccccuccuaucaaggacuucggcggcuucaauuucagccagauucugcccgauccuagcaagcccagcaagcggagcuucaucgaggaccugcuguucaacaaagugacacuggccgacgccggcuucaucaagcaguauggcgauugucugggcgacauugccgccagggaucugauuugcgcccagaaguuuaacggacugacagugcugccuccucugcugaccgaugagaugaucgcccaguacacaucugcccugcuggccggcacaaucacaagcggcuggacauuuggagcuggcgccgcucugcagauccccuuugcuaugcagauggccuaccgguucaacggcaucggagugacccagaaugugcuguacgagaaccagaagcugaucgccaaccaguucaacagcgccaucggcaagauccaggacagccugagcagcacagcaagcgcccugggaaagcugcaggacguggucaaccagaaugcccaggcacugaacacccuggucaagcagcuguccuccaacuucggcgccaucagcucugugcugaacgauauccugagcagacuggacccuccugaggccgaggugcagaucgacagacugaucacaggcagacugcagagccuccagacauacgugacccagcagcugaucagagccgccgagauuagagccucugccaaucuggccgccaccaagaugucugagugugugcugggccagagcaagagaguggacuuuugcggcaagggcuaccaccugaugagcuucccucagucugccccucacggcgugguguuucugcacgugacauaugugcccgcucaagagaagaauuucaccaccgcuccagccaucugccacgacggcaaagcccacuuuccuagagaaggcguguucguguccaacggcacccauugguucgugacacagcggaacuucuacgagccccagaucaucaccaccgacaacaccuucgugucuggcaacugcgacguugugaucggcauugugaacaauaccguguacgacccucugcagcccgagcuggacagcuucaaagaggaacuggacaaguacuuuaagaaccacacaagccccgacguggaccugggcgauaucagcggaaucaaugccagcgucgugaacauccagaaagagaucgaccggcugaacgagguggccaagaaucugaacgagagccugaucgaccugcaagaacuggggaaguacgagcaguacaucaaguggcccugguacaucuggcugggcuuuaucgccggacugauugccaucgugauggucacaaucaugcuguguugcaugaccagcugcuguagcugccugaagggcuguuguagcuguggcagcugcugcaaguucgacgaggacgauucugagcccgugcugaagggcgugaaacugcacuacaccugauaauaggcuggagccucgguggccuagcuucuugccccuugggccuccccccagccccuccuccccuuccugcacccguacccccguggucuuugaauaaagucugagugggcggcaaaaaaaaaaaaaaaaaaaaaaaaaaaaaaaaaaaaaaaaaaaaaaaaaaaaaaaaaaaaaaaaaaaaaaaaaaaaaaaaaaaaaaaaaaaaaaaaaaaaucuag

SEQ ID NO: 26670 - RNA, 4100 nt, Artificial Sequence
  SARS-CoV-2/Wuhan/WIV05/2019__EPI_ISL_402128 spike protein mRNA gc mod (1-1273)(K986P_V987P_ D614G)
gggaaauaagagagaaaagaagaguaagaagaaauauaagaccccggcgccgccaccauguucguguuucuggugcugcugccccugguguccagccagugugugaaccugaccaccagaacacagcugccuccagccuacaccaacagcuucaccagaggcguguacuaccccgacaagguguucagauccagcgugcugcacucuacccaggaccuguuccugccuuucuucagcaacgugaccugguuccacgccauccacguguccggcaccaauggcaccaagagauucgacaaccccgugcugcccuucaacgacgggguguacuuugccagcaccgagaaguccaacaucaucagaggcuggaucuucggcaccacacuggacagcaagacccagagccugcugaucgugaacaacgccaccaacguggucaucaaagugugcgaguuccaguucugcaacgaccccuuccugggcgucuacuaccacaagaacaacaagagcuggauggaaagcgaguuccggguguacagcagcgccaacaacugcaccuucgaguacgugucccagccuuuccugauggaccuggaaggcaagcagggcaacuucaagaaccugcgcgaguucguguucaagaacaucgacggcuacuucaaaaucuacagcaagcacaccccuaucaaccucgugcgggaucugccucagggcuucucugcucuggaaccccugguggaucugcccaucggcaucaacaucacccgguuucagacacugcuggcccugcacagaagcuaccugacaccuggcgauagcagcagcggauggacagcuggugccgccgcuuacuaugugggcuaccugcagccuagaaccuuccugcugaaguacaacgagaacggcaccaucaccgacgccguggauugugcucuggauccucugagcgagacaaagugcacccugaaguccuucaccguggaaaagggcaucuaccagaccagcaacuuccgggugcagcccaccgaauccaucgugcgguuccccaauaucaccaaucugugccccuucggcgagguguucaaugccaccagauucgccucuguguacgccuggaaccggaagcggaucagcaauugcguggccgacuacuccgugcuguacaacuccgccagcuucagcaccuucaagugcuacggcguguccccuaccaagcugaacgaccugugcuucacaaacguguacgccgacagcuucgugauccggggagaugaagugcggcagauugccccuggacagacaggcaagaucgccgacuacaacuacaagcugcccgacgacuucaccggcugugugauugccuggaacagcaacaaccuggacuccaaagucggcggcaacuacaauuaccuguaccggcuguuccggaaguccaaucugaagcccuucgagcgggacaucagcaccgaaaucuaucaggccggcagcaccccuugcaacggcguggaaggcuucaacugcuacuucccacugcaguccuacggcuuucagcccacaaauggcgugggcuaucagcccuacagagugguggugcugagcuucgaacugcugcaugcuccugccacagugugcggcccuaagaaaagcaccaaucucgugaagaacaaaugcgugaacuucaacuucaacggccugaccggcaccggcgugcugacagagagcaacaagaaguuccugccauuccagcaguuuggccgggauaucgccgauaccacagacgccguuagagauccccagacacuggaaauccuggacaucaccccaugcagcuucggcggagugucugugaucaccccuggcaccaacaccagcaaucagguggcagugcuguaccagggcgugaacuguaccgaagugcccguggccauucacgccgaucagcugacaccuacauggcggguguacuccaccggcagcaauguguuucagaccagagccggcugucugaucggagccgagcacgugaacaauagcuacgagugcgacauccccaucggcgcuggcaucugugccagcuaccagacacagacaaacagccccagacgggcuagaagcguggccagccagagcaucauugccuacacaaugucucugggcgccgagaacagcguggccuacuccaacaacucuaucgcuauccccaccaacuucaccaucagcgugaccaccgagauccugccuguguccaugaccaagaccagcguggacugcaccauguacaucugcggcgauuccaccgagugcuccaaccugcugcugcaguacggcagcuucugcacccagcugaauagagcccugacagggaucgccguggaacaggacaagaacacccaagagguguucgcccaagugaagcaaaucuacaagaccccuccuaucaaggacuucggcggcuucaauuucagccagauucugcccgauccuagcaagcccagcaagcggagcuucaucgaggaccugcuguucaacaaagugacacuggccgacgccggcuucaucaagcaguauggcgauugucugggcgacauugccgccagggaucugauuugcgcccagaaguuuaacggacugacagugcugccuccucugcugaccgaugagaugaucgcccaguacacaucugcccugcuggccggcacaaucacaagcggcuggacauuuggagcuggcgccgcucugcagauccccuuugcuaugcagauggccuaccgguucaacggcaucggagugacccagaaugugcuguacgagaaccagaagcugaucgccaaccaguucaacagcgccaucggcaagauccaggacagccugagcagcacagcaagcgcccugggaaagcugcaggacguggucaaccagaaugcccaggcacugaacacccuggucaagcagcuguccuccaacuucggcgccaucagcucugugcugaacgauauccugagcagacuggacccuccugaggccgaggugcagaucgacagacugaucacaggcagacugcagagccuccagacauacgugacccagcagcugaucagagccgccgagauuagagccucugccaaucuggccgccaccaagaugucugagugugugcugggccagagcaagagaguggacuuuugcggcaagggcuaccaccugaugagcuucccucagucugccccucacggcgugguguuucugcacgugacauaugugcccgcucaagagaagaauuucaccaccgcuccagccaucugccacgacggcaaagcccacuuuccuagagaaggcguguucguguccaacggcacccauugguucgugacacagcggaacuucuacgagccccagaucaucaccaccgacaacaccuucgugucuggcaacugcgacguugugaucggcauugugaacaauaccguguacgacccucugcagcccgagcuggacagcuucaaagaggaacuggacaaguacuuuaagaaccacacaagccccgacguggaccugggcgauaucagcggaaucaaugccagcgucgugaacauccagaaagagaucgaccggcugaacgagguggccaagaaucugaacgagagccugaucgaccugcaagaacuggggaaguacgagcaguacaucaaguggcccugguacaucuggcugggcuuuaucgccggacugauugccaucgugauggucacaaucaugcuguguugcaugaccagcugcuguagcugccugaagggcuguuguagcuguggcagcugcugcaaguucgacgaggacgauucugagcccgugcugaagggcgugaaacugcacuacaccugauaauaggcuggagccucgguggccuagcuucuugccccuugggccuccccccagccccuccuccccuuccugcacccguacccccguggucuuugaauaaagucugagugggcggcaaaaaaaaaaaaaaaaaaaaaaaaaaaaaaaaaaaaaaaaaaaaaaaaaaaaaaaaaaaaaaaaaaaaaaaaaaaaaaaaaaaaaaaaaaaaaaaaaaaaucuag

SEQ ID NO: 26671 - RNA, 4100 nt, Artificial Sequence
  SARS-CoV-2/Wuhan/WIV05/2019__EPI_ISL_402128 spike protein mRNA gc mod (1-1273)(K986P_V987P_A222V_D614G)
gggaaauaagagagaaaagaagaguaagaagaaauauaagaccccggcgccgccaccauguucguguuucuggugcugcugccccugguguccagccagugugugaaccugaccaccagaacacagcugccuccagccuacaccaacagcuucaccagaggcguguacuaccccgacaagguguucagauccagcgugcugcacucuacccaggaccuguuccugccuuucuucagcaacgugaccugguuccacgccauccacguguccggcaccaauggcaccaagagauucgacaaccccgugcugcccuucaacgacgggguguacuuugccagcaccgagaaguccaacaucaucagaggcuggaucuucggcaccacacuggacagcaagacccagagccugcugaucgugaacaacgccaccaacguggucaucaaagugugcgaguuccaguucugcaacgaccccuuccugggcgucuacuaccacaagaacaacaagagcuggauggaaagcgaguuccggguguacagcagcgccaacaacugcaccuucgaguacgugucccagccuuuccugauggaccuggaaggcaagcagggcaacuucaagaaccugcgcgaguucguguucaagaacaucgacggcuacuucaaaaucuacagcaagcacaccccuaucaaccucgugcgggaucugccucagggcuucucugugcuggaaccccugguggaucugcccaucggcaucaacaucacccgguuucagacacugcuggcccugcacagaagcuaccugacaccuggcgauagcagcagcggauggacagcuggugccgccgcuuacuaugugggcuaccugcagccuagaaccuuccugcugaaguacaacgagaacggcaccaucaccgacgccguggauugugcucuggauccucugagcgagacaaagugcacccugaaguccuucaccguggaaaagggcaucuaccagaccagcaacuuccgggugcagcccaccgaauccaucgugcgguuccccaauaucaccaaucugugccccuucggcgagguguucaaugccaccagauucgccucuguguacgccuggaaccggaagcggaucagcaauugcguggccgacuacuccgugcuguacaacuccgccagcuucagcaccuucaagugcuacggcguguccccuaccaagcugaacgaccugugcuucacaaacguguacgccgacagcuucgugauccggggagaugaagugcggcagauugccccuggacagacaggcaagaucgccgacuacaacuacaagcugcccgacgacuucaccggcugugugauugccuggaacagcaacaaccuggacuccaaagucggcggcaacuacaauuaccuguaccggcuguuccggaaguccaaucugaagcccuucgagcgggacaucagcaccgaaaucuaucaggccggcagcaccccuugcaacggcguggaaggcuucaacugcuacuucccacugcaguccuacggcuuucagcccacaaauggcgugggcuaucagcccuacagagugguggugcugagcuucgaacugcugcaugcuccugccacagugugcggcccuaagaaaagcaccaaucucgugaagaacaaaugcgugaacuucaacuucaacggccugaccggcaccggcgugcugacagagagcaacaagaaguuccugccauuccagcaguuuggccgggauaucgccgauaccacagacgccguuagagauccccagacacuggaaauccuggacaucaccccaugcagcuucggcggagugucugugaucaccccuggcaccaacaccagcaaucagguggcagugcuguaccagggcgugaacuguaccgaagugcccguggccauucacgccgaucagcugacaccuacauggcggguguacuccaccggcagcaauguguuucagaccagagccggcugucugaucggagccgagcacgugaacaauagcuacgagugcgacauccccaucggcgcuggcaucugugccagcuaccagacacagacaaacagccccagacgggcuagaagcguggccagccagagcaucauugccuacacaaugucucugggcgccgagaacagcguggccuacuccaacaacucuaucgcuauccccaccaacuucaccaucagcgugaccaccgagauccugccuguguccaugaccaagaccagcguggacugcaccauguacaucugcggcgauuccaccgagugcuccaaccugcugcugcaguacggcagcuucugcacccagcugaauagagcccugacagggaucgccguggaacaggacaagaacacccaagagguguucgcccaagugaagcaaaucuacaagaccccuccuaucaaggacuucggcggcuucaauuucagccagauucugcccgauccuagcaagcccagcaagcggagcuucaucgaggaccugcuguucaacaaagugacacuggccgacgccggcuucaucaagcaguauggcgauugucugggcgacauugccgccagggaucugauuugcgcccagaaguuuaacggacugacagugcugccuccucugcugaccgaugagaugaucgcccaguacacaucugcccugcuggccggcacaaucacaagcggcuggacauuuggagcuggcgccgcucugcagauccccuuugcuaugcagauggccuaccgguucaacggcaucggagugacccagaaugugcuguacgagaaccagaagcugaucgccaaccaguucaacagcgccaucggcaagauccaggacagccugagcagcacagcaagcgcccugggaaagcugcaggacguggucaaccagaaugcccaggcacugaacacccuggucaagcagcuguccuccaacuucggcgccaucagcucugugcugaacgauauccugagcagacuggacccuccugaggccgaggugcagaucgacagacugaucacaggcagacugcagagccuccagacauacgugacccagcagcugaucagagccgccgagauuagagccucugccaaucuggccgccaccaagaugucugagugugugcugggccagagcaagagaguggacuuuugcggcaagggcuaccaccugaugagcuucccucagucugccccucacggcgugguguuucugcacgugacauaugugcccgcucaagagaagaauuucaccaccgcuccagccaucugccacgacggcaaagcccacuuuccuagagaaggcguguucguguccaacggcacccauugguucgugacacagcggaacuucuacgagccccagaucaucaccaccgacaacaccuucgugucuggcaacugcgacguugugaucggcauugugaacaauaccguguacgacccucugcagcccgagcuggacagcuucaaagaggaacuggacaaguacuuuaagaaccacacaagccccgacguggaccugggcgauaucagcggaaucaaugccagcgucgugaacauccagaaagagaucgaccggcugaacgagguggccaagaaucugaacgagagccugaucgaccugcaagaacuggggaaguacgagcaguacaucaaguggcccugguacaucuggcugggcuuuaucgccggacugauugccaucgugauggucacaaucaugcuguguugcaugaccagcugcuguagcugccugaagggcuguuguagcuguggcagcugcugcaaguucgacgaggacgauucugagcccgugcugaagggcgugaaacugcacuacaccugauaauaggcuggagccucgguggccuagcuucuugccccuugggccuccccccagccccuccuccccuuccugcacccguacccccguggucuuugaauaaagucugagugggcggcaaaaaaaaaaaaaaaaaaaaaaaaaaaaaaaaaaaaaaaaaaaaaaaaaaaaaaaaaaaaaaaaaaaaaaaaaaaaaaaaaaaaaaaaaaaaaaaaaaaaucuag

SEQ ID NO: 26672 - RNA, 4100 nt, Artificial Sequence
  SARS-CoV-2/Wuhan/WIV05/2019__EPI_ISL_402128 spike protein mRNA gc mod (1-1273)(K986P_V987P_N439K_D614G)
gggaaauaagagagaaaagaagaguaagaagaaauauaagaccccggcgccgccaccauguucguguuucuggugcugcugccccugguguccagccagugugugaaccugaccaccagaacacagcugccuccagccuacaccaacagcuucaccagaggcguguacuaccccgacaagguguucagauccagcgugcugcacucuacccaggaccuguuccugccuuucuucagcaacgugaccugguuccacgccauccacguguccggcaccaauggcaccaagagauucgacaaccccgugcugcccuucaacgacgggguguacuuugccagcaccgagaaguccaacaucaucagaggcuggaucuucggcaccacacuggacagcaagacccagagccugcugaucgugaacaacgccaccaacguggucaucaaagugugcgaguuccaguucugcaacgaccccuuccugggcgucuacuaccacaagaacaacaagagcuggauggaaagcgaguuccggguguacagcagcgccaacaacugcaccuucgaguacgugucccagccuuuccugauggaccuggaaggcaagcagggcaacuucaagaaccugcgcgaguucguguucaagaacaucgacggcuacuucaaaaucuacagcaagcacaccccuaucaaccucgugcgggaucugccucagggcuucucugcucuggaaccccugguggaucugcccaucggcaucaacaucacccgguuucagacacugcuggcccugcacagaagcuaccugacaccuggcgauagcagcagcggauggacagcuggugccgccgcuuacuaugugggcuaccugcagccuagaaccuuccugcugaaguacaacgagaacggcaccaucaccgacgccguggauugugcucuggauccucugagcgagacaaagugcacccugaaguccuucaccguggaaaagggcaucuaccagaccagcaacuuccgggugcagcccaccgaauccaucgugcgguuccccaauaucaccaaucugugccccuucggcgagguguucaaugccaccagauucgccucuguguacgccuggaaccggaagcggaucagcaauugcguggccgacuacuccgugcuguacaacuccgccagcuucagcaccuucaagugcuacggcguguccccuaccaagcugaacgaccugugcuucacaaacguguacgccgacagcuucgugauccggggagaugaagugcggcagauugccccuggacagacaggcaagaucgccgacuacaacuacaagcugcccgacgacuucaccggcugugugauugccuggaacagcaagaaccuggacuccaaagucggcggcaacuacaauuaccuguaccggcuguuccggaaguccaaucugaagcccuucgagcgggacaucagcaccgaaaucuaucaggccggcagcaccccuugcaacggcguggaaggcuucaacugcuacuucccacugcaguccuacggcuuucagcccacaaauggcgugggcuaucagcccuacagagugguggugcugagcuucgaacugcugcaugcuccugccacagugugcggcccuaagaaaagcaccaaucucgugaagaacaaaugcgugaacuucaacuucaacggccugaccggcaccggcgugcugacagagagcaacaagaaguuccugccauuccagcaguuuggccgggauaucgccgauaccacagacgccguuagagauccccagacacuggaaauccuggacaucaccccaugcagcuucggcggagugucugugaucaccccuggcaccaacaccagcaaucagguggcagugcuguaccagggcgugaacuguaccgaagugcccguggccauucacgccgaucagcugacaccuacauggcggguguacuccaccggcagcaauguguuucagaccagagccggcugucugaucggagccgagcacgugaacaauagcuacgagugcgacauccccaucggcgcuggcaucugugccagcuaccagacacagacaaacagccccagacgggcuagaagcguggccagccagagcaucauugccuacacaaugucucugggcgccgagaacagcguggccuacuccaacaacucuaucgcuauccccaccaacuucaccaucagcgugaccaccgagauccugccuguguccaugaccaagaccagcguggacugcaccauguacaucugcggcgauuccaccgagugcuccaaccugcugcugcaguacggcagcuucugcacccagcugaauagagcccugacagggaucgccguggaacaggacaagaacacccaagagguguucgcccaagugaagcaaaucuacaagaccccuccuaucaaggacuucggcggcuucaauuucagccagauucugcccgauccuagcaagcccagcaagcggagcuucaucgaggaccugcuguucaacaaagugacacuggccgacgccggcuucaucaagcaguauggcgauugucugggcgacauugccgccagggaucugauuugcgcccagaaguuuaacggacugacagugcugccuccucugcugaccgaugagaugaucgcccaguacacaucugcccugcuggccggcacaaucacaagcggcuggacauuuggagcuggcgccgcucugcagauccccuuugcuaugcagauggccuaccgguucaacggcaucggagugacccagaaugugcuguacgagaaccagaagcugaucgccaaccaguucaacagcgccaucggcaagauccaggacagccugagcagcacagcaagcgcccugggaaagcugcaggacguggucaaccagaaugcccaggcacugaacacccuggucaagcagcuguccuccaacuucggcgccaucagcucugugcugaacgauauccugagcagacuggacccuccugaggccgaggugcagaucgacagacugaucacaggcagacugcagagccuccagacauacgugacccagcagcugaucagagccgccgagauuagagccucugccaaucuggccgccaccaagaugucugagugugugcugggccagagcaagagaguggacuuuugcggcaagggcuaccaccugaugagcuucccucagucugccccucacggcgugguguuucugcacgugacauaugugcccgcucaagagaagaauuucaccaccgcuccagccaucugccacgacggcaaagcccacuuuccuagagaaggcguguucguguccaacggcacccauugguucgugacacagcggaacuucuacgagccccagaucaucaccaccgacaacaccuucgugucuggcaacugcgacguugugaucggcauugugaacaauaccguguacgacccucugcagcccgagcuggacagcuucaaagaggaacuggacaaguacuuuaagaaccacacaagccccgacguggaccugggcgauaucagcggaaucaaugccagcgucgugaacauccagaaagagaucgaccggcugaacgagguggccaagaaucugaacgagagccugaucgaccugcaagaacuggggaaguacgagcaguacaucaaguggcccugguacaucuggcugggcuuuaucgccggacugauugccaucgugauggucacaaucaugcuguguugcaugaccagcugcuguagcugccugaagggcuguuguagcuguggcagcugcugcaaguucgacgaggacgauucugagcccgugcugaagggcgugaaacugcacuacaccugauaauaggcuggagccucgguggccuagcuucuugccccuugggccuccccccagccccuccuccccuuccugcacccguacccccguggucuuugaauaaagucugagugggcggcaaaaaaaaaaaaaaaaaaaaaaaaaaaaaaaaaaaaaaaaaaaaaaaaaaaaaaaaaaaaaaaaaaaaaaaaaaaaaaaaaaaaaaaaaaaaaaaaaaaaucuag

SEQ ID NO: 26673 - RNA, 4100 nt, Artificial Sequence
  SARS-CoV-2/Wuhan/WIV05/2019__EPI_ISL_402128 spike protein mRNA gc mod (1-1273)(K986P_V987P_S477N_D614G)
gggaaauaagagagaaaagaagaguaagaagaaauauaagaccccggcgccgccaccauguucguguuucuggugcugcugccccugguguccagccagugugugaaccugaccaccagaacacagcugccuccagccuacaccaacagcuucaccagaggcguguacuaccccgacaagguguucagauccagcgugcugcacucuacccaggaccuguuccugccuuucuucagcaacgugaccugguuccacgccauccacguguccggcaccaauggcaccaagagauucgacaaccccgugcugcccuucaacgacgggguguacuuugccagcaccgagaaguccaacaucaucagaggcuggaucuucggcaccacacuggacagcaagacccagagccugcugaucgugaacaacgccaccaacguggucaucaaagugugcgaguuccaguucugcaacgaccccuuccugggcgucuacuaccacaagaacaacaagagcuggauggaaagcgaguuccggguguacagcagcgccaacaacugcaccuucgaguacgugucccagccuuuccugauggaccuggaaggcaagcagggcaacuucaagaaccugcgcgaguucguguucaagaacaucgacggcuacuucaaaaucuacagcaagcacaccccuaucaaccucgugcgggaucugccucagggcuucucugcucuggaaccccugguggaucugcccaucggcaucaacaucacccgguuucagacacugcuggcccugcacagaagcuaccugacaccuggcgauagcagcagcggauggacagcuggugccgccgcuuacuaugugggcuaccugcagccuagaaccuuccugcugaaguacaacgagaacggcaccaucaccgacgccguggauugugcucuggauccucugagcgagacaaagugcacccugaaguccuucaccguggaaaagggcaucuaccagaccagcaacuuccgggugcagcccaccgaauccaucgugcgguuccccaauaucaccaaucugugccccuucggcgagguguucaaugccaccagauucgccucuguguacgccuggaaccggaagcggaucagcaauugcguggccgacuacuccgugcuguacaacuccgccagcuucagcaccuucaagugcuacggcguguccccuaccaagcugaacgaccugugcuucacaaacguguacgccgacagcuucgugauccggggagaugaagugcggcagauugccccuggacagacaggcaagaucgccgacuacaacuacaagcugcccgacgacuucaccggcugugugauugccuggaacagcaacaaccuggacuccaaagucggcggcaacuacaauuaccuguaccggcuguuccggaaguccaaucugaagcccuucgagcgggacaucagcaccgaaaucuaucaggccggcaacaccccuugcaacggcguggaaggcuucaacugcuacuucccacugcaguccuacggcuuucagcccacaaauggcgugggcuaucagcccuacagagugguggugcugagcuucgaacugcugcaugcuccugccacagugugcggcccuaagaaaagcaccaaucucgugaagaacaaaugcgugaacuucaacuucaacggccugaccggcaccggcgugcugacagagagcaacaagaaguuccugccauuccagcaguuuggccgggauaucgccgauaccacagacgccguuagagauccccagacacuggaaauccuggacaucaccccaugcagcuucggcggagugucugugaucaccccuggcaccaacaccagcaaucagguggcagugcuguaccagggcgugaacuguaccgaagugcccguggccauucacgccgaucagcugacaccuacauggcggguguacuccaccggcagcaauguguuucagaccagagccggcugucugaucggagccgagcacgugaacaauagcuacgagugcgacauccccaucggcgcuggcaucugugccagcuaccagacacagacaaacagccccagacgggcuagaagcguggccagccagagcaucauugccuacacaaugucucugggcgccgagaacagcguggccuacuccaacaacucuaucgcuauccccaccaacuucaccaucagcgugaccaccgagauccugccuguguccaugaccaagaccagcguggacugcaccauguacaucugcggcgauuccaccgagugcuccaaccugcugcugcaguacggcagcuucugcacccagcugaauagagcccugacagggaucgccguggaacaggacaagaacacccaagagguguucgcccaagugaagcaaaucuacaagaccccuccuaucaaggacuucggcggcuucaauuucagccagauucugcccgauccuagcaagcccagcaagcggagcuucaucgaggaccugcuguucaacaaagugacacuggccgacgccggcuucaucaagcaguauggcgauugucugggcgacauugccgccagggaucugauuugcgcccagaaguuuaacggacugacagugcugccuccucugcugaccgaugagaugaucgcccaguacacaucugcccugcuggccggcacaaucacaagcggcuggacauuuggagcuggcgccgcucugcagauccccuuugcuaugcagauggccuaccgguucaacggcaucggagugacccagaaugugcuguacgagaaccagaagcugaucgccaaccaguucaacagcgccaucggcaagauccaggacagccugagcagcacagcaagcgcccugggaaagcugcaggacguggucaaccagaaugcccaggcacugaacacccuggucaagcagcuguccuccaacuucggcgccaucagcucugugcugaacgauauccugagcagacuggacccuccugaggccgaggugcagaucgacagacugaucacaggcagacugcagagccuccagacauacgugacccagcagcugaucagagccgccgagauuagagccucugccaaucuggccgccaccaagaugucugagugugugcugggccagagcaagagaguggacuuuugcggcaagggcuaccaccugaugagcuucccucagucugccccucacggcgugguguuucugcacgugacauaugugcccgcucaagagaagaauuucaccaccgcuccagccaucugccacgacggcaaagcccacuuuccuagagaaggcguguucguguccaacggcacccauugguucgugacacagcggaacuucuacgagccccagaucaucaccaccgacaacaccuucgugucuggcaacugcgacguugugaucggcauugugaacaauaccguguacgacccucugcagcccgagcuggacagcuucaaagaggaacuggacaaguacuuuaagaaccacacaagccccgacguggaccugggcgauaucagcggaaucaaugccagcgucgugaacauccagaaagagaucgaccggcugaacgagguggccaagaaucugaacgagagccugaucgaccugcaagaacuggggaaguacgagcaguacaucaaguggcccugguacaucuggcugggcuuuaucgccggacugauugccaucgugauggucacaaucaugcuguguugcaugaccagcugcuguagcugccugaagggcuguuguagcuguggcagcugcugcaaguucgacgaggacgauucugagcccgugcugaagggcgugaaacugcacuacaccugauaauaggcuggagccucgguggccuagcuucuugccccuugggccuccccccagccccuccuccccuuccugcacccguacccccguggucuuugaauaaagucugagugggcggcaaaaaaaaaaaaaaaaaaaaaaaaaaaaaaaaaaaaaaaaaaaaaaaaaaaaaaaaaaaaaaaaaaaaaaaaaaaaaaaaaaaaaaaaaaaaaaaaaaaaucuag

SEQ ID NO: 26674 - RNA, 4100 nt, Artificial Sequence
  SARS-CoV-2/Wuhan/WIV05/2019__EPI_ISL_402128 spike protein mRNA gc mod (1-1273)(K986P_V987P_N501Y_D614G)
gggaaauaagagagaaaagaagaguaagaagaaauauaagaccccggcgccgccaccauguucguguuucuggugcugcugccccugguguccagccagugugugaaccugaccaccagaacacagcugccuccagccuacaccaacagcuucaccagaggcguguacuaccccgacaagguguucagauccagcgugcugcacucuacccaggaccuguuccugccuuucuucagcaacgugaccugguuccacgccauccacguguccggcaccaauggcaccaagagauucgacaaccccgugcugcccuucaacgacgggguguacuuugccagcaccgagaaguccaacaucaucagaggcuggaucuucggcaccacacuggacagcaagacccagagccugcugaucgugaacaacgccaccaacguggucaucaaagugugcgaguuccaguucugcaacgaccccuuccugggcgucuacuaccacaagaacaacaagagcuggauggaaagcgaguuccggguguacagcagcgccaacaacugcaccuucgaguacgugucccagccuuuccugauggaccuggaaggcaagcagggcaacuucaagaaccugcgcgaguucguguucaagaacaucgacggcuacuucaaaaucuacagcaagcacaccccuaucaaccucgugcgggaucugccucagggcuucucugcucuggaaccccugguggaucugcccaucggcaucaacaucacccgguuucagacacugcuggcccugcacagaagcuaccugacaccuggcgauagcagcagcggauggacagcuggugccgccgcuuacuaugugggcuaccugcagccuagaaccuuccugcugaaguacaacgagaacggcaccaucaccgacgccguggauugugcucuggauccucugagcgagacaaagugcacccugaaguccuucaccguggaaaagggcaucuaccagaccagcaacuuccgggugcagcccaccgaauccaucgugcgguuccccaauaucaccaaucugugccccuucggcgagguguucaaugccaccagauucgccucuguguacgccuggaaccggaagcggaucagcaauugcguggccgacuacuccgugcuguacaacuccgccagcuucagcaccuucaagugcuacggcguguccccuaccaagcugaacgaccugugcuucacaaacguguacgccgacagcuucgugauccggggagaugaagugcggcagauugccccuggacagacaggcaagaucgccgacuacaacuacaagcugcccgacgacuucaccggcugugugauugccuggaacagcaacaaccuggacuccaaagucggcggcaacuacaauuaccuguaccggcuguuccggaaguccaaucugaagcccuucgagcgggacaucagcaccgaaaucuaucaggccggcagcaccccuugcaacggcguggaaggcuucaacugcuacuucccacugcaguccuacggcuuucagcccacauacggcgugggcuaucagcccuacagagugguggugcugagcuucgaacugcugcaugcuccugccacagugugcggcccuaagaaaagcaccaaucucgugaagaacaaaugcgugaacuucaacuucaacggccugaccggcaccggcgugcugacagagagcaacaagaaguuccugccauuccagcaguuuggccgggauaucgccgauaccacagacgccguuagagauccccagacacuggaaauccuggacaucaccccaugcagcuucggcggagugucugugaucaccccuggcaccaacaccagcaaucagguggcagugcuguaccagggcgugaacuguaccgaagugcccguggccauucacgccgaucagcugacaccuacauggcggguguacuccaccggcagcaauguguuucagaccagagccggcugucugaucggagccgagcacgugaacaauagcuacgagugcgacauccccaucggcgcuggcaucugugccagcuaccagacacagacaaacagccccagacgggcuagaagcguggccagccagagcaucauugccuacacaaugucucugggcgccgagaacagcguggccuacuccaacaacucuaucgcuauccccaccaacuucaccaucagcgugaccaccgagauccugccuguguccaugaccaagaccagcguggacugcaccauguacaucugcggcgauuccaccgagugcuccaaccugcugcugcaguacggcagcuucugcacccagcugaauagagcccugacagggaucgccguggaacaggacaagaacacccaagagguguucgcccaagugaagcaaaucuacaagaccccuccuaucaaggacuucggcggcuucaauuucagccagauucugcccgauccuagcaagcccagcaagcggagcuucaucgaggaccugcuguucaacaaagugacacuggccgacgccggcuucaucaagcaguauggcgauugucugggcgacauugccgccagggaucugauuugcgcccagaaguuuaacggacugacagugcugccuccucugcugaccgaugagaugaucgcccaguacacaucugcccugcuggccggcacaaucacaagcggcuggacauuuggagcuggcgccgcucugcagauccccuuugcuaugcagauggccuaccgguucaacggcaucggagugacccagaaugugcuguacgagaaccagaagcugaucgccaaccaguucaacagcgccaucggcaagauccaggacagccugagcagcacagcaagcgcccugggaaagcugcaggacguggucaaccagaaugcccaggcacugaacacccuggucaagcagcuguccuccaacuucggcgccaucagcucugugcugaacgauauccugagcagacuggacccuccugaggccgaggugcagaucgacagacugaucacaggcagacugcagagccuccagacauacgugacccagcagcugaucagagccgccgagauuagagccucugccaaucuggccgccaccaagaugucugagugugugcugggccagagcaagagaguggacuuuugcggcaagggcuaccaccugaugagcuucccucagucugccccucacggcgugguguuucugcacgugacauaugugcccgcucaagagaagaauuucaccaccgcuccagccaucugccacgacggcaaagcccacuuuccuagagaaggcguguucguguccaacggcacccauugguucgugacacagcggaacuucuacgagccccagaucaucaccaccgacaacaccuucgugucuggcaacugcgacguugugaucggcauugugaacaauaccguguacgacccucugcagcccgagcuggacagcuucaaagaggaacuggacaaguacuuuaagaaccacacaagccccgacguggaccugggcgauaucagcggaaucaaugccagcgucgugaacauccagaaagagaucgaccggcugaacgagguggccaagaaucugaacgagagccugaucgaccugcaagaacuggggaaguacgagcaguacaucaaguggcccugguacaucuggcugggcuuuaucgccggacugauugccaucgugauggucacaaucaugcuguguugcaugaccagcugcuguagcugccugaagggcuguuguagcuguggcagcugcugcaaguucgacgaggacgauucugagcccgugcugaagggcgugaaacugcacuacaccugauaauaggcuggagccucgguggccuagcuucuugccccuugggccuccccccagccccuccuccccuuccugcacccguacccccguggucuuugaauaaagucugagugggcggcaaaaaaaaaaaaaaaaaaaaaaaaaaaaaaaaaaaaaaaaaaaaaaaaaaaaaaaaaaaaaaaaaaaaaaaaaaaaaaaaaaaaaaaaaaaaaaaaaaaaucuag

SEQ ID NO: 26675 - RNA, 4094 nt, Artificial Sequence
  SARS-CoV-2/Wuhan/WIV05/2019__EPI_ISL_402128 spike protein mRNA gc mod (1-1273)(K986P_V987P_H69del_V70del_D614G)
gggaaauaagagagaaaagaagaguaagaagaaauauaagaccccggcgccgccaccauguucguguuucuggugcugcugccccugguguccagccagugugugaaccugaccaccagaacacagcugccuccagccuacaccaacagcuucaccagaggcguguacuaccccgacaagguguucagauccagcgugcugcacucuacccaggaccuguuccugccuuucuucagcaacgugaccugguuccacgccaucuccggcaccaauggcaccaagagauucgacaaccccgugcugcccuucaacgacgggguguacuuugccagcaccgagaaguccaacaucaucagaggcuggaucuucggcaccacacuggacagcaagacccagagccugcugaucgugaacaacgccaccaacguggucaucaaagugugcgaguuccaguucugcaacgaccccuuccugggcgucuacuaccacaagaacaacaagagcuggauggaaagcgaguuccggguguacagcagcgccaacaacugcaccuucgaguacgugucccagccuuuccugauggaccuggaaggcaagcagggcaacuucaagaaccugcgcgaguucguguucaagaacaucgacggcuacuucaaaaucuacagcaagcacaccccuaucaaccucgugcgggaucugccucagggcuucucugcucuggaaccccugguggaucugcccaucggcaucaacaucacccgguuucagacacugcuggcccugcacagaagcuaccugacaccuggcgauagcagcagcggauggacagcuggugccgccgcuuacuaugugggcuaccugcagccuagaaccuuccugcugaaguacaacgagaacggcaccaucaccgacgccguggauugugcucuggauccucugagcgagacaaagugcacccugaaguccuucaccguggaaaagggcaucuaccagaccagcaacuuccgggugcagcccaccgaauccaucgugcgguuccccaauaucaccaaucugugccccuucggcgagguguucaaugccaccagauucgccucuguguacgccuggaaccggaagcggaucagcaauugcguggccgacuacuccgugcuguacaacuccgccagcuucagcaccuucaagugcuacggcguguccccuaccaagcugaacgaccugugcuucacaaacguguacgccgacagcuucgugauccggggagaugaagugcggcagauugccccuggacagacaggcaagaucgccgacuacaacuacaagcugcccgacgacuucaccggcugugugauugccuggaacagcaacaaccuggacuccaaagucggcggcaacuacaauuaccuguaccggcuguuccggaaguccaaucugaagcccuucgagcgggacaucagcaccgaaaucuaucaggccggcagcaccccuugcaacggcguggaaggcuucaacugcuacuucccacugcaguccuacggcuuucagcccacaaauggcgugggcuaucagcccuacagagugguggugcugagcuucgaacugcugcaugcuccugccacagugugcggcccuaagaaaagcaccaaucucgugaagaacaaaugcgugaacuucaacuucaacggccugaccggcaccggcgugcugacagagagcaacaagaaguuccugccauuccagcaguuuggccgggauaucgccgauaccacagacgccguuagagauccccagacacuggaaauccuggacaucaccccaugcagcuucggcggagugucugugaucaccccuggcaccaacaccagcaaucagguggcagugcuguaccagggcgugaacuguaccgaagugcccguggccauucacgccgaucagcugacaccuacauggcggguguacuccaccggcagcaauguguuucagaccagagccggcugucugaucggagccgagcacgugaacaauagcuacgagugcgacauccccaucggcgcuggcaucugugccagcuaccagacacagacaaacagccccagacgggcuagaagcguggccagccagagcaucauugccuacacaaugucucugggcgccgagaacagcguggccuacuccaacaacucuaucgcuauccccaccaacuucaccaucagcgugaccaccgagauccugccuguguccaugaccaagaccagcguggacugcaccauguacaucugcggcgauuccaccgagugcuccaaccugcugcugcaguacggcagcuucugcacccagcugaauagagcccugacagggaucgccguggaacaggacaagaacacccaagagguguucgcccaagugaagcaaaucuacaagaccccuccuaucaaggacuucggcggcuucaauuucagccagauucugcccgauccuagcaagcccagcaagcggagcuucaucgaggaccugcuguucaacaaagugacacuggccgacgccggcuucaucaagcaguauggcgauugucugggcgacauugccgccagggaucugauuugcgcccagaaguuuaacggacugacagugcugccuccucugcugaccgaugagaugaucgcccaguacacaucugcccugcuggccggcacaaucacaagcggcuggacauuuggagcuggcgccgcucugcagauccccuuugcuaugcagauggccuaccgguucaacggcaucggagugacccagaaugugcuguacgagaaccagaagcugaucgccaaccaguucaacagcgccaucggcaagauccaggacagccugagcagcacagcaagcgcccugggaaagcugcaggacguggucaaccagaaugcccaggcacugaacacccuggucaagcagcuguccuccaacuucggcgccaucagcucugugcugaacgauauccugagcagacuggacccuccugaggccgaggugcagaucgacagacugaucacaggcagacugcagagccuccagacauacgugacccagcagcugaucagagccgccgagauuagagccucugccaaucuggccgccaccaagaugucugagugugugcugggccagagcaagagaguggacuuuugcggcaagggcuaccaccugaugagcuucccucagucugccccucacggcgugguguuucugcacgugacauaugugcccgcucaagagaagaauuucaccaccgcuccagccaucugccacgacggcaaagcccacuuuccuagagaaggcguguucguguccaacggcacccauugguucgugacacagcggaacuucuacgagccccagaucaucaccaccgacaacaccuucgugucuggcaacugcgacguugugaucggcauugugaacaauaccguguacgacccucugcagcccgagcuggacagcuucaaagaggaacuggacaaguacuuuaagaaccacacaagccccgacguggaccugggcgauaucagcggaaucaaugccagcgucgugaacauccagaaagagaucgaccggcugaacgagguggccaagaaucugaacgagagccugaucgaccugcaagaacuggggaaguacgagcaguacaucaaguggcccugguacaucuggcugggcuuuaucgccggacugauugccaucgugauggucacaaucaugcuguguugcaugaccagcugcuguagcugccugaagggcuguuguagcuguggcagcugcugcaaguucgacgaggacgauucugagcccgugcugaagggcgugaaacugcacuacaccugauaauaggcuggagccucgguggccuagcuucuugccccuugggccuccccccagccccuccuccccuuccugcacccguacccccguggucuuugaauaaagucugagugggcggcaaaaaaaaaaaaaaaaaaaaaaaaaaaaaaaaaaaaaaaaaaaaaaaaaaaaaaaaaaaaaaaaaaaaaaaaaaaaaaaaaaaaaaaaaaaaaaaaaaaaucuag

SEQ ID NO: 26676 - RNA, 4100 nt, Artificial Sequence
  SARS-CoV-2/Wuhan/WIV05/2019__EPI_ISL_402128 spike protein mRNA gc mod (1-1273)(K986P_V987P_Y453F_D614G)
gggaaauaagagagaaaagaagaguaagaagaaauauaagaccccggcgccgccaccauguucguguuucuggugcugcugccccugguguccagccagugugugaaccugaccaccagaacacagcugccuccagccuacaccaacagcuucaccagaggcguguacuaccccgacaagguguucagauccagcgugcugcacucuacccaggaccuguuccugccuuucuucagcaacgugaccugguuccacgccauccacguguccggcaccaauggcaccaagagauucgacaaccccgugcugcccuucaacgacgggguguacuuugccagcaccgagaaguccaacaucaucagaggcuggaucuucggcaccacacuggacagcaagacccagagccugcugaucgugaacaacgccaccaacguggucaucaaagugugcgaguuccaguucugcaacgaccccuuccugggcgucuacuaccacaagaacaacaagagcuggauggaaagcgaguuccggguguacagcagcgccaacaacugcaccuucgaguacgugucccagccuuuccugauggaccuggaaggcaagcagggcaacuucaagaaccugcgcgaguucguguucaagaacaucgacggcuacuucaaaaucuacagcaagcacaccccuaucaaccucgugcgggaucugccucagggcuucucugcucuggaaccccugguggaucugcccaucggcaucaacaucacccgguuucagacacugcuggcccugcacagaagcuaccugacaccuggcgauagcagcagcggauggacagcuggugccgccgcuuacuaugugggcuaccugcagccuagaaccuuccugcugaaguacaacgagaacggcaccaucaccgacgccguggauugugcucuggauccucugagcgagacaaagugcacccugaaguccuucaccguggaaaagggcaucuaccagaccagcaacuuccgggugcagcccaccgaauccaucgugcgguuccccaauaucaccaaucugugccccuucggcgagguguucaaugccaccagauucgccucuguguacgccuggaaccggaagcggaucagcaauugcguggccgacuacuccgugcuguacaacuccgccagcuucagcaccuucaagugcuacggcguguccccuaccaagcugaacgaccugugcuucacaaacguguacgccgacagcuucgugauccggggagaugaagugcggcagauugccccuggacagacaggcaagaucgccgacuacaacuacaagcugcccgacgacuucaccggcugugugauugccuggaacagcaacaaccuggacuccaaagucggcggcaacuacaauuaccuguuccggcuguuccggaaguccaaucugaagcccuucgagcgggacaucagcaccgaaaucuaucaggccggcagcaccccuugcaacggcguggaaggcuucaacugcuacuucccacugcaguccuacggcuuucagcccacaaauggcgugggcuaucagcccuacagagugguggugcugagcuucgaacugcugcaugcuccugccacagugugcggcccuaagaaaagcaccaaucucgugaagaacaaaugcgugaacuucaacuucaacggccugaccggcaccggcgugcugacagagagcaacaagaaguuccugccauuccagcaguuuggccgggauaucgccgauaccacagacgccguuagagauccccagacacuggaaauccuggacaucaccccaugcagcuucggcggagugucugugaucaccccuggcaccaacaccagcaaucagguggcagugcuguaccagggcgugaacuguaccgaagugcccguggccauucacgccgaucagcugacaccuacauggcggguguacuccaccggcagcaauguguuucagaccagagccggcugucugaucggagccgagcacgugaacaauagcuacgagugcgacauccccaucggcgcuggcaucugugccagcuaccagacacagacaaacagccccagacgggcuagaagcguggccagccagagcaucauugccuacacaaugucucugggcgccgagaacagcguggccuacuccaacaacucuaucgcuauccccaccaacuucaccaucagcgugaccaccgagauccugccuguguccaugaccaagaccagcguggacugcaccauguacaucugcggcgauuccaccgagugcuccaaccugcugcugcaguacggcagcuucugcacccagcugaauagagcccugacagggaucgccguggaacaggacaagaacacccaagagguguucgcccaagugaagcaaaucuacaagaccccuccuaucaaggacuucggcggcuucaauuucagccagauucugcccgauccuagcaagcccagcaagcggagcuucaucgaggaccugcuguucaacaaagugacacuggccgacgccggcuucaucaagcaguauggcgauugucugggcgacauugccgccagggaucugauuugcgcccagaaguuuaacggacugacagugcugccuccucugcugaccgaugagaugaucgcccaguacacaucugcccugcuggccggcacaaucacaagcggcuggacauuuggagcuggcgccgcucugcagauccccuuugcuaugcagauggccuaccgguucaacggcaucggagugacccagaaugugcuguacgagaaccagaagcugaucgccaaccaguucaacagcgccaucggcaagauccaggacagccugagcagcacagcaagcgcccugggaaagcugcaggacguggucaaccagaaugcccaggcacugaacacccuggucaagcagcuguccuccaacuucggcgccaucagcucugugcugaacgauauccugagcagacuggacccuccugaggccgaggugcagaucgacagacugaucacaggcagacugcagagccuccagacauacgugacccagcagcugaucagagccgccgagauuagagccucugccaaucuggccgccaccaagaugucugagugugugcugggccagagcaagagaguggacuuuugcggcaagggcuaccaccugaugagcuucccucagucugccccucacggcgugguguuucugcacgugacauaugugcccgcucaagagaagaauuucaccaccgcuccagccaucugccacgacggcaaagcccacuuuccuagagaaggcguguucguguccaacggcacccauugguucgugacacagcggaacuucuacgagccccagaucaucaccaccgacaacaccuucgugucuggcaacugcgacguugugaucggcauugugaacaauaccguguacgacccucugcagcccgagcuggacagcuucaaagaggaacuggacaaguacuuuaagaaccacacaagccccgacguggaccugggcgauaucagcggaaucaaugccagcgucgugaacauccagaaagagaucgaccggcugaacgagguggccaagaaucugaacgagagccugaucgaccugcaagaacuggggaaguacgagcaguacaucaaguggcccugguacaucuggcugggcuuuaucgccggacugauugccaucgugauggucacaaucaugcuguguugcaugaccagcugcuguagcugccugaagggcuguuguagcuguggcagcugcugcaaguucgacgaggacgauucugagcccgugcugaagggcgugaaacugcacuacaccugauaauaggcuggagccucgguggccuagcuucuugccccuugggccuccccccagccccuccuccccuuccugcacccguacccccguggucuuugaauaaagucugagugggcggcaaaaaaaaaaaaaaaaaaaaaaaaaaaaaaaaaaaaaaaaaaaaaaaaaaaaaaaaaaaaaaaaaaaaaaaaaaaaaaaaaaaaaaaaaaaaaaaaaaaaucuag

SEQ ID NO: 26677 - RNA, 4100 nt, Artificial Sequence
  SARS-CoV-2/Wuhan/WIV05/2019__EPI_ISL_402128 spike protein mRNA gc mod (1-1273)(K986P_V987P_D614G_I692V)
gggaaauaagagagaaaagaagaguaagaagaaauauaagaccccggcgccgccaccauguucguguuucuggugcugcugccccugguguccagccagugugugaaccugaccaccagaacacagcugccuccagccuacaccaacagcuucaccagaggcguguacuaccccgacaagguguucagauccagcgugcugcacucuacccaggaccuguuccugccuuucuucagcaacgugaccugguuccacgccauccacguguccggcaccaauggcaccaagagauucgacaaccccgugcugcccuucaacgacgggguguacuuugccagcaccgagaaguccaacaucaucagaggcuggaucuucggcaccacacuggacagcaagacccagagccugcugaucgugaacaacgccaccaacguggucaucaaagugugcgaguuccaguucugcaacgaccccuuccugggcgucuacuaccacaagaacaacaagagcuggauggaaagcgaguuccggguguacagcagcgccaacaacugcaccuucgaguacgugucccagccuuuccugauggaccuggaaggcaagcagggcaacuucaagaaccugcgcgaguucguguucaagaacaucgacggcuacuucaaaaucuacagcaagcacaccccuaucaaccucgugcgggaucugccucagggcuucucugcucuggaaccccugguggaucugcccaucggcaucaacaucacccgguuucagacacugcuggcccugcacagaagcuaccugacaccuggcgauagcagcagcggauggacagcuggugccgccgcuuacuaugugggcuaccugcagccuagaaccuuccugcugaaguacaacgagaacggcaccaucaccgacgccguggauugugcucuggauccucugagcgagacaaagugcacccugaaguccuucaccguggaaaagggcaucuaccagaccagcaacuuccgggugcagcccaccgaauccaucgugcgguuccccaauaucaccaaucugugccccuucggcgagguguucaaugccaccagauucgccucuguguacgccuggaaccggaagcggaucagcaauugcguggccgacuacuccgugcuguacaacuccgccagcuucagcaccuucaagugcuacggcguguccccuaccaagcugaacgaccugugcuucacaaacguguacgccgacagcuucgugauccggggagaugaagugcggcagauugccccuggacagacaggcaagaucgccgacuacaacuacaagcugcccgacgacuucaccggcugugugauugccuggaacagcaacaaccuggacuccaaagucggcggcaacuacaauuaccuguaccggcuguuccggaaguccaaucugaagcccuucgagcgggacaucagcaccgaaaucuaucaggccggcagcaccccuugcaacggcguggaaggcuucaacugcuacuucccacugcaguccuacggcuuucagcccacaaauggcgugggcuaucagcccuacagagugguggugcugagcuucgaacugcugcaugcuccugccacagugugcggcccuaagaaaagcaccaaucucgugaagaacaaaugcgugaacuucaacuucaacggccugaccggcaccggcgugcugacagagagcaacaagaaguuccugccauuccagcaguuuggccgggauaucgccgauaccacagacgccguuagagauccccagacacuggaaauccuggacaucaccccaugcagcuucggcggagugucugugaucaccccuggcaccaacaccagcaaucagguggcagugcuguaccagggcgugaacuguaccgaagugcccguggccauucacgccgaucagcugacaccuacauggcggguguacuccaccggcagcaauguguuucagaccagagccggcugucugaucggagccgagcacgugaacaauagcuacgagugcgacauccccaucggcgcuggcaucugugccagcuaccagacacagacaaacagccccagacgggcuagaagcguggccagccagagcgugauugccuacacaaugucucugggcgccgagaacagcguggccuacuccaacaacucuaucgcuauccccaccaacuucaccaucagcgugaccaccgagauccugccuguguccaugaccaagaccagcguggacugcaccauguacaucugcggcgauuccaccgagugcuccaaccugcugcugcaguacggcagcuucugcacccagcugaauagagcccugacagggaucgccguggaacaggacaagaacacccaagagguguucgcccaagugaagcaaaucuacaagaccccuccuaucaaggacuucggcggcuucaauuucagccagauucugcccgauccuagcaagcccagcaagcggagcuucaucgaggaccugcuguucaacaaagugacacuggccgacgccggcuucaucaagcaguauggcgauugucugggcgacauugccgccagggaucugauuugcgcccagaaguuuaacggacugacagugcugccuccucugcugaccgaugagaugaucgcccaguacacaucugcccugcuggccggcacaaucacaagcggcuggacauuuggagcuggcgccgcucugcagauccccuuugcuaugcagauggccuaccgguucaacggcaucggagugacccagaaugugcuguacgagaaccagaagcugaucgccaaccaguucaacagcgccaucggcaagauccaggacagccugagcagcacagcaagcgcccugggaaagcugcaggacguggucaaccagaaugcccaggcacugaacacccuggucaagcagcuguccuccaacuucggcgccaucagcucugugcugaacgauauccugagcagacuggacccuccugaggccgaggugcagaucgacagacugaucacaggcagacugcagagccuccagacauacgugacccagcagcugaucagagccgccgagauuagagccucugccaaucuggccgccaccaagaugucugagugugugcugggccagagcaagagaguggacuuuugcggcaagggcuaccaccugaugagcuucccucagucugccccucacggcgugguguuucugcacgugacauaugugcccgcucaagagaagaauuucaccaccgcuccagccaucugccacgacggcaaagcccacuuuccuagagaaggcguguucguguccaacggcacccauugguucgugacacagcggaacuucuacgagccccagaucaucaccaccgacaacaccuucgugucuggcaacugcgacguugugaucggcauugugaacaauaccguguacgacccucugcagcccgagcuggacagcuucaaagaggaacuggacaaguacuuuaagaaccacacaagccccgacguggaccugggcgauaucagcggaaucaaugccagcgucgugaacauccagaaagagaucgaccggcugaacgagguggccaagaaucugaacgagagccugaucgaccugcaagaacuggggaaguacgagcaguacaucaaguggcccugguacaucuggcugggcuuuaucgccggacugauugccaucgugauggucacaaucaugcuguguugcaugaccagcugcuguagcugccugaagggcuguuguagcuguggcagcugcugcaaguucgacgaggacgauucugagcccgugcugaagggcgugaaacugcacuacaccugauaauaggcuggagccucgguggccuagcuucuugccccuugggccuccccccagccccuccuccccuuccugcacccguacccccguggucuuugaauaaagucugagugggcggcaaaaaaaaaaaaaaaaaaaaaaaaaaaaaaaaaaaaaaaaaaaaaaaaaaaaaaaaaaaaaaaaaaaaaaaaaaaaaaaaaaaaaaaaaaaaaaaaaaaaucuag

SEQ ID NO: 26678 - RNA, 4100 nt, Artificial Sequence
  SARS-CoV-2/Wuhan/WIV05/2019__EPI_ISL_402128 spike protein mRNA gc mod (1-1273)(K986P_V987P_D614G_M1229I)
gggaaauaagagagaaaagaagaguaagaagaaauauaagaccccggcgccgccaccauguucguguuucuggugcugcugccccugguguccagccagugugugaaccugaccaccagaacacagcugccuccagccuacaccaacagcuucaccagaggcguguacuaccccgacaagguguucagauccagcgugcugcacucuacccaggaccuguuccugccuuucuucagcaacgugaccugguuccacgccauccacguguccggcaccaauggcaccaagagauucgacaaccccgugcugcccuucaacgacgggguguacuuugccagcaccgagaaguccaacaucaucagaggcuggaucuucggcaccacacuggacagcaagacccagagccugcugaucgugaacaacgccaccaacguggucaucaaagugugcgaguuccaguucugcaacgaccccuuccugggcgucuacuaccacaagaacaacaagagcuggauggaaagcgaguuccggguguacagcagcgccaacaacugcaccuucgaguacgugucccagccuuuccugauggaccuggaaggcaagcagggcaacuucaagaaccugcgcgaguucguguucaagaacaucgacggcuacuucaaaaucuacagcaagcacaccccuaucaaccucgugcgggaucugccucagggcuucucugcucuggaaccccugguggaucugcccaucggcaucaacaucacccgguuucagacacugcuggcccugcacagaagcuaccugacaccuggcgauagcagcagcggauggacagcuggugccgccgcuuacuaugugggcuaccugcagccuagaaccuuccugcugaaguacaacgagaacggcaccaucaccgacgccguggauugugcucuggauccucugagcgagacaaagugcacccugaaguccuucaccguggaaaagggcaucuaccagaccagcaacuuccgggugcagcccaccgaauccaucgugcgguuccccaauaucaccaaucugugccccuucggcgagguguucaaugccaccagauucgccucuguguacgccuggaaccggaagcggaucagcaauugcguggccgacuacuccgugcuguacaacuccgccagcuucagcaccuucaagugcuacggcguguccccuaccaagcugaacgaccugugcuucacaaacguguacgccgacagcuucgugauccggggagaugaagugcggcagauugccccuggacagacaggcaagaucgccgacuacaacuacaagcugcccgacgacuucaccggcugugugauugccuggaacagcaacaaccuggacuccaaagucggcggcaacuacaauuaccuguaccggcuguuccggaaguccaaucugaagcccuucgagcgggacaucagcaccgaaaucuaucaggccggcagcaccccuugcaacggcguggaaggcuucaacugcuacuucccacugcaguccuacggcuuucagcccacaaauggcgugggcuaucagcccuacagagugguggugcugagcuucgaacugcugcaugcuccugccacagugugcggcccuaagaaaagcaccaaucucgugaagaacaaaugcgugaacuucaacuucaacggccugaccggcaccggcgugcugacagagagcaacaagaaguuccugccauuccagcaguuuggccgggauaucgccgauaccacagacgccguuagagauccccagacacuggaaauccuggacaucaccccaugcagcuucggcggagugucugugaucaccccuggcaccaacaccagcaaucagguggcagugcuguaccagggcgugaacuguaccgaagugcccguggccauucacgccgaucagcugacaccuacauggcggguguacuccaccggcagcaauguguuucagaccagagccggcugucugaucggagccgagcacgugaacaauagcuacgagugcgacauccccaucggcgcuggcaucugugccagcuaccagacacagacaaacagccccagacgggcuagaagcguggccagccagagcaucauugccuacacaaugucucugggcgccgagaacagcguggccuacuccaacaacucuaucgcuauccccaccaacuucaccaucagcgugaccaccgagauccugccuguguccaugaccaagaccagcguggacugcaccauguacaucugcggcgauuccaccgagugcuccaaccugcugcugcaguacggcagcuucugcacccagcugaauagagcccugacagggaucgccguggaacaggacaagaacacccaagagguguucgcccaagugaagcaaaucuacaagaccccuccuaucaaggacuucggcggcuucaauuucagccagauucugcccgauccuagcaagcccagcaagcggagcuucaucgaggaccugcuguucaacaaagugacacuggccgacgccggcuucaucaagcaguauggcgauugucugggcgacauugccgccagggaucugauuugcgcccagaaguuuaacggacugacagugcugccuccucugcugaccgaugagaugaucgcccaguacacaucugcccugcuggccggcacaaucacaagcggcuggacauuuggagcuggcgccgcucugcagauccccuuugcuaugcagauggccuaccgguucaacggcaucggagugacccagaaugugcuguacgagaaccagaagcugaucgccaaccaguucaacagcgccaucggcaagauccaggacagccugagcagcacagcaagcgcccugggaaagcugcaggacguggucaaccagaaugcccaggcacugaacacccuggucaagcagcuguccuccaacuucggcgccaucagcucugugcugaacgauauccugagcagacuggacccuccugaggccgaggugcagaucgacagacugaucacaggcagacugcagagccuccagacauacgugacccagcagcugaucagagccgccgagauuagagccucugccaaucuggccgccaccaagaugucugagugugugcugggccagagcaagagaguggacuuuugcggcaagggcuaccaccugaugagcuucccucagucugccccucacggcgugguguuucugcacgugacauaugugcccgcucaagagaagaauuucaccaccgcuccagccaucugccacgacggcaaagcccacuuuccuagagaaggcguguucguguccaacggcacccauugguucgugacacagcggaacuucuacgagccccagaucaucaccaccgacaacaccuucgugucuggcaacugcgacguugugaucggcauugugaacaauaccguguacgacccucugcagcccgagcuggacagcuucaaagaggaacuggacaaguacuuuaagaaccacacaagccccgacguggaccugggcgauaucagcggaaucaaugccagcgucgugaacauccagaaagagaucgaccggcugaacgagguggccaagaaucugaacgagagccugaucgaccugcaagaacuggggaaguacgagcaguacaucaaguggcccugguacaucuggcugggcuuuaucgccggacugauugccaucgugaucgucacaaucaugcuguguugcaugaccagcugcuguagcugccugaagggcuguuguagcuguggcagcugcugcaaguucgacgaggacgauucugagcccgugcugaagggcgugaaacugcacuacaccugauaauaggcuggagccucgguggccuagcuucuugccccuugggccuccccccagccccuccuccccuuccugcacccguacccccguggucuuugaauaaagucugagugggcggcaaaaaaaaaaaaaaaaaaaaaaaaaaaaaaaaaaaaaaaaaaaaaaaaaaaaaaaaaaaaaaaaaaaaaaaaaaaaaaaaaaaaaaaaaaaaaaaaaaaaucuag

SEQ ID NO: 26679 - RNA, 4094 nt, Artificial Sequence
  SARS-CoV-2/Wuhan/WIV05/2019__EPI_ISL_402128 spike protein mRNA gc mod (1-1273)(K986P_V987P_H69del_V70del_A222V_Y453F_S477N_D614G_I692V)
gggaaauaagagagaaaagaagaguaagaagaaauauaagaccccggcgccgccaccauguucguguuucuggugcugcugccccugguguccagccagugugugaaccugaccaccagaacacagcugccuccagccuacaccaacagcuucaccagaggcguguacuaccccgacaagguguucagauccagcgugcugcacucuacccaggaccuguuccugccuuucuucagcaacgugaccugguuccacgccaucuccggcaccaauggcaccaagagauucgacaaccccgugcugcccuucaacgacgggguguacuuugccagcaccgagaaguccaacaucaucagaggcuggaucuucggcaccacacuggacagcaagacccagagccugcugaucgugaacaacgccaccaacguggucaucaaagugugcgaguuccaguucugcaacgaccccuuccugggcgucuacuaccacaagaacaacaagagcuggauggaaagcgaguuccggguguacagcagcgccaacaacugcaccuucgaguacgugucccagccuuuccugauggaccuggaaggcaagcagggcaacuucaagaaccugcgcgaguucguguucaagaacaucgacggcuacuucaaaaucuacagcaagcacaccccuaucaaccucgugcgggaucugccucagggcuucucugugcuggaaccccugguggaucugcccaucggcaucaacaucacccgguuucagacacugcuggcccugcacagaagcuaccugacaccuggcgauagcagcagcggauggacagcuggugccgccgcuuacuaugugggcuaccugcagccuagaaccuuccugcugaaguacaacgagaacggcaccaucaccgacgccguggauugugcucuggauccucugagcgagacaaagugcacccugaaguccuucaccguggaaaagggcaucuaccagaccagcaacuuccgggugcagcccaccgaauccaucgugcgguuccccaauaucaccaaucugugccccuucggcgagguguucaaugccaccagauucgccucuguguacgccuggaaccggaagcggaucagcaauugcguggccgacuacuccgugcuguacaacuccgccagcuucagcaccuucaagugcuacggcguguccccuaccaagcugaacgaccugugcuucacaaacguguacgccgacagcuucgugauccggggagaugaagugcggcagauugccccuggacagacaggcaagaucgccgacuacaacuacaagcugcccgacgacuucaccggcugugugauugccuggaacagcaacaaccuggacuccaaagucggcggcaacuacaauuaccuguuccggcuguuccggaaguccaaucugaagcccuucgagcgggacaucagcaccgaaaucuaucaggccggcaacaccccuugcaacggcguggaaggcuucaacugcuacuucccacugcaguccuacggcuuucagcccacaaauggcgugggcuaucagcccuacagagugguggugcugagcuucgaacugcugcaugcuccugccacagugugcggcccuaagaaaagcaccaaucucgugaagaacaaaugcgugaacuucaacuucaacggccugaccggcaccggcgugcugacagagagcaacaagaaguuccugccauuccagcaguuuggccgggauaucgccgauaccacagacgccguuagagauccccagacacuggaaauccuggacaucaccccaugcagcuucggcggagugucugugaucaccccuggcaccaacaccagcaaucagguggcagugcuguaccagggcgugaacuguaccgaagugcccguggccauucacgccgaucagcugacaccuacauggcggguguacuccaccggcagcaauguguuucagaccagagccggcugucugaucggagccgagcacgugaacaauagcuacgagugcgacauccccaucggcgcuggcaucugugccagcuaccagacacagacaaacagccccagacgggcuagaagcguggccagccagagcgugauugccuacacaaugucucugggcgccgagaacagcguggccuacuccaacaacucuaucgcuauccccaccaacuucaccaucagcgugaccaccgagauccugccuguguccaugaccaagaccagcguggacugcaccauguacaucugcggcgauuccaccgagugcuccaaccugcugcugcaguacggcagcuucugcacccagcugaauagagcccugacagggaucgccguggaacaggacaagaacacccaagagguguucgcccaagugaagcaaaucuacaagaccccuccuaucaaggacuucggcggcuucaauuucagccagauucugcccgauccuagcaagcccagcaagcggagcuucaucgaggaccugcuguucaacaaagugacacuggccgacgccggcuucaucaagcaguauggcgauugucugggcgacauugccgccagggaucugauuugcgcccagaaguuuaacggacugacagugcugccuccucugcugaccgaugagaugaucgcccaguacacaucugcccugcuggccggcacaaucacaagcggcuggacauuuggagcuggcgccgcucugcagauccccuuugcuaugcagauggccuaccgguucaacggcaucggagugacccagaaugugcuguacgagaaccagaagcugaucgccaaccaguucaacagcgccaucggcaagauccaggacagccugagcagcacagcaagcgcccugggaaagcugcaggacguggucaaccagaaugcccaggcacugaacacccuggucaagcagcuguccuccaacuucggcgccaucagcucugugcugaacgauauccugagcagacuggacccuccugaggccgaggugcagaucgacagacugaucacaggcagacugcagagccuccagacauacgugacccagcagcugaucagagccgccgagauuagagccucugccaaucuggccgccaccaagaugucugagugugugcugggccagagcaagagaguggacuuuugcggcaagggcuaccaccugaugagcuucccucagucugccccucacggcgugguguuucugcacgugacauaugugcccgcucaagagaagaauuucaccaccgcuccagccaucugccacgacggcaaagcccacuuuccuagagaaggcguguucguguccaacggcacccauugguucgugacacagcggaacuucuacgagccccagaucaucaccaccgacaacaccuucgugucuggcaacugcgacguugugaucggcauugugaacaauaccguguacgacccucugcagcccgagcuggacagcuucaaagaggaacuggacaaguacuuuaagaaccacacaagccccgacguggaccugggcgauaucagcggaaucaaugccagcgucgugaacauccagaaagagaucgaccggcugaacgagguggccaagaaucugaacgagagccugaucgaccugcaagaacuggggaaguacgagcaguacaucaaguggcccugguacaucuggcugggcuuuaucgccggacugauugccaucgugauggucacaaucaugcuguguugcaugaccagcugcuguagcugccugaagggcuguuguagcuguggcagcugcugcaaguucgacgaggacgauucugagcccgugcugaagggcgugaaacugcacuacaccugauaauaggcuggagccucgguggccuagcuucuugccccuugggccuccccccagccccuccuccccuuccugcacccguacccccguggucuuugaauaaagucugagugggcggcaaaaaaaaaaaaaaaaaaaaaaaaaaaaaaaaaaaaaaaaaaaaaaaaaaaaaaaaaaaaaaaaaaaaaaaaaaaaaaaaaaaaaaaaaaaaaaaaaaaaucuag

SEQ ID NO: 26680 - RNA, 4094 nt, Artificial Sequence
  SARS-CoV-2/Wuhan/WIV05/2019__EPI_ISL_402128 spike protein mRNA gc mod (1-1273)(K986P_V987P_H69del_V70del_Y453F_D614G_I692V_M1229I)
gggaaauaagagagaaaagaagaguaagaagaaauauaagaccccggcgccgccaccauguucguguuucuggugcugcugccccugguguccagccagugugugaaccugaccaccagaacacagcugccuccagccuacaccaacagcuucaccagaggcguguacuaccccgacaagguguucagauccagcgugcugcacucuacccaggaccuguuccugccuuucuucagcaacgugaccugguuccacgccaucuccggcaccaauggcaccaagagauucgacaaccccgugcugcccuucaacgacgggguguacuuugccagcaccgagaaguccaacaucaucagaggcuggaucuucggcaccacacuggacagcaagacccagagccugcugaucgugaacaacgccaccaacguggucaucaaagugugcgaguuccaguucugcaacgaccccuuccugggcgucuacuaccacaagaacaacaagagcuggauggaaagcgaguuccggguguacagcagcgccaacaacugcaccuucgaguacgugucccagccuuuccugauggaccuggaaggcaagcagggcaacuucaagaaccugcgcgaguucguguucaagaacaucgacggcuacuucaaaaucuacagcaagcacaccccuaucaaccucgugcgggaucugccucagggcuucucugcucuggaaccccugguggaucugcccaucggcaucaacaucacccgguuucagacacugcuggcccugcacagaagcuaccugacaccuggcgauagcagcagcggauggacagcuggugccgccgcuuacuaugugggcuaccugcagccuagaaccuuccugcugaaguacaacgagaacggcaccaucaccgacgccguggauugugcucuggauccucugagcgagacaaagugcacccugaaguccuucaccguggaaaagggcaucuaccagaccagcaacuuccgggugcagcccaccgaauccaucgugcgguuccccaauaucaccaaucugugccccuucggcgagguguucaaugccaccagauucgccucuguguacgccuggaaccggaagcggaucagcaauugcguggccgacuacuccgugcuguacaacuccgccagcuucagcaccuucaagugcuacggcguguccccuaccaagcugaacgaccugugcuucacaaacguguacgccgacagcuucgugauccggggagaugaagugcggcagauugccccuggacagacaggcaagaucgccgacuacaacuacaagcugcccgacgacuucaccggcugugugauugccuggaacagcaacaaccuggacuccaaagucggcggcaacuacaauuaccuguuccggcuguuccggaaguccaaucugaagcccuucgagcgggacaucagcaccgaaaucuaucaggccggcagcaccccuugcaacggcguggaaggcuucaacugcuacuucccacugcaguccuacggcuuucagcccacaaauggcgugggcuaucagcccuacagagugguggugcugagcuucgaacugcugcaugcuccugccacagugugcggcccuaagaaaagcaccaaucucgugaagaacaaaugcgugaacuucaacuucaacggccugaccggcaccggcgugcugacagagagcaacaagaaguuccugccauuccagcaguuuggccgggauaucgccgauaccacagacgccguuagagauccccagacacuggaaauccuggacaucaccccaugcagcuucggcggagugucugugaucaccccuggcaccaacaccagcaaucagguggcagugcuguaccagggcgugaacuguaccgaagugcccguggccauucacgccgaucagcugacaccuacauggcggguguacuccaccggcagcaauguguuucagaccagagccggcugucugaucggagccgagcacgugaacaauagcuacgagugcgacauccccaucggcgcuggcaucugugccagcuaccagacacagacaaacagccccagacgggcuagaagcguggccagccagagcgugauugccuacacaaugucucugggcgccgagaacagcguggccuacuccaacaacucuaucgcuauccccaccaacuucaccaucagcgugaccaccgagauccugccuguguccaugaccaagaccagcguggacugcaccauguacaucugcggcgauuccaccgagugcuccaaccugcugcugcaguacggcagcuucugcacccagcugaauagagcccugacagggaucgccguggaacaggacaagaacacccaagagguguucgcccaagugaagcaaaucuacaagaccccuccuaucaaggacuucggcggcuucaauuucagccagauucugcccgauccuagcaagcccagcaagcggagcuucaucgaggaccugcuguucaacaaagugacacuggccgacgccggcuucaucaagcaguauggcgauugucugggcgacauugccgccagggaucugauuugcgcccagaaguuuaacggacugacagugcugccuccucugcugaccgaugagaugaucgcccaguacacaucugcccugcuggccggcacaaucacaagcggcuggacauuuggagcuggcgccgcucugcagauccccuuugcuaugcagauggccuaccgguucaacggcaucggagugacccagaaugugcuguacgagaaccagaagcugaucgccaaccaguucaacagcgccaucggcaagauccaggacagccugagcagcacagcaagcgcccugggaaagcugcaggacguggucaaccagaaugcccaggcacugaacacccuggucaagcagcuguccuccaacuucggcgccaucagcucugugcugaacgauauccugagcagacuggacccuccugaggccgaggugcagaucgacagacugaucacaggcagacugcagagccuccagacauacgugacccagcagcugaucagagccgccgagauuagagccucugccaaucuggccgccaccaagaugucugagugugugcugggccagagcaagagaguggacuuuugcggcaagggcuaccaccugaugagcuucccucagucugccccucacggcgugguguuucugcacgugacauaugugcccgcucaagagaagaauuucaccaccgcuccagccaucugccacgacggcaaagcccacuuuccuagagaaggcguguucguguccaacggcacccauugguucgugacacagcggaacuucuacgagccccagaucaucaccaccgacaacaccuucgugucuggcaacugcgacguugugaucggcauugugaacaauaccguguacgacccucugcagcccgagcuggacagcuucaaagaggaacuggacaaguacuuuaagaaccacacaagccccgacguggaccugggcgauaucagcggaaucaaugccagcgucgugaacauccagaaagagaucgaccggcugaacgagguggccaagaaucugaacgagagccugaucgaccugcaagaacuggggaaguacgagcaguacaucaaguggcccugguacaucuggcugggcuuuaucgccggacugauugccaucgugaucgucacaaucaugcuguguugcaugaccagcugcuguagcugccugaagggcuguuguagcuguggcagcugcugcaaguucgacgaggacgauucugagcccgugcugaagggcgugaaacugcacuacaccugauaauaggcuggagccucgguggccuagcuucuugccccuugggccuccccccagccccuccuccccuuccugcacccguacccccguggucuuugaauaaagucugagugggcggcaaaaaaaaaaaaaaaaaaaaaaaaaaaaaaaaaaaaaaaaaaaaaaaaaaaaaaaaaaaaaaaaaaaaaaaaaaaaaaaaaaaaaaaaaaaaaaaaaaaaucuag

SEQ ID NO: 26681 - RNA, 4091 nt, Artificial Sequence
  SARS-CoV-2/Wuhan/WIV05/2019__EPI_ISL_402128 spike protein mRNA gc mod (1-1273)(K986P_V987P_K986P_V987P_H69del_V70del_Y144del_N501Y_A570 D_D614G_P681H_T716I_S982A_D1118H)
gggaaauaagagagaaaagaagaguaagaagaaauauaagaccccggcgccgccaccauguucguguuucuggugcugcugccccugguguccagccagugugugaaccugaccaccagaacacagcugccuccagccuacaccaacagcuucaccagaggcguguacuaccccgacaagguguucagauccagcgugcugcacucuacccaggaccuguuccugccuuucuucagcaacgugaccugguuccacgccaucuccggcaccaauggcaccaagagauucgacaaccccgugcugcccuucaacgacgggguguacuuugccagcaccgagaaguccaacaucaucagaggcuggaucuucggcaccacacuggacagcaagacccagagccugcugaucgugaacaacgccaccaacguggucaucaaagugugcgaguuccaguucugcaacgaccccuuccugggcgucuaccacaagaacaacaagagcuggauggaaagcgaguuccggguguacagcagcgccaacaacugcaccuucgaguacgugucccagccuuuccugauggaccuggaaggcaagcagggcaacuucaagaaccugcgcgaguucguguucaagaacaucgacggcuacuucaaaaucuacagcaagcacaccccuaucaaccucgugcgggaucugccucagggcuucucugcucuggaaccccugguggaucugcccaucggcaucaacaucacccgguuucagacacugcuggcccugcacagaagcuaccugacaccuggcgauagcagcagcggauggacagcuggugccgccgcuuacuaugugggcuaccugcagccuagaaccuuccugcugaaguacaacgagaacggcaccaucaccgacgccguggauugugcucuggauccucugagcgagacaaagugcacccugaaguccuucaccguggaaaagggcaucuaccagaccagcaacuuccgggugcagcccaccgaauccaucgugcgguuccccaauaucaccaaucugugccccuucggcgagguguucaaugccaccagauucgccucuguguacgccuggaaccggaagcggaucagcaauugcguggccgacuacuccgugcuguacaacuccgccagcuucagcaccuucaagugcuacggcguguccccuaccaagcugaacgaccugugcuucacaaacguguacgccgacagcuucgugauccggggagaugaagugcggcagauugccccuggacagacaggcaagaucgccgacuacaacuacaagcugcccgacgacuucaccggcugugugauugccuggaacagcaacaaccuggacuccaaagucggcggcaacuacaauuaccuguaccggcuguuccggaaguccaaucugaagcccuucgagcgggacaucagcaccgaaaucuaucaggccggcagcaccccuugcaacggcguggaaggcuucaacugcuacuucccacugcaguccuacggcuuucagcccacauacggcgugggcuaucagcccuacagagugguggugcugagcuucgaacugcugcaugcuccugccacagugugcggcccuaagaaaagcaccaaucucgugaagaacaaaugcgugaacuucaacuucaacggccugaccggcaccggcgugcugacagagagcaacaagaaguuccugccauuccagcaguuuggccgggauaucgacgauaccacagacgccguuagagauccccagacacuggaaauccuggacaucaccccaugcagcuucggcggagugucugugaucaccccuggcaccaacaccagcaaucagguggcagugcuguaccagggcgugaacuguaccgaagugcccguggccauucacgccgaucagcugacaccuacauggcggguguacuccaccggcagcaauguguuucagaccagagccggcugucugaucggagccgagcacgugaacaauagcuacgagugcgacauccccaucggcgcuggcaucugugccagcuaccagacacagacaaacagccacagacgggcuagaagcguggccagccagagcaucauugccuacacaaugucucugggcgccgagaacagcguggccuacuccaacaacucuaucgcuauccccaucaacuucaccaucagcgugaccaccgagauccugccuguguccaugaccaagaccagcguggacugcaccauguacaucugcggcgauuccaccgagugcuccaaccugcugcugcaguacggcagcuucugcacccagcugaauagagcccugacagggaucgccguggaacaggacaagaacacccaagagguguucgcccaagugaagcaaaucuacaagaccccuccuaucaaggacuucggcggcuucaauuucagccagauucugcccgauccuagcaagcccagcaagcggagcuucaucgaggaccugcuguucaacaaagugacacuggccgacgccggcuucaucaagcaguauggcgauugucugggcgacauugccgccagggaucugauuugcgcccagaaguuuaacggacugacagugcugccuccucugcugaccgaugagaugaucgcccaguacacaucugcccugcuggccggcacaaucacaagcggcuggacauuuggagcuggcgccgcucugcagauccccuuugcuaugcagauggccuaccgguucaacggcaucggagugacccagaaugugcuguacgagaaccagaagcugaucgccaaccaguucaacagcgccaucggcaagauccaggacagccugagcagcacagcaagcgcccugggaaagcugcaggacguggucaaccagaaugcccaggcacugaacacccuggucaagcagcuguccuccaacuucggcgccaucagcucugugcugaacgauauccuggccagacuggacccuccugaggccgaggugcagaucgacagacugaucacaggcagacugcagagccuccagacauacgugacccagcagcugaucagagccgccgagauuagagccucugccaaucuggccgccaccaagaugucugagugugugcugggccagagcaagagaguggacuuuugcggcaagggcuaccaccugaugagcuucccucagucugccccucacggcgugguguuucugcacgugacauaugugcccgcucaagagaagaauuucaccaccgcuccagccaucugccacgacggcaaagcccacuuuccuagagaaggcguguucguguccaacggcacccauugguucgugacacagcggaacuucuacgagccccagaucaucaccacccacaacaccuucgugucuggcaacugcgacguugugaucggcauugugaacaauaccguguacgacccucugcagcccgagcuggacagcuucaaagaggaacuggacaaguacuuuaagaaccacacaagccccgacguggaccugggcgauaucagcggaaucaaugccagcgucgugaacauccagaaagagaucgaccggcugaacgagguggccaagaaucugaacgagagccugaucgaccugcaagaacuggggaaguacgagcaguacaucaaguggcccugguacaucuggcugggcuuuaucgccggacugauugccaucgugauggucacaaucaugcuguguugcaugaccagcugcuguagcugccugaagggcuguuguagcuguggcagcugcugcaaguucgacgaggacgauucugagcccgugcugaagggcgugaaacugcacuacaccugauaauaggcuggagccucgguggccuagcuucuugccccuugggccuccccccagccccuccuccccuuccugcacccguacccccguggucuuugaauaaagucugagugggcggcaaaaaaaaaaaaaaaaaaaaaaaaaaaaaaaaaaaaaaaaaaaaaaaaaaaaaaaaaaaaaaaaaaaaaaaaaaaaaaaaaaaaaaaaaaaaaaaaaaaaucuag

SEQ ID NO: 26682 - RNA, 4100 nt, Artificial Sequence
  SARS-CoV-2/Wuhan/WIV05/2019__EPI_ISL_402128 spike protein mRNA gc mod (1-1273)(K986P_V987P_K986P_V987P_K417N_E484K_N501Y_D614G)
gggaaauaagagagaaaagaagaguaagaagaaauauaagaccccggcgccgccaccauguucguguuucuggugcugcugccccugguguccagccagugugugaaccugaccaccagaacacagcugccuccagccuacaccaacagcuucaccagaggcguguacuaccccgacaagguguucagauccagcgugcugcacucuacccaggaccuguuccugccuuucuucagcaacgugaccugguuccacgccauccacguguccggcaccaauggcaccaagagauucgacaaccccgugcugcccuucaacgacgggguguacuuugccagcaccgagaaguccaacaucaucagaggcuggaucuucggcaccacacuggacagcaagacccagagccugcugaucgugaacaacgccaccaacguggucaucaaagugugcgaguuccaguucugcaacgaccccuuccugggcgucuacuaccacaagaacaacaagagcuggauggaaagcgaguuccggguguacagcagcgccaacaacugcaccuucgaguacgugucccagccuuuccugauggaccuggaaggcaagcagggcaacuucaagaaccugcgcgaguucguguucaagaacaucgacggcuacuucaaaaucuacagcaagcacaccccuaucaaccucgugcgggaucugccucagggcuucucugcucuggaaccccugguggaucugcccaucggcaucaacaucacccgguuucagacacugcuggcccugcacagaagcuaccugacaccuggcgauagcagcagcggauggacagcuggugccgccgcuuacuaugugggcuaccugcagccuagaaccuuccugcugaaguacaacgagaacggcaccaucaccgacgccguggauugugcucuggauccucugagcgagacaaagugcacccugaaguccuucaccguggaaaagggcaucuaccagaccagcaacuuccgggugcagcccaccgaauccaucgugcgguuccccaauaucaccaaucugugccccuucggcgagguguucaaugccaccagauucgccucuguguacgccuggaaccggaagcggaucagcaauugcguggccgacuacuccgugcuguacaacuccgccagcuucagcaccuucaagugcuacggcguguccccuaccaagcugaacgaccugugcuucacaaacguguacgccgacagcuucgugauccggggagaugaagugcggcagauugccccuggacagacaggcaacaucgccgacuacaacuacaagcugcccgacgacuucaccggcugugugauugccuggaacagcaacaaccuggacuccaaagucggcggcaacuacaauuaccuguaccggcuguuccggaaguccaaucugaagcccuucgagcgggacaucagcaccgaaaucuaucaggccggcagcaccccuugcaacggcgugaagggcuucaacugcuacuucccacugcaguccuacggcuuucagcccacauacggcgugggcuaucagcccuacagagugguggugcugagcuucgaacugcugcaugcuccugccacagugugcggcccuaagaaaagcaccaaucucgugaagaacaaaugcgugaacuucaacuucaacggccugaccggcaccggcgugcugacagagagcaacaagaaguuccugccauuccagcaguuuggccgggauaucgccgauaccacagacgccguuagagauccccagacacuggaaauccuggacaucaccccaugcagcuucggcggagugucugugaucaccccuggcaccaacaccagcaaucagguggcagugcuguaccagggcgugaacuguaccgaagugcccguggccauucacgccgaucagcugacaccuacauggcggguguacuccaccggcagcaauguguuucagaccagagccggcugucugaucggagccgagcacgugaacaauagcuacgagugcgacauccccaucggcgcuggcaucugugccagcuaccagacacagacaaacagccccagacgggcuagaagcguggccagccagagcaucauugccuacacaaugucucugggcgccgagaacagcguggccuacuccaacaacucuaucgcuauccccaccaacuucaccaucagcgugaccaccgagauccugccuguguccaugaccaagaccagcguggacugcaccauguacaucugcggcgauuccaccgagugcuccaaccugcugcugcaguacggcagcuucugcacccagcugaauagagcccugacagggaucgccguggaacaggacaagaacacccaagagguguucgcccaagugaagcaaaucuacaagaccccuccuaucaaggacuucggcggcuucaauuucagccagauucugcccgauccuagcaagcccagcaagcggagcuucaucgaggaccugcuguucaacaaagugacacuggccgacgccggcuucaucaagcaguauggcgauugucugggcgacauugccgccagggaucugauuugcgcccagaaguuuaacggacugacagugcugccuccucugcugaccgaugagaugaucgcccaguacacaucugcccugcuggccggcacaaucacaagcggcuggacauuuggagcuggcgccgcucugcagauccccuuugcuaugcagauggccuaccgguucaacggcaucggagugacccagaaugugcuguacgagaaccagaagcugaucgccaaccaguucaacagcgccaucggcaagauccaggacagccugagcagcacagcaagcgcccugggaaagcugcaggacguggucaaccagaaugcccaggcacugaacacccuggucaagcagcuguccuccaacuucggcgccaucagcucugugcugaacgauauccugagcagacuggacccuccugaggccgaggugcagaucgacagacugaucacaggcagacugcagagccuccagacauacgugacccagcagcugaucagagccgccgagauuagagccucugccaaucuggccgccaccaagaugucugagugugugcugggccagagcaagagaguggacuuuugcggcaagggcuaccaccugaugagcuucccucagucugccccucacggcgugguguuucugcacgugacauaugugcccgcucaagagaagaauuucaccaccgcuccagccaucugccacgacggcaaagcccacuuuccuagagaaggcguguucguguccaacggcacccauugguucgugacacagcggaacuucuacgagccccagaucaucaccaccgacaacaccuucgugucuggcaacugcgacguugugaucggcauugugaacaauaccguguacgacccucugcagcccgagcuggacagcuucaaagaggaacuggacaaguacuuuaagaaccacacaagccccgacguggaccugggcgauaucagcggaaucaaugccagcgucgugaacauccagaaagagaucgaccggcugaacgagguggccaagaaucugaacgagagccugaucgaccugcaagaacuggggaaguacgagcaguacaucaaguggcccugguacaucuggcugggcuuuaucgccggacugauugccaucgugauggucacaaucaugcuguguugcaugaccagcugcuguagcugccugaagggcuguuguagcuguggcagcugcugcaaguucgacgaggacgauucugagcccgugcugaagggcgugaaacugcacuacaccugauaauaggcuggagccucgguggccuagcuucuugccccuugggccuccccccagccccuccuccccuuccugcacccguacccccguggucuuugaauaaagucugagugggcggcaaaaaaaaaaaaaaaaaaaaaaaaaaaaaaaaaaaaaaaaaaaaaaaaaaaaaaaaaaaaaaaaaaaaaaaaaaaaaaaaaaaaaaaaaaaaaaaaaaaaucuag

SEQ ID NO: 26683 - RNA, 4091 nt, Artificial Sequence
  SARS-CoV-2/Wuhan/WIV05/2019__EPI_ISL_402128 spike protein mRNA gc mod (1-1273)(K986P_V987P_K986P_V987P_L18F_D80A_D215G_L242del_A243del_ L244del_R246I_K417N_E484K_N501Y_D614G_A701V)
gggaaauaagagagaaaagaagaguaagaagaaauauaagaccccggcgccgccaccauguucguguuucuggugcugcugccccugguguccagccagugugugaacuucaccaccagaacacagcugccuccagccuacaccaacagcuucaccagaggcguguacuaccccgacaagguguucagauccagcgugcugcacucuacccaggaccuguuccugccuuucuucagcaacgugaccugguuccacgccauccacguguccggcaccaauggcaccaagagauucgccaaccccgugcugcccuucaacgacgggguguacuuugccagcaccgagaaguccaacaucaucagaggcuggaucuucggcaccacacuggacagcaagacccagagccugcugaucgugaacaacgccaccaacguggucaucaaagugugcgaguuccaguucugcaacgaccccuuccugggcgucuacuaccacaagaacaacaagagcuggauggaaagcgaguuccggguguacagcagcgccaacaacugcaccuucgaguacgugucccagccuuuccugauggaccuggaaggcaagcagggcaacuucaagaaccugcgcgaguucguguucaagaacaucgacggcuacuucaaaaucuacagcaagcacaccccuaucaaccucgugcggggccugccucagggcuucucugcucuggaaccccugguggaucugcccaucggcaucaacaucacccgguuucagacacugcacaucagcuaccugacaccuggcgauagcagcagcggauggacagcuggugccgccgcuuacuaugugggcuaccugcagccuagaaccuuccugcugaaguacaacgagaacggcaccaucaccgacgccguggauugugcucuggauccucugagcgagacaaagugcacccugaaguccuucaccguggaaaagggcaucuaccagaccagcaacuuccgggugcagcccaccgaauccaucgugcgguuccccaauaucaccaaucugugccccuucggcgagguguucaaugccaccagauucgccucuguguacgccuggaaccggaagcggaucagcaauugcguggccgacuacuccgugcuguacaacuccgccagcuucagcaccuucaagugcuacggcguguccccuaccaagcugaacgaccugugcuucacaaacguguacgccgacagcuucgugauccggggagaugaagugcggcagauugccccuggacagacaggcaacaucgccgacuacaacuacaagcugcccgacgacuucaccggcugugugauugccuggaacagcaacaaccuggacuccaaagucggcggcaacuacaauuaccuguaccggcuguuccggaaguccaaucugaagcccuucgagcgggacaucagcaccgaaaucuaucaggccggcagcaccccuugcaacggcgugaagggcuucaacugcuacuucccacugcaguccuacggcuuucagcccacauacggcgugggcuaucagcccuacagagugguggugcugagcuucgaacugcugcaugcuccugccacagugugcggcccuaagaaaagcaccaaucucgugaagaacaaaugcgugaacuucaacuucaacggccugaccggcaccggcgugcugacagagagcaacaagaaguuccugccauuccagcaguuuggccgggauaucgccgauaccacagacgccguuagagauccccagacacuggaaauccuggacaucaccccaugcagcuucggcggagugucugugaucaccccuggcaccaacaccagcaaucagguggcagugcuguaccagggcgugaacuguaccgaagugcccguggccauucacgccgaucagcugacaccuacauggcggguguacuccaccggcagcaauguguuucagaccagagccggcugucugaucggagccgagcacgugaacaauagcuacgagugcgacauccccaucggcgcuggcaucugugccagcuaccagacacagacaaacagccccagacgggcuagaagcguggccagccagagcaucauugccuacacaaugucucugggcguggagaacagcguggccuacuccaacaacucuaucgcuauccccaccaacuucaccaucagcgugaccaccgagauccugccuguguccaugaccaagaccagcguggacugcaccauguacaucugcggcgauuccaccgagugcuccaaccugcugcugcaguacggcagcuucugcacccagcugaauagagcccugacagggaucgccguggaacaggacaagaacacccaagagguguucgcccaagugaagcaaaucuacaagaccccuccuaucaaggacuucggcggcuucaauuucagccagauucugcccgauccuagcaagcccagcaagcggagcuucaucgaggaccugcuguucaacaaagugacacuggccgacgccggcuucaucaagcaguauggcgauugucugggcgacauugccgccagggaucugauuugcgcccagaaguuuaacggacugacagugcugccuccucugcugaccgaugagaugaucgcccaguacacaucugcccugcuggccggcacaaucacaagcggcuggacauuuggagcuggcgccgcucugcagauccccuuugcuaugcagauggccuaccgguucaacggcaucggagugacccagaaugugcuguacgagaaccagaagcugaucgccaaccaguucaacagcgccaucggcaagauccaggacagccugagcagcacagcaagcgcccugggaaagcugcaggacguggucaaccagaaugcccaggcacugaacacccuggucaagcagcuguccuccaacuucggcgccaucagcucugugcugaacgauauccugagcagacuggacccuccugaggccgaggugcagaucgacagacugaucacaggcagacugcagagccuccagacauacgugacccagcagcugaucagagccgccgagauuagagccucugccaaucuggccgccaccaagaugucugagugugugcugggccagagcaagagaguggacuuuugcggcaagggcuaccaccugaugagcuucccucagucugccccucacggcgugguguuucugcacgugacauaugugcccgcucaagagaagaauuucaccaccgcuccagccaucugccacgacggcaaagcccacuuuccuagagaaggcguguucguguccaacggcacccauugguucgugacacagcggaacuucuacgagccccagaucaucaccaccgacaacaccuucgugucuggcaacugcgacguugugaucggcauugugaacaauaccguguacgacccucugcagcccgagcuggacagcuucaaagaggaacuggacaaguacuuuaagaaccacacaagccccgacguggaccugggcgauaucagcggaaucaaugccagcgucgugaacauccagaaagagaucgaccggcugaacgagguggccaagaaucugaacgagagccugaucgaccugcaagaacuggggaaguacgagcaguacaucaaguggcccugguacaucuggcugggcuuuaucgccggacugauugccaucgugauggucacaaucaugcuguguugcaugaccagcugcuguagcugccugaagggcuguuguagcuguggcagcugcugcaaguucgacgaggacgauucugagcccgugcugaagggcgugaaacugcacuacaccugauaauaggcuggagccucgguggccuagcuucuugccccuugggccuccccccagccccuccuccccuuccugcacccguacccccguggucuuugaauaaagucugagugggcggcaaaaaaaaaaaaaaaaaaaaaaaaaaaaaaaaaaaaaaaaaaaaaaaaaaaaaaaaaaaaaaaaaaaaaaaaaaaaaaaaaaaaaaaaaaaaaaaaaaaaucuag

SEQ ID NO: 26684 - RNA, 4100 nt, Artificial Sequence
  SARS-CoV-2/Wuhan/WIV05/2019__EPI_ISL_402128 spike protein mRNA gc mod (1-1273)(K986P_V987P_K986P_V987P_E484K_D614G)
gggaaauaagagagaaaagaagaguaagaagaaauauaagaccccggcgccgccaccauguucguguuucuggugcugcugccccugguguccagccagugugugaaccugaccaccagaacacagcugccuccagccuacaccaacagcuucaccagaggcguguacuaccccgacaagguguucagauccagcgugcugcacucuacccaggaccuguuccugccuuucuucagcaacgugaccugguuccacgccauccacguguccggcaccaauggcaccaagagauucgacaaccccgugcugcccuucaacgacgggguguacuuugccagcaccgagaaguccaacaucaucagaggcuggaucuucggcaccacacuggacagcaagacccagagccugcugaucgugaacaacgccaccaacguggucaucaaagugugcgaguuccaguucugcaacgaccccuuccugggcgucuacuaccacaagaacaacaagagcuggauggaaagcgaguuccggguguacagcagcgccaacaacugcaccuucgaguacgugucccagccuuuccugauggaccuggaaggcaagcagggcaacuucaagaaccugcgcgaguucguguucaagaacaucgacggcuacuucaaaaucuacagcaagcacaccccuaucaaccucgugcgggaucugccucagggcuucucugcucuggaaccccugguggaucugcccaucggcaucaacaucacccgguuucagacacugcuggcccugcacagaagcuaccugacaccuggcgauagcagcagcggauggacagcuggugccgccgcuuacuaugugggcuaccugcagccuagaaccuuccugcugaaguacaacgagaacggcaccaucaccgacgccguggauugugcucuggauccucugagcgagacaaagugcacccugaaguccuucaccguggaaaagggcaucuaccagaccagcaacuuccgggugcagcccaccgaauccaucgugcgguuccccaauaucaccaaucugugccccuucggcgagguguucaaugccaccagauucgccucuguguacgccuggaaccggaagcggaucagcaauugcguggccgacuacuccgugcuguacaacuccgccagcuucagcaccuucaagugcuacggcguguccccuaccaagcugaacgaccugugcuucacaaacguguacgccgacagcuucgugauccggggagaugaagugcggcagauugccccuggacagacaggcaagaucgccgacuacaacuacaagcugcccgacgacuucaccggcugugugauugccuggaacagcaacaaccuggacuccaaagucggcggcaacuacaauuaccuguaccggcuguuccggaaguccaaucugaagcccuucgagcgggacaucagcaccgaaaucuaucaggccggcagcaccccuugcaacggcgugaagggcuucaacugcuacuucccacugcaguccuacggcuuucagcccacaaauggcgugggcuaucagcccuacagagugguggugcugagcuucgaacugcugcaugcuccugccacagugugcggcccuaagaaaagcaccaaucucgugaagaacaaaugcgugaacuucaacuucaacggccugaccggcaccggcgugcugacagagagcaacaagaaguuccugccauuccagcaguuuggccgggauaucgccgauaccacagacgccguuagagauccccagacacuggaaauccuggacaucaccccaugcagcuucggcggagugucugugaucaccccuggcaccaacaccagcaaucagguggcagugcuguaccagggcgugaacuguaccgaagugcccguggccauucacgccgaucagcugacaccuacauggcggguguacuccaccggcagcaauguguuucagaccagagccggcugucugaucggagccgagcacgugaacaauagcuacgagugcgacauccccaucggcgcuggcaucugugccagcuaccagacacagacaaacagccccagacgggcuagaagcguggccagccagagcaucauugccuacacaaugucucugggcgccgagaacagcguggccuacuccaacaacucuaucgcuauccccaccaacuucaccaucagcgugaccaccgagauccugccuguguccaugaccaagaccagcguggacugcaccauguacaucugcggcgauuccaccgagugcuccaaccugcugcugcaguacggcagcuucugcacccagcugaauagagcccugacagggaucgccguggaacaggacaagaacacccaagagguguucgcccaagugaagcaaaucuacaagaccccuccuaucaaggacuucggcggcuucaauuucagccagauucugcccgauccuagcaagcccagcaagcggagcuucaucgaggaccugcuguucaacaaagugacacuggccgacgccggcuucaucaagcaguauggcgauugucugggcgacauugccgccagggaucugauuugcgcccagaaguuuaacggacugacagugcugccuccucugcugaccgaugagaugaucgcccaguacacaucugcccugcuggccggcacaaucacaagcggcuggacauuuggagcuggcgccgcucugcagauccccuuugcuaugcagauggccuaccgguucaacggcaucggagugacccagaaugugcuguacgagaaccagaagcugaucgccaaccaguucaacagcgccaucggcaagauccaggacagccugagcagcacagcaagcgcccugggaaagcugcaggacguggucaaccagaaugcccaggcacugaacacccuggucaagcagcuguccuccaacuucggcgccaucagcucugugcugaacgauauccugagcagacuggacccuccugaggccgaggugcagaucgacagacugaucacaggcagacugcagagccuccagacauacgugacccagcagcugaucagagccgccgagauuagagccucugccaaucuggccgccaccaagaugucugagugugugcugggccagagcaagagaguggacuuuugcggcaagggcuaccaccugaugagcuucccucagucugccccucacggcgugguguuucugcacgugacauaugugcccgcucaagagaagaauuucaccaccgcuccagccaucugccacgacggcaaagcccacuuuccuagagaaggcguguucguguccaacggcacccauugguucgugacacagcggaacuucuacgagccccagaucaucaccaccgacaacaccuucgugucuggcaacugcgacguugugaucggcauugugaacaauaccguguacgacccucugcagcccgagcuggacagcuucaaagaggaacuggacaaguacuuuaagaaccacacaagccccgacguggaccugggcgauaucagcggaaucaaugccagcgucgugaacauccagaaagagaucgaccggcugaacgagguggccaagaaucugaacgagagccugaucgaccugcaagaacuggggaaguacgagcaguacaucaaguggcccugguacaucuggcugggcuuuaucgccggacugauugccaucgugauggucacaaucaugcuguguugcaugaccagcugcuguagcugccugaagggcuguuguagcuguggcagcugcugcaaguucgacgaggacgauucugagcccgugcugaagggcgugaaacugcacuacaccugauaauaggcuggagccucgguggccuagcuucuugccccuugggccuccccccagccccuccuccccuuccugcacccguacccccguggucuuugaauaaagucugagugggcggcaaaaaaaaaaaaaaaaaaaaaaaaaaaaaaaaaaaaaaaaaaaaaaaaaaaaaaaaaaaaaaaaaaaaaaaaaaaaaaaaaaaaaaaaaaaaaaaaaaaaucuag

SEQ ID NO: 26685 - RNA, 4100 nt, Artificial Sequence
  SARS-CoV-2/Wuhan/WIV05/2019__EPI_ISL_402128 spike protein mRNA gc mod (1-1273)(K986P_V987P_K986P_V987P_L18F_T20N_P26S_D138Y_R190S_K417T _E484K_N501Y_D614G_H655Y_T1027I)
gggaaauaagagagaaaagaagaguaagaagaaauauaagaccccggcgccgccaccauguucguguuucuggugcugcugccccugguguccagccagugugugaacuucaccaacagaacacagcugccuagcgccuacaccaacagcuucaccagaggcguguacuaccccgacaagguguucagauccagcgugcugcacucuacccaggaccuguuccugccuuucuucagcaacgugaccugguuccacgccauccacguguccggcaccaauggcaccaagagauucgacaaccccgugcugcccuucaacgacgggguguacuuugccagcaccgagaaguccaacaucaucagaggcuggaucuucggcaccacacuggacagcaagacccagagccugcugaucgugaacaacgccaccaacguggucaucaaagugugcgaguuccaguucugcaacuaccccuuccugggcgucuacuaccacaagaacaacaagagcuggauggaaagcgaguuccggguguacagcagcgccaacaacugcaccuucgaguacgugucccagccuuuccugauggaccuggaaggcaagcagggcaacuucaagaaccugagcgaguucguguucaagaacaucgacggcuacuucaaaaucuacagcaagcacaccccuaucaaccucgugcgggaucugccucagggcuucucugcucuggaaccccugguggaucugcccaucggcaucaacaucacccgguuucagacacugcuggcccugcacagaagcuaccugacaccuggcgauagcagcagcggauggacagcuggugccgccgcuuacuaugugggcuaccugcagccuagaaccuuccugcugaaguacaacgagaacggcaccaucaccgacgccguggauugugcucuggauccucugagcgagacaaagugcacccugaaguccuucaccguggaaaagggcaucuaccagaccagcaacuuccgggugcagcccaccgaauccaucgugcgguuccccaauaucaccaaucugugccccuucggcgagguguucaaugccaccagauucgccucuguguacgccuggaaccggaagcggaucagcaauugcguggccgacuacuccgugcuguacaacuccgccagcuucagcaccuucaagugcuacggcguguccccuaccaagcugaacgaccugugcuucacaaacguguacgccgacagcuucgugauccggggagaugaagugcggcagauugccccuggacagacaggcaccaucgccgacuacaacuacaagcugcccgacgacuucaccggcugugugauugccuggaacagcaacaaccuggacuccaaagucggcggcaacuacaauuaccuguaccggcuguuccggaaguccaaucugaagcccuucgagcgggacaucagcaccgaaaucuaucaggccggcagcaccccuugcaacggcgugaagggcuucaacugcuacuucccacugcaguccuacggcuuucagcccacauacggcgugggcuaucagcccuacagagugguggugcugagcuucgaacugcugcaugcuccugccacagugugcggcccuaagaaaagcaccaaucucgugaagaacaaaugcgugaacuucaacuucaacggccugaccggcaccggcgugcugacagagagcaacaagaaguuccugccauuccagcaguuuggccgggauaucgccgauaccacagacgccguuagagauccccagacacuggaaauccuggacaucaccccaugcagcuucggcggagugucugugaucaccccuggcaccaacaccagcaaucagguggcagugcuguaccagggcgugaacuguaccgaagugcccguggccauucacgccgaucagcugacaccuacauggcggguguacuccaccggcagcaauguguuucagaccagagccggcugucugaucggagccgaguacgugaacaauagcuacgagugcgacauccccaucggcgcuggcaucugugccagcuaccagacacagacaaacagccccagacgggcuagaagcguggccagccagagcaucauugccuacacaaugucucugggcgccgagaacagcguggccuacuccaacaacucuaucgcuauccccaccaacuucaccaucagcgugaccaccgagauccugccuguguccaugaccaagaccagcguggacugcaccauguacaucugcggcgauuccaccgagugcuccaaccugcugcugcaguacggcagcuucugcacccagcugaauagagcccugacagggaucgccguggaacaggacaagaacacccaagagguguucgcccaagugaagcaaaucuacaagaccccuccuaucaaggacuucggcggcuucaauuucagccagauucugcccgauccuagcaagcccagcaagcggagcuucaucgaggaccugcuguucaacaaagugacacuggccgacgccggcuucaucaagcaguauggcgauugucugggcgacauugccgccagggaucugauuugcgcccagaaguuuaacggacugacagugcugccuccucugcugaccgaugagaugaucgcccaguacacaucugcccugcuggccggcacaaucacaagcggcuggacauuuggagcuggcgccgcucugcagauccccuuugcuaugcagauggccuaccgguucaacggcaucggagugacccagaaugugcuguacgagaaccagaagcugaucgccaaccaguucaacagcgccaucggcaagauccaggacagccugagcagcacagcaagcgcccugggaaagcugcaggacguggucaaccagaaugcccaggcacugaacacccuggucaagcagcuguccuccaacuucggcgccaucagcucugugcugaacgauauccugagcagacuggacccuccugaggccgaggugcagaucgacagacugaucacaggcagacugcagagccuccagacauacgugacccagcagcugaucagagccgccgagauuagagccucugccaaucuggccgccaucaagaugucugagugugugcugggccagagcaagagaguggacuuuugcggcaagggcuaccaccugaugagcuucccucagucugccccucacggcgugguguuucugcacgugacauaugugcccgcucaagagaagaauuucaccaccgcuccagccaucugccacgacggcaaagcccacuuuccuagagaaggcguguucguguccaacggcacccauugguucgugacacagcggaacuucuacgagccccagaucaucaccaccgacaacaccuucgugucuggcaacugcgacguugugaucggcauugugaacaauaccguguacgacccucugcagcccgagcuggacagcuucaaagaggaacuggacaaguacuuuaagaaccacacaagccccgacguggaccugggcgauaucagcggaaucaaugccagcgucgugaacauccagaaagagaucgaccggcugaacgagguggccaagaaucugaacgagagccugaucgaccugcaagaacuggggaaguacgagcaguacaucaaguggcccugguacaucuggcugggcuuuaucgccggacugauugccaucgugauggucacaaucaugcuguguugcaugaccagcugcuguagcugccugaagggcuguuguagcuguggcagcugcugcaaguucgacgaggacgauucugagcccgugcugaagggcgugaaacugcacuacaccugauaauaggcuggagccucgguggccuagcuucuugccccuugggccuccccccagccccuccuccccuuccugcacccguacccccguggucuuugaauaaagucugagugggcggcaaaaaaaaaaaaaaaaaaaaaaaaaaaaaaaaaaaaaaaaaaaaaaaaaaaaaaaaaaaaaaaaaaaaaaaaaaaaaaaaaaaaaaaaaaaaaaaaaaaaucuag

SEQ ID NO: 26686 - RNA, 4100 nt, Artificial Sequence
  SARS-CoV-2/Wuhan/WIV05/2019__EPI_ISL_402128 spike protein mRNA gc mod (1-1273)(K986P_V987P_K986P_V987P_S13I_W152C_L452R_D614G)
gggaaauaagagagaaaagaagaguaagaagaaauauaagaccccggcgccgccaccauguucguguuucuggugcugcugccccugguguccauccagugugugaaccugaccaccagaacacagcugccuccagccuacaccaacagcuucaccagaggcguguacuaccccgacaagguguucagauccagcgugcugcacucuacccaggaccuguuccugccuuucuucagcaacgugaccugguuccacgccauccacguguccggcaccaauggcaccaagagauucgacaaccccgugcugcccuucaacgacgggguguacuuugccagcaccgagaaguccaacaucaucagaggcuggaucuucggcaccacacuggacagcaagacccagagccugcugaucgugaacaacgccaccaacguggucaucaaagugugcgaguuccaguucugcaacgaccccuuccugggcgucuacuaccacaagaacaacaagagcugcauggaaagcgaguuccggguguacagcagcgccaacaacugcaccuucgaguacgugucccagccuuuccugauggaccuggaaggcaagcagggcaacuucaagaaccugcgcgaguucguguucaagaacaucgacggcuacuucaaaaucuacagcaagcacaccccuaucaaccucgugcgggaucugccucagggcuucucugcucuggaaccccugguggaucugcccaucggcaucaacaucacccgguuucagacacugcuggcccugcacagaagcuaccugacaccuggcgauagcagcagcggauggacagcuggugccgccgcuuacuaugugggcuaccugcagccuagaaccuuccugcugaaguacaacgagaacggcaccaucaccgacgccguggauugugcucuggauccucugagcgagacaaagugcacccugaaguccuucaccguggaaaagggcaucuaccagaccagcaacuuccgggugcagcccaccgaauccaucgugcgguuccccaauaucaccaaucugugccccuucggcgagguguucaaugccaccagauucgccucuguguacgccuggaaccggaagcggaucagcaauugcguggccgacuacuccgugcuguacaacuccgccagcuucagcaccuucaagugcuacggcguguccccuaccaagcugaacgaccugugcuucacaaacguguacgccgacagcuucgugauccggggagaugaagugcggcagauugccccuggacagacaggcaagaucgccgacuacaacuacaagcugcccgacgacuucaccggcugugugauugccuggaacagcaacaaccuggacuccaaagucggcggcaacuacaauuaccgcuaccggcuguuccggaaguccaaucugaagcccuucgagcgggacaucagcaccgaaaucuaucaggccggcagcaccccuugcaacggcguggaaggcuucaacugcuacuucccacugcaguccuacggcuuucagcccacaaauggcgugggcuaucagcccuacagagugguggugcugagcuucgaacugcugcaugcuccugccacagugugcggcccuaagaaaagcaccaaucucgugaagaacaaaugcgugaacuucaacuucaacggccugaccggcaccggcgugcugacagagagcaacaagaaguuccugccauuccagcaguuuggccgggauaucgccgauaccacagacgccguuagagauccccagacacuggaaauccuggacaucaccccaugcagcuucggcggagugucugugaucaccccuggcaccaacaccagcaaucagguggcagugcuguaccagggcgugaacuguaccgaagugcccguggccauucacgccgaucagcugacaccuacauggcggguguacuccaccggcagcaauguguuucagaccagagccggcugucugaucggagccgagcacgugaacaauagcuacgagugcgacauccccaucggcgcuggcaucugugccagcuaccagacacagacaaacagccccagacgggcuagaagcguggccagccagagcaucauugccuacacaaugucucugggcgccgagaacagcguggccuacuccaacaacucuaucgcuauccccaccaacuucaccaucagcgugaccaccgagauccugccuguguccaugaccaagaccagcguggacugcaccauguacaucugcggcgauuccaccgagugcuccaaccugcugcugcaguacggcagcuucugcacccagcugaauagagcccugacagggaucgccguggaacaggacaagaacacccaagagguguucgcccaagugaagcaaaucuacaagaccccuccuaucaaggacuucggcggcuucaauuucagccagauucugcccgauccuagcaagcccagcaagcggagcuucaucgaggaccugcuguucaacaaagugacacuggccgacgccggcuucaucaagcaguauggcgauugucugggcgacauugccgccagggaucugauuugcgcccagaaguuuaacggacugacagugcugccuccucugcugaccgaugagaugaucgcccaguacacaucugcccugcuggccggcacaaucacaagcggcuggacauuuggagcuggcgccgcucugcagauccccuuugcuaugcagauggccuaccgguucaacggcaucggagugacccagaaugugcuguacgagaaccagaagcugaucgccaaccaguucaacagcgccaucggcaagauccaggacagccugagcagcacagcaagcgcccugggaaagcugcaggacguggucaaccagaaugcccaggcacugaacacccuggucaagcagcuguccuccaacuucggcgccaucagcucugugcugaacgauauccugagcagacuggacccuccugaggccgaggugcagaucgacagacugaucacaggcagacugcagagccuccagacauacgugacccagcagcugaucagagccgccgagauuagagccucugccaaucuggccgccaccaagaugucugagugugugcugggccagagcaagagaguggacuuuugcggcaagggcuaccaccugaugagcuucccucagucugccccucacggcgugguguuucugcacgugacauaugugcccgcucaagagaagaauuucaccaccgcuccagccaucugccacgacggcaaagcccacuuuccuagagaaggcguguucguguccaacggcacccauugguucgugacacagcggaacuucuacgagccccagaucaucaccaccgacaacaccuucgugucuggcaacugcgacguugugaucggcauugugaacaauaccguguacgacccucugcagcccgagcuggacagcuucaaagaggaacuggacaaguacuuuaagaaccacacaagccccgacguggaccugggcgauaucagcggaaucaaugccagcgucgugaacauccagaaagagaucgaccggcugaacgagguggccaagaaucugaacgagagccugaucgaccugcaagaacuggggaaguacgagcaguacaucaaguggcccugguacaucuggcugggcuuuaucgccggacugauugccaucgugauggucacaaucaugcuguguugcaugaccagcugcuguagcugccugaagggcuguuguagcuguggcagcugcugcaaguucgacgaggacgauucugagcccgugcugaagggcgugaaacugcacuacaccugauaauaggcuggagccucgguggccuagcuucuugccccuugggccuccccccagccccuccuccccuuccugcacccguacccccguggucuuugaauaaagucugagugggcggcaaaaaaaaaaaaaaaaaaaaaaaaaaaaaaaaaaaaaaaaaaaaaaaaaaaaaaaaaaaaaaaaaaaaaaaaaaaaaaaaaaaaaaaaaaaaaaaaaaaaucuag

SEQ ID NO: 26687 - RNA, 4100 nt, Artificial Sequence
  SARS-CoV-2/Wuhan/WIV05/2019__EPI_ISL_402128 spike protein mRNA gc mod (1-1273)(K986P_V987P)
gggaaauaagagagaaaagaagaguaagaagaaauauaagaccccggcgccgccaccauguucguguuccuggugcugcugccucugguguccagccagugugugaaccugaccaccagaacacagcugccuccagccuacaccaacagcuuuaccagaggcguguacuaccccgacaagguguucagauccagcgugcugcacucuacccaggaccuguuccugccuuucuucagcaacgugaccugguuccacgccauccacguguccggcaccaauggcaccaagagauucgacaaccccgugcugcccuucaacgacgggguguacuuugccagcaccgagaaguccaacaucaucagaggcuggaucuucggcaccacacuggacagcaagacccagagccugcugaucgugaacaacgccaccaacguggucaucaaagugugcgaguuccaguucugcaacgaccccuuccugggcgucuacuaccacaagaacaacaagagcuggauggaaagcgaguuccggguguacagcagcgccaacaacugcaccuucgaguacgugucccagccuuuccugauggaccuggaaggcaagcagggcaacuucaagaaccugcgcgaguucguguuuaagaacaucgacggcuacuucaagaucuacagcaagcacaccccuaucaaccucgugcgggaucugccucagggcuucucugcucuggaaccccugguggaucugcccaucggcaucaacaucacccgguuucagacacugcuggcccugcacagaagcuaccugacaccuggcgauagcagcagcggauggacagcuggugccgccgcuuacuaugugggcuaccugcagccuagaaccuuccugcugaaguacaacgagaacggcaccaucaccgacgccguggauugugcucuggauccucugagcgagacaaagugcacccugaaguccuucaccguggaaaagggcaucuaccagaccagcaacuuccgggugcagcccaccgaauccaucgugcgguuccccaauaucaccaaucugugccccuucggcgagguguucaaugccaccagauucgccucuguguacgccuggaaccggaagcggaucagcaauugcguggccgacuacuccgugcuguacaacuccgccagcuucagcaccuucaagugcuacggcguguccccuaccaagcugaacgaccugugcuucacaaacguguacgccgacagcuucgugauccggggagaugaagugcggcagauugccccuggacagacaggcaagaucgccgacuacaacuacaagcugcccgacgacuucaccggcugugugauugccuggaacagcaacaaccuggacuccaaagucggcggcaacuacaauuaccuguaccggcuguuccggaaguccaaucugaagcccuucgagcgggacaucuccaccgagaucuaucaggccggcagcaccccuuguaacggcguggaaggcuucaacugcuacuucccacugcaguccuacggcuuucagcccacaaauggcgugggcuaucagcccuacagagugguggugcugagcuucgaacugcugcaugccccugccacagugugcggcccuaagaaaagcaccaaucucgugaagaacaaaugcgugaacuucaacuucaacggccugaccggcaccggcgugcugacagagagcaacaagaaguuccugccauuccagcaguuuggccgggauaucgccgauaccacagacgccguuagagauccccagacacuggaaauccuggacaucaccccuugcagcuucggcggagugucugugaucaccccuggcaccaacaccagcaaucagguggcagugcuguaccaggacgugaacuguaccgaagugcccguggccauucacgccgaucagcugacaccuacauggcggguguacuccaccggcagcaauguguuucagaccagagccggcugucugaucggagccgagcacgugaacaauagcuacgagugcgacauccccaucggcgcuggaaucugcgccagcuaccagacacagacaaacagcccucggagagccagaagcguggccagccagagcaucauugccuacacaaugucucugggcgccgagaacagcguggccuacuccaacaacucuaucgcuauccccaccaacuucaccaucagcgugaccacagagauccugccuguguccaugaccaagaccagcguggacugcaccauguacaucugcggcgauuccaccgagugcuccaaccugcugcugcaguacggcagcuucugcacccagcugaauagagcccugacagggaucgccguggaacaggacaagaacacccaagagguguucgcccaagugaagcagaucuacaagaccccuccuaucaaggacuucggcggcuucaauuucagccagauucugcccgauccuagcaagcccagcaagcggagcuucaucgaggaccugcuguucaacaaagugacacuggccgacgccggcuucaucaagcaguauggcgauugucugggcgacauugccgccagggaucugauuugcgcccagaaguuuaacggacugacagugcugccuccucugcugaccgaugagaugaucgcccaguacacaucugcccugcuggccggcacaaucacaagcggcuggacauuuggagcaggcgccgcucugcagauccccuuugcuaugcagauggccuaccgguucaacggcaucggagugacccagaaugugcuguacgagaaccagaagcugaucgccaaccaguucaacagcgccaucggcaagauccaggacagccugagcagcacagcaagcgcccugggaaagcugcaggacguggucaaccagaaugcccaggcacugaacacccuggucaagcagcuguccuccaacuucggcgccaucagcucugugcugaacgauauccugagcagacuggacccuccugaggccgaggugcagaucgacagacugaucacaggcagacugcagagccuccagacauacgugacccagcagcugaucagagccgccgagauuagagccucugccaaucuggccgccaccaagaugucugagugugugcugggccagagcaagagaguggacuuuugcggcaagggcuaccaccugaugagcuucccucagucugccccucacggcgugguguuucugcacgugacauaugugcccgcucaagagaagaauuucaccaccgcuccagccaucugccacgacggcaaagcccacuuuccuagagaaggcguguucguguccaacggcacccauugguucgugacacagcggaacuucuacgagccccagaucaucaccaccgacaacaccuucgugucuggcaacugcgacgucgugaucggcauugugaacaauaccguguacgacccucugcagcccgagcuggacagcuucaaagaggaacuggacaaguacuuuaagaaccacacaagccccgacguggaccugggcgauaucagcggaaucaaugccagcgucgugaacauccagaaagagaucgaccggcugaacgagguggccaagaaucugaacgagagccugaucgaccugcaagaacuggggaaguacgagcaguacaucaaguggcccugguacaucuggcugggcuuuaucgccggacugauugccaucgugauggucacaaucaugcuguguugcaugaccagcugcuguagcugccugaagggcuguuguagcuguggcagcugcugcaaguucgacgaggacgauucugagcccgugcugaagggcgugaaacugcacuacacaugauaauaggcuggagccucgguggccuagcuucuugccccuugggccuccccccagccccuccuccccuuccugcacccguacccccguggucuuugaauaaagucugagugggcggcaaaaaaaaaaaaaaaaaaaaaaaaaaaaaaaaaaaaaaaaaaaaaaaaaaaaaaaaaaaaaaaaaaaaaaaaaaaaaaaaaaaaaaaaaaaaaaaaaaaaucuag

SEQ ID NO: 26688 - RNA, 4100 nt, Artificial Sequence
  SARS-CoV-2/Wuhan/WIV05/2019__EPI_ISL_402128 spike protein mRNA gc mod (1-1273)(K986P_V987P_ D614G)
gggaaauaagagagaaaagaagaguaagaagaaauauaagaccccggcgccgccaccauguucguguuccuggugcugcugccucugguguccagccagugugugaaccugaccaccagaacacagcugccuccagccuacaccaacagcuuuaccagaggcguguacuaccccgacaagguguucagauccagcgugcugcacucuacccaggaccuguuccugccuuucuucagcaacgugaccugguuccacgccauccacguguccggcaccaauggcaccaagagauucgacaaccccgugcugcccuucaacgacgggguguacuuugccagcaccgagaaguccaacaucaucagaggcuggaucuucggcaccacacuggacagcaagacccagagccugcugaucgugaacaacgccaccaacguggucaucaaagugugcgaguuccaguucugcaacgaccccuuccugggcgucuacuaccacaagaacaacaagagcuggauggaaagcgaguuccggguguacagcagcgccaacaacugcaccuucgaguacgugucccagccuuuccugauggaccuggaaggcaagcagggcaacuucaagaaccugcgcgaguucguguuuaagaacaucgacggcuacuucaagaucuacagcaagcacaccccuaucaaccucgugcgggaucugccucagggcuucucugcucuggaaccccugguggaucugcccaucggcaucaacaucacccgguuucagacacugcuggcccugcacagaagcuaccugacaccuggcgauagcagcagcggauggacagcuggugccgccgcuuacuaugugggcuaccugcagccuagaaccuuccugcugaaguacaacgagaacggcaccaucaccgacgccguggauugugcucuggauccucugagcgagacaaagugcacccugaaguccuucaccguggaaaagggcaucuaccagaccagcaacuuccgggugcagcccaccgaauccaucgugcgguuccccaauaucaccaaucugugccccuucggcgagguguucaaugccaccagauucgccucuguguacgccuggaaccggaagcggaucagcaauugcguggccgacuacuccgugcuguacaacuccgccagcuucagcaccuucaagugcuacggcguguccccuaccaagcugaacgaccugugcuucacaaacguguacgccgacagcuucgugauccggggagaugaagugcggcagauugccccuggacagacaggcaagaucgccgacuacaacuacaagcugcccgacgacuucaccggcugugugauugccuggaacagcaacaaccuggacuccaaagucggcggcaacuacaauuaccuguaccggcuguuccggaaguccaaucugaagcccuucgagcgggacaucuccaccgagaucuaucaggccggcagcaccccuuguaacggcguggaaggcuucaacugcuacuucccacugcaguccuacggcuuucagcccacaaauggcgugggcuaucagcccuacagagugguggugcugagcuucgaacugcugcaugccccugccacagugugcggcccuaagaaaagcaccaaucucgugaagaacaaaugcgugaacuucaacuucaacggccugaccggcaccggcgugcugacagagagcaacaagaaguuccugccauuccagcaguuuggccgggauaucgccgauaccacagacgccguuagagauccccagacacuggaaauccuggacaucaccccuugcagcuucggcggagugucugugaucaccccuggcaccaacaccagcaaucagguggcagugcuguaccagggcgugaacuguaccgaagugcccguggccauucacgccgaucagcugacaccuacauggcggguguacuccaccggcagcaauguguuucagaccagagccggcugucugaucggagccgagcacgugaacaauagcuacgagugcgacauccccaucggcgcuggaaucugcgccagcuaccagacacagacaaacagcccucggagagccagaagcguggccagccagagcaucauugccuacacaaugucucugggcgccgagaacagcguggccuacuccaacaacucuaucgcuauccccaccaacuucaccaucagcgugaccacagagauccugccuguguccaugaccaagaccagcguggacugcaccauguacaucugcggcgauuccaccgagugcuccaaccugcugcugcaguacggcagcuucugcacccagcugaauagagcccugacagggaucgccguggaacaggacaagaacacccaagagguguucgcccaagugaagcagaucuacaagaccccuccuaucaaggacuucggcggcuucaauuucagccagauucugcccgauccuagcaagcccagcaagcggagcuucaucgaggaccugcuguucaacaaagugacacuggccgacgccggcuucaucaagcaguauggcgauugucugggcgacauugccgccagggaucugauuugcgcccagaaguuuaacggacugacagugcugccuccucugcugaccgaugagaugaucgcccaguacacaucugcccugcuggccggcacaaucacaagcggcuggacauuuggagcaggcgccgcucugcagauccccuuugcuaugcagauggccuaccgguucaacggcaucggagugacccagaaugugcuguacgagaaccagaagcugaucgccaaccaguucaacagcgccaucggcaagauccaggacagccugagcagcacagcaagcgcccugggaaagcugcaggacguggucaaccagaaugcccaggcacugaacacccuggucaagcagcuguccuccaacuucggcgccaucagcucugugcugaacgauauccugagcagacuggacccuccugaggccgaggugcagaucgacagacugaucacaggcagacugcagagccuccagacauacgugacccagcagcugaucagagccgccgagauuagagccucugccaaucuggccgccaccaagaugucugagugugugcugggccagagcaagagaguggacuuuugcggcaagggcuaccaccugaugagcuucccucagucugccccucacggcgugguguuucugcacgugacauaugugcccgcucaagagaagaauuucaccaccgcuccagccaucugccacgacggcaaagcccacuuuccuagagaaggcguguucguguccaacggcacccauugguucgugacacagcggaacuucuacgagccccagaucaucaccaccgacaacaccuucgugucuggcaacugcgacgucgugaucggcauugugaacaauaccguguacgacccucugcagcccgagcuggacagcuucaaagaggaacuggacaaguacuuuaagaaccacacaagccccgacguggaccugggcgauaucagcggaaucaaugccagcgucgugaacauccagaaagagaucgaccggcugaacgagguggccaagaaucugaacgagagccugaucgaccugcaagaacuggggaaguacgagcaguacaucaaguggcccugguacaucuggcugggcuuuaucgccggacugauugccaucgugauggucacaaucaugcuguguugcaugaccagcugcuguagcugccugaagggcuguuguagcuguggcagcugcugcaaguucgacgaggacgauucugagcccgugcugaagggcgugaaacugcacuacacaugauaauaggcuggagccucgguggccuagcuucuugccccuugggccuccccccagccccuccuccccuuccugcacccguacccccguggucuuugaauaaagucugagugggcggcaaaaaaaaaaaaaaaaaaaaaaaaaaaaaaaaaaaaaaaaaaaaaaaaaaaaaaaaaaaaaaaaaaaaaaaaaaaaaaaaaaaaaaaaaaaaaaaaaaaaucuag

SEQ ID NO: 26689 - RNA, 4100 nt, Artificial Sequence
  SARS-CoV-2/Wuhan/WIV05/2019__EPI_ISL_402128 spike protein mRNA gc mod (1-1273)(K986P_V987P_A222V_D614G)
gggaaauaagagagaaaagaagaguaagaagaaauauaagaccccggcgccgccaccauguucguguuccuggugcugcugccucugguguccagccagugugugaaccugaccaccagaacacagcugccuccagccuacaccaacagcuuuaccagaggcguguacuaccccgacaagguguucagauccagcgugcugcacucuacccaggaccuguuccugccuuucuucagcaacgugaccugguuccacgccauccacguguccggcaccaauggcaccaagagauucgacaaccccgugcugcccuucaacgacgggguguacuuugccagcaccgagaaguccaacaucaucagaggcuggaucuucggcaccacacuggacagcaagacccagagccugcugaucgugaacaacgccaccaacguggucaucaaagugugcgaguuccaguucugcaacgaccccuuccugggcgucuacuaccacaagaacaacaagagcuggauggaaagcgaguuccggguguacagcagcgccaacaacugcaccuucgaguacgugucccagccuuuccugauggaccuggaaggcaagcagggcaacuucaagaaccugcgcgaguucguguuuaagaacaucgacggcuacuucaagaucuacagcaagcacaccccuaucaaccucgugcgggaucugccucagggcuucucugugcuggaaccccugguggaucugcccaucggcaucaacaucacccgguuucagacacugcuggcccugcacagaagcuaccugacaccuggcgauagcagcagcggauggacagcuggugccgccgcuuacuaugugggcuaccugcagccuagaaccuuccugcugaaguacaacgagaacggcaccaucaccgacgccguggauugugcucuggauccucugagcgagacaaagugcacccugaaguccuucaccguggaaaagggcaucuaccagaccagcaacuuccgggugcagcccaccgaauccaucgugcgguuccccaauaucaccaaucugugccccuucggcgagguguucaaugccaccagauucgccucuguguacgccuggaaccggaagcggaucagcaauugcguggccgacuacuccgugcuguacaacuccgccagcuucagcaccuucaagugcuacggcguguccccuaccaagcugaacgaccugugcuucacaaacguguacgccgacagcuucgugauccggggagaugaagugcggcagauugccccuggacagacaggcaagaucgccgacuacaacuacaagcugcccgacgacuucaccggcugugugauugccuggaacagcaacaaccuggacuccaaagucggcggcaacuacaauuaccuguaccggcuguuccggaaguccaaucugaagcccuucgagcgggacaucuccaccgagaucuaucaggccggcagcaccccuuguaacggcguggaaggcuucaacugcuacuucccacugcaguccuacggcuuucagcccacaaauggcgugggcuaucagcccuacagagugguggugcugagcuucgaacugcugcaugccccugccacagugugcggcccuaagaaaagcaccaaucucgugaagaacaaaugcgugaacuucaacuucaacggccugaccggcaccggcgugcugacagagagcaacaagaaguuccugccauuccagcaguuuggccgggauaucgccgauaccacagacgccguuagagauccccagacacuggaaauccuggacaucaccccuugcagcuucggcggagugucugugaucaccccuggcaccaacaccagcaaucagguggcagugcuguaccagggcgugaacuguaccgaagugcccguggccauucacgccgaucagcugacaccuacauggcggguguacuccaccggcagcaauguguuucagaccagagccggcugucugaucggagccgagcacgugaacaauagcuacgagugcgacauccccaucggcgcuggaaucugcgccagcuaccagacacagacaaacagcccucggagagccagaagcguggccagccagagcaucauugccuacacaaugucucugggcgccgagaacagcguggccuacuccaacaacucuaucgcuauccccaccaacuucaccaucagcgugaccacagagauccugccuguguccaugaccaagaccagcguggacugcaccauguacaucugcggcgauuccaccgagugcuccaaccugcugcugcaguacggcagcuucugcacccagcugaauagagcccugacagggaucgccguggaacaggacaagaacacccaagagguguucgcccaagugaagcagaucuacaagaccccuccuaucaaggacuucggcggcuucaauuucagccagauucugcccgauccuagcaagcccagcaagcggagcuucaucgaggaccugcuguucaacaaagugacacuggccgacgccggcuucaucaagcaguauggcgauugucugggcgacauugccgccagggaucugauuugcgcccagaaguuuaacggacugacagugcugccuccucugcugaccgaugagaugaucgcccaguacacaucugcccugcuggccggcacaaucacaagcggcuggacauuuggagcaggcgccgcucugcagauccccuuugcuaugcagauggccuaccgguucaacggcaucggagugacccagaaugugcuguacgagaaccagaagcugaucgccaaccaguucaacagcgccaucggcaagauccaggacagccugagcagcacagcaagcgcccugggaaagcugcaggacguggucaaccagaaugcccaggcacugaacacccuggucaagcagcuguccuccaacuucggcgccaucagcucugugcugaacgauauccugagcagacuggacccuccugaggccgaggugcagaucgacagacugaucacaggcagacugcagagccuccagacauacgugacccagcagcugaucagagccgccgagauuagagccucugccaaucuggccgccaccaagaugucugagugugugcugggccagagcaagagaguggacuuuugcggcaagggcuaccaccugaugagcuucccucagucugccccucacggcgugguguuucugcacgugacauaugugcccgcucaagagaagaauuucaccaccgcuccagccaucugccacgacggcaaagcccacuuuccuagagaaggcguguucguguccaacggcacccauugguucgugacacagcggaacuucuacgagccccagaucaucaccaccgacaacaccuucgugucuggcaacugcgacgucgugaucggcauugugaacaauaccguguacgacccucugcagcccgagcuggacagcuucaaagaggaacuggacaaguacuuuaagaaccacacaagccccgacguggaccugggcgauaucagcggaaucaaugccagcgucgugaacauccagaaagagaucgaccggcugaacgagguggccaagaaucugaacgagagccugaucgaccugcaagaacuggggaaguacgagcaguacaucaaguggcccugguacaucuggcugggcuuuaucgccggacugauugccaucgugauggucacaaucaugcuguguugcaugaccagcugcuguagcugccugaagggcuguuguagcuguggcagcugcugcaaguucgacgaggacgauucugagcccgugcugaagggcgugaaacugcacuacacaugauaauaggcuggagccucgguggccuagcuucuugccccuugggccuccccccagccccuccuccccuuccugcacccguacccccguggucuuugaauaaagucugagugggcggcaaaaaaaaaaaaaaaaaaaaaaaaaaaaaaaaaaaaaaaaaaaaaaaaaaaaaaaaaaaaaaaaaaaaaaaaaaaaaaaaaaaaaaaaaaaaaaaaaaaaucuag

SEQ ID NO: 26690 - RNA, 4100 nt, Artificial Sequence
  SARS-CoV-2/Wuhan/WIV05/2019__EPI_ISL_402128 spike protein mRNA gc mod (1-1273)(K986P_V987P_N439K_D614G)
gggaaauaagagagaaaagaagaguaagaagaaauauaagaccccggcgccgccaccauguucguguuccuggugcugcugccucugguguccagccagugugugaaccugaccaccagaacacagcugccuccagccuacaccaacagcuuuaccagaggcguguacuaccccgacaagguguucagauccagcgugcugcacucuacccaggaccuguuccugccuuucuucagcaacgugaccugguuccacgccauccacguguccggcaccaauggcaccaagagauucgacaaccccgugcugcccuucaacgacgggguguacuuugccagcaccgagaaguccaacaucaucagaggcuggaucuucggcaccacacuggacagcaagacccagagccugcugaucgugaacaacgccaccaacguggucaucaaagugugcgaguuccaguucugcaacgaccccuuccugggcgucuacuaccacaagaacaacaagagcuggauggaaagcgaguuccggguguacagcagcgccaacaacugcaccuucgaguacgugucccagccuuuccugauggaccuggaaggcaagcagggcaacuucaagaaccugcgcgaguucguguuuaagaacaucgacggcuacuucaagaucuacagcaagcacaccccuaucaaccucgugcgggaucugccucagggcuucucugcucuggaaccccugguggaucugcccaucggcaucaacaucacccgguuucagacacugcuggcccugcacagaagcuaccugacaccuggcgauagcagcagcggauggacagcuggugccgccgcuuacuaugugggcuaccugcagccuagaaccuuccugcugaaguacaacgagaacggcaccaucaccgacgccguggauugugcucuggauccucugagcgagacaaagugcacccugaaguccuucaccguggaaaagggcaucuaccagaccagcaacuuccgggugcagcccaccgaauccaucgugcgguuccccaauaucaccaaucugugccccuucggcgagguguucaaugccaccagauucgccucuguguacgccuggaaccggaagcggaucagcaauugcguggccgacuacuccgugcuguacaacuccgccagcuucagcaccuucaagugcuacggcguguccccuaccaagcugaacgaccugugcuucacaaacguguacgccgacagcuucgugauccggggagaugaagugcggcagauugccccuggacagacaggcaagaucgccgacuacaacuacaagcugcccgacgacuucaccggcugugugauugccuggaacagcaagaaccuggacuccaaagucggcggcaacuacaauuaccuguaccggcuguuccggaaguccaaucugaagcccuucgagcgggacaucuccaccgagaucuaucaggccggcagcaccccuuguaacggcguggaaggcuucaacugcuacuucccacugcaguccuacggcuuucagcccacaaauggcgugggcuaucagcccuacagagugguggugcugagcuucgaacugcugcaugccccugccacagugugcggcccuaagaaaagcaccaaucucgugaagaacaaaugcgugaacuucaacuucaacggccugaccggcaccggcgugcugacagagagcaacaagaaguuccugccauuccagcaguuuggccgggauaucgccgauaccacagacgccguuagagauccccagacacuggaaauccuggacaucaccccuugcagcuucggcggagugucugugaucaccccuggcaccaacaccagcaaucagguggcagugcuguaccagggcgugaacuguaccgaagugcccguggccauucacgccgaucagcugacaccuacauggcggguguacuccaccggcagcaauguguuucagaccagagccggcugucugaucggagccgagcacgugaacaauagcuacgagugcgacauccccaucggcgcuggaaucugcgccagcuaccagacacagacaaacagcccucggagagccagaagcguggccagccagagcaucauugccuacacaaugucucugggcgccgagaacagcguggccuacuccaacaacucuaucgcuauccccaccaacuucaccaucagcgugaccacagagauccugccuguguccaugaccaagaccagcguggacugcaccauguacaucugcggcgauuccaccgagugcuccaaccugcugcugcaguacggcagcuucugcacccagcugaauagagcccugacagggaucgccguggaacaggacaagaacacccaagagguguucgcccaagugaagcagaucuacaagaccccuccuaucaaggacuucggcggcuucaauuucagccagauucugcccgauccuagcaagcccagcaagcggagcuucaucgaggaccugcuguucaacaaagugacacuggccgacgccggcuucaucaagcaguauggcgauugucugggcgacauugccgccagggaucugauuugcgcccagaaguuuaacggacugacagugcugccuccucugcugaccgaugagaugaucgcccaguacacaucugcccugcuggccggcacaaucacaagcggcuggacauuuggagcaggcgccgcucugcagauccccuuugcuaugcagauggccuaccgguucaacggcaucggagugacccagaaugugcuguacgagaaccagaagcugaucgccaaccaguucaacagcgccaucggcaagauccaggacagccugagcagcacagcaagcgcccugggaaagcugcaggacguggucaaccagaaugcccaggcacugaacacccuggucaagcagcuguccuccaacuucggcgccaucagcucugugcugaacgauauccugagcagacuggacccuccugaggccgaggugcagaucgacagacugaucacaggcagacugcagagccuccagacauacgugacccagcagcugaucagagccgccgagauuagagccucugccaaucuggccgccaccaagaugucugagugugugcugggccagagcaagagaguggacuuuugcggcaagggcuaccaccugaugagcuucccucagucugccccucacggcgugguguuucugcacgugacauaugugcccgcucaagagaagaauuucaccaccgcuccagccaucugccacgacggcaaagcccacuuuccuagagaaggcguguucguguccaacggcacccauugguucgugacacagcggaacuucuacgagccccagaucaucaccaccgacaacaccuucgugucuggcaacugcgacgucgugaucggcauugugaacaauaccguguacgacccucugcagcccgagcuggacagcuucaaagaggaacuggacaaguacuuuaagaaccacacaagccccgacguggaccugggcgauaucagcggaaucaaugccagcgucgugaacauccagaaagagaucgaccggcugaacgagguggccaagaaucugaacgagagccugaucgaccugcaagaacuggggaaguacgagcaguacaucaaguggcccugguacaucuggcugggcuuuaucgccggacugauugccaucgugauggucacaaucaugcuguguugcaugaccagcugcuguagcugccugaagggcuguuguagcuguggcagcugcugcaaguucgacgaggacgauucugagcccgugcugaagggcgugaaacugcacuacacaugauaauaggcuggagccucgguggccuagcuucuugccccuugggccuccccccagccccuccuccccuuccugcacccguacccccguggucuuugaauaaagucugagugggcggcaaaaaaaaaaaaaaaaaaaaaaaaaaaaaaaaaaaaaaaaaaaaaaaaaaaaaaaaaaaaaaaaaaaaaaaaaaaaaaaaaaaaaaaaaaaaaaaaaaaaucuag

SEQ ID NO: 26691 - RNA, 4100 nt, Artificial Sequence
  SARS-CoV-2/Wuhan/WIV05/2019__EPI_ISL_402128 spike protein mRNA gc mod (1-1273)(K986P_V987P_S477N_D614G)
gggaaauaagagagaaaagaagaguaagaagaaauauaagaccccggcgccgccaccauguucguguuccuggugcugcugccucugguguccagccagugugugaaccugaccaccagaacacagcugccuccagccuacaccaacagcuuuaccagaggcguguacuaccccgacaagguguucagauccagcgugcugcacucuacccaggaccuguuccugccuuucuucagcaacgugaccugguuccacgccauccacguguccggcaccaauggcaccaagagauucgacaaccccgugcugcccuucaacgacgggguguacuuugccagcaccgagaaguccaacaucaucagaggcuggaucuucggcaccacacuggacagcaagacccagagccugcugaucgugaacaacgccaccaacguggucaucaaagugugcgaguuccaguucugcaacgaccccuuccugggcgucuacuaccacaagaacaacaagagcuggauggaaagcgaguuccggguguacagcagcgccaacaacugcaccuucgaguacgugucccagccuuuccugauggaccuggaaggcaagcagggcaacuucaagaaccugcgcgaguucguguuuaagaacaucgacggcuacuucaagaucuacagcaagcacaccccuaucaaccucgugcgggaucugccucagggcuucucugcucuggaaccccugguggaucugcccaucggcaucaacaucacccgguuucagacacugcuggcccugcacagaagcuaccugacaccuggcgauagcagcagcggauggacagcuggugccgccgcuuacuaugugggcuaccugcagccuagaaccuuccugcugaaguacaacgagaacggcaccaucaccgacgccguggauugugcucuggauccucugagcgagacaaagugcacccugaaguccuucaccguggaaaagggcaucuaccagaccagcaacuuccgggugcagcccaccgaauccaucgugcgguuccccaauaucaccaaucugugccccuucggcgagguguucaaugccaccagauucgccucuguguacgccuggaaccggaagcggaucagcaauugcguggccgacuacuccgugcuguacaacuccgccagcuucagcaccuucaagugcuacggcguguccccuaccaagcugaacgaccugugcuucacaaacguguacgccgacagcuucgugauccggggagaugaagugcggcagauugccccuggacagacaggcaagaucgccgacuacaacuacaagcugcccgacgacuucaccggcugugugauugccuggaacagcaacaaccuggacuccaaagucggcggcaacuacaauuaccuguaccggcuguuccggaaguccaaucugaagcccuucgagcgggacaucuccaccgagaucuaucaggccggcaacaccccuuguaacggcguggaaggcuucaacugcuacuucccacugcaguccuacggcuuucagcccacaaauggcgugggcuaucagcccuacagagugguggugcugagcuucgaacugcugcaugccccugccacagugugcggcccuaagaaaagcaccaaucucgugaagaacaaaugcgugaacuucaacuucaacggccugaccggcaccggcgugcugacagagagcaacaagaaguuccugccauuccagcaguuuggccgggauaucgccgauaccacagacgccguuagagauccccagacacuggaaauccuggacaucaccccuugcagcuucggcggagugucugugaucaccccuggcaccaacaccagcaaucagguggcagugcuguaccagggcgugaacuguaccgaagugcccguggccauucacgccgaucagcugacaccuacauggcggguguacuccaccggcagcaauguguuucagaccagagccggcugucugaucggagccgagcacgugaacaauagcuacgagugcgacauccccaucggcgcuggaaucugcgccagcuaccagacacagacaaacagcccucggagagccagaagcguggccagccagagcaucauugccuacacaaugucucugggcgccgagaacagcguggccuacuccaacaacucuaucgcuauccccaccaacuucaccaucagcgugaccacagagauccugccuguguccaugaccaagaccagcguggacugcaccauguacaucugcggcgauuccaccgagugcuccaaccugcugcugcaguacggcagcuucugcacccagcugaauagagcccugacagggaucgccguggaacaggacaagaacacccaagagguguucgcccaagugaagcagaucuacaagaccccuccuaucaaggacuucggcggcuucaauuucagccagauucugcccgauccuagcaagcccagcaagcggagcuucaucgaggaccugcuguucaacaaagugacacuggccgacgccggcuucaucaagcaguauggcgauugucugggcgacauugccgccagggaucugauuugcgcccagaaguuuaacggacugacagugcugccuccucugcugaccgaugagaugaucgcccaguacacaucugcccugcuggccggcacaaucacaagcggcuggacauuuggagcaggcgccgcucugcagauccccuuugcuaugcagauggccuaccgguucaacggcaucggagugacccagaaugugcuguacgagaaccagaagcugaucgccaaccaguucaacagcgccaucggcaagauccaggacagccugagcagcacagcaagcgcccugggaaagcugcaggacguggucaaccagaaugcccaggcacugaacacccuggucaagcagcuguccuccaacuucggcgccaucagcucugugcugaacgauauccugagcagacuggacccuccugaggccgaggugcagaucgacagacugaucacaggcagacugcagagccuccagacauacgugacccagcagcugaucagagccgccgagauuagagccucugccaaucuggccgccaccaagaugucugagugugugcugggccagagcaagagaguggacuuuugcggcaagggcuaccaccugaugagcuucccucagucugccccucacggcgugguguuucugcacgugacauaugugcccgcucaagagaagaauuucaccaccgcuccagccaucugccacgacggcaaagcccacuuuccuagagaaggcguguucguguccaacggcacccauugguucgugacacagcggaacuucuacgagccccagaucaucaccaccgacaacaccuucgugucuggcaacugcgacgucgugaucggcauugugaacaauaccguguacgacccucugcagcccgagcuggacagcuucaaagaggaacuggacaaguacuuuaagaaccacacaagccccgacguggaccugggcgauaucagcggaaucaaugccagcgucgugaacauccagaaagagaucgaccggcugaacgagguggccaagaaucugaacgagagccugaucgaccugcaagaacuggggaaguacgagcaguacaucaaguggcccugguacaucuggcugggcuuuaucgccggacugauugccaucgugauggucacaaucaugcuguguugcaugaccagcugcuguagcugccugaagggcuguuguagcuguggcagcugcugcaaguucgacgaggacgauucugagcccgugcugaagggcgugaaacugcacuacacaugauaauaggcuggagccucgguggccuagcuucuugccccuugggccuccccccagccccuccuccccuuccugcacccguacccccguggucuuugaauaaagucugagugggcggcaaaaaaaaaaaaaaaaaaaaaaaaaaaaaaaaaaaaaaaaaaaaaaaaaaaaaaaaaaaaaaaaaaaaaaaaaaaaaaaaaaaaaaaaaaaaaaaaaaaaucuag

SEQ ID NO: 26692 - RNA, 4100 nt, Artificial Sequence
  SARS-CoV-2/Wuhan/WIV05/2019__EPI_ISL_402128 spike protein mRNA gc mod (1-1273)(K986P_V987P_N501Y_D614G)
gggaaauaagagagaaaagaagaguaagaagaaauauaagaccccggcgccgccaccauguucguguuccuggugcugcugccucugguguccagccagugugugaaccugaccaccagaacacagcugccuccagccuacaccaacagcuuuaccagaggcguguacuaccccgacaagguguucagauccagcgugcugcacucuacccaggaccuguuccugccuuucuucagcaacgugaccugguuccacgccauccacguguccggcaccaauggcaccaagagauucgacaaccccgugcugcccuucaacgacgggguguacuuugccagcaccgagaaguccaacaucaucagaggcuggaucuucggcaccacacuggacagcaagacccagagccugcugaucgugaacaacgccaccaacguggucaucaaagugugcgaguuccaguucugcaacgaccccuuccugggcgucuacuaccacaagaacaacaagagcuggauggaaagcgaguuccggguguacagcagcgccaacaacugcaccuucgaguacgugucccagccuuuccugauggaccuggaaggcaagcagggcaacuucaagaaccugcgcgaguucguguuuaagaacaucgacggcuacuucaagaucuacagcaagcacaccccuaucaaccucgugcgggaucugccucagggcuucucugcucuggaaccccugguggaucugcccaucggcaucaacaucacccgguuucagacacugcuggcccugcacagaagcuaccugacaccuggcgauagcagcagcggauggacagcuggugccgccgcuuacuaugugggcuaccugcagccuagaaccuuccugcugaaguacaacgagaacggcaccaucaccgacgccguggauugugcucuggauccucugagcgagacaaagugcacccugaaguccuucaccguggaaaagggcaucuaccagaccagcaacuuccgggugcagcccaccgaauccaucgugcgguuccccaauaucaccaaucugugccccuucggcgagguguucaaugccaccagauucgccucuguguacgccuggaaccggaagcggaucagcaauugcguggccgacuacuccgugcuguacaacuccgccagcuucagcaccuucaagugcuacggcguguccccuaccaagcugaacgaccugugcuucacaaacguguacgccgacagcuucgugauccggggagaugaagugcggcagauugccccuggacagacaggcaagaucgccgacuacaacuacaagcugcccgacgacuucaccggcugugugauugccuggaacagcaacaaccuggacuccaaagucggcggcaacuacaauuaccuguaccggcuguuccggaaguccaaucugaagcccuucgagcgggacaucuccaccgagaucuaucaggccggcagcaccccuuguaacggcguggaaggcuucaacugcuacuucccacugcaguccuacggcuuucagcccacauacggcgugggcuaucagcccuacagagugguggugcugagcuucgaacugcugcaugccccugccacagugugcggcccuaagaaaagcaccaaucucgugaagaacaaaugcgugaacuucaacuucaacggccugaccggcaccggcgugcugacagagagcaacaagaaguuccugccauuccagcaguuuggccgggauaucgccgauaccacagacgccguuagagauccccagacacuggaaauccuggacaucaccccuugcagcuucggcggagugucugugaucaccccuggcaccaacaccagcaaucagguggcagugcuguaccagggcgugaacuguaccgaagugcccguggccauucacgccgaucagcugacaccuacauggcggguguacuccaccggcagcaauguguuucagaccagagccggcugucugaucggagccgagcacgugaacaauagcuacgagugcgacauccccaucggcgcuggaaucugcgccagcuaccagacacagacaaacagcccucggagagccagaagcguggccagccagagcaucauugccuacacaaugucucugggcgccgagaacagcguggccuacuccaacaacucuaucgcuauccccaccaacuucaccaucagcgugaccacagagauccugccuguguccaugaccaagaccagcguggacugcaccauguacaucugcggcgauuccaccgagugcuccaaccugcugcugcaguacggcagcuucugcacccagcugaauagagcccugacagggaucgccguggaacaggacaagaacacccaagagguguucgcccaagugaagcagaucuacaagaccccuccuaucaaggacuucggcggcuucaauuucagccagauucugcccgauccuagcaagcccagcaagcggagcuucaucgaggaccugcuguucaacaaagugacacuggccgacgccggcuucaucaagcaguauggcgauugucugggcgacauugccgccagggaucugauuugcgcccagaaguuuaacggacugacagugcugccuccucugcugaccgaugagaugaucgcccaguacacaucugcccugcuggccggcacaaucacaagcggcuggacauuuggagcaggcgccgcucugcagauccccuuugcuaugcagauggccuaccgguucaacggcaucggagugacccagaaugugcuguacgagaaccagaagcugaucgccaaccaguucaacagcgccaucggcaagauccaggacagccugagcagcacagcaagcgcccugggaaagcugcaggacguggucaaccagaaugcccaggcacugaacacccuggucaagcagcuguccuccaacuucggcgccaucagcucugugcugaacgauauccugagcagacuggacccuccugaggccgaggugcagaucgacagacugaucacaggcagacugcagagccuccagacauacgugacccagcagcugaucagagccgccgagauuagagccucugccaaucuggccgccaccaagaugucugagugugugcugggccagagcaagagaguggacuuuugcggcaagggcuaccaccugaugagcuucccucagucugccccucacggcgugguguuucugcacgugacauaugugcccgcucaagagaagaauuucaccaccgcuccagccaucugccacgacggcaaagcccacuuuccuagagaaggcguguucguguccaacggcacccauugguucgugacacagcggaacuucuacgagccccagaucaucaccaccgacaacaccuucgugucuggcaacugcgacgucgugaucggcauugugaacaauaccguguacgacccucugcagcccgagcuggacagcuucaaagaggaacuggacaaguacuuuaagaaccacacaagccccgacguggaccugggcgauaucagcggaaucaaugccagcgucgugaacauccagaaagagaucgaccggcugaacgagguggccaagaaucugaacgagagccugaucgaccugcaagaacuggggaaguacgagcaguacaucaaguggcccugguacaucuggcugggcuuuaucgccggacugauugccaucgugauggucacaaucaugcuguguugcaugaccagcugcuguagcugccugaagggcuguuguagcuguggcagcugcugcaaguucgacgaggacgauucugagcccgugcugaagggcgugaaacugcacuacacaugauaauaggcuggagccucgguggccuagcuucuugccccuugggccuccccccagccccuccuccccuuccugcacccguacccccguggucuuugaauaaagucugagugggcggcaaaaaaaaaaaaaaaaaaaaaaaaaaaaaaaaaaaaaaaaaaaaaaaaaaaaaaaaaaaaaaaaaaaaaaaaaaaaaaaaaaaaaaaaaaaaaaaaaaaaucuag

SEQ ID NO: 26693 - RNA, 4094 nt, Artificial Sequence
  SARS-CoV-2/Wuhan/WIV05/2019__EPI_ISL_402128 spike protein mRNA gc mod (1-1273)(K986P_V987P_H69del_V70del_D614G)
gggaaauaagagagaaaagaagaguaagaagaaauauaagaccccggcgccgccaccauguucguguuccuggugcugcugccucugguguccagccagugugugaaccugaccaccagaacacagcugccuccagccuacaccaacagcuuuaccagaggcguguacuaccccgacaagguguucagauccagcgugcugcacucuacccaggaccuguuccugccuuucuucagcaacgugaccugguuccacgccaucuccggcaccaauggcaccaagagauucgacaaccccgugcugcccuucaacgacgggguguacuuugccagcaccgagaaguccaacaucaucagaggcuggaucuucggcaccacacuggacagcaagacccagagccugcugaucgugaacaacgccaccaacguggucaucaaagugugcgaguuccaguucugcaacgaccccuuccugggcgucuacuaccacaagaacaacaagagcuggauggaaagcgaguuccggguguacagcagcgccaacaacugcaccuucgaguacgugucccagccuuuccugauggaccuggaaggcaagcagggcaacuucaagaaccugcgcgaguucguguuuaagaacaucgacggcuacuucaagaucuacagcaagcacaccccuaucaaccucgugcgggaucugccucagggcuucucugcucuggaaccccugguggaucugcccaucggcaucaacaucacccgguuucagacacugcuggcccugcacagaagcuaccugacaccuggcgauagcagcagcggauggacagcuggugccgccgcuuacuaugugggcuaccugcagccuagaaccuuccugcugaaguacaacgagaacggcaccaucaccgacgccguggauugugcucuggauccucugagcgagacaaagugcacccugaaguccuucaccguggaaaagggcaucuaccagaccagcaacuuccgggugcagcccaccgaauccaucgugcgguuccccaauaucaccaaucugugccccuucggcgagguguucaaugccaccagauucgccucuguguacgccuggaaccggaagcggaucagcaauugcguggccgacuacuccgugcuguacaacuccgccagcuucagcaccuucaagugcuacggcguguccccuaccaagcugaacgaccugugcuucacaaacguguacgccgacagcuucgugauccggggagaugaagugcggcagauugccccuggacagacaggcaagaucgccgacuacaacuacaagcugcccgacgacuucaccggcugugugauugccuggaacagcaacaaccuggacuccaaagucggcggcaacuacaauuaccuguaccggcuguuccggaaguccaaucugaagcccuucgagcgggacaucuccaccgagaucuaucaggccggcagcaccccuuguaacggcguggaaggcuucaacugcuacuucccacugcaguccuacggcuuucagcccacaaauggcgugggcuaucagcccuacagagugguggugcugagcuucgaacugcugcaugccccugccacagugugcggcccuaagaaaagcaccaaucucgugaagaacaaaugcgugaacuucaacuucaacggccugaccggcaccggcgugcugacagagagcaacaagaaguuccugccauuccagcaguuuggccgggauaucgccgauaccacagacgccguuagagauccccagacacuggaaauccuggacaucaccccuugcagcuucggcggagugucugugaucaccccuggcaccaacaccagcaaucagguggcagugcuguaccagggcgugaacuguaccgaagugcccguggccauucacgccgaucagcugacaccuacauggcggguguacuccaccggcagcaauguguuucagaccagagccggcugucugaucggagccgagcacgugaacaauagcuacgagugcgacauccccaucggcgcuggaaucugcgccagcuaccagacacagacaaacagcccucggagagccagaagcguggccagccagagcaucauugccuacacaaugucucugggcgccgagaacagcguggccuacuccaacaacucuaucgcuauccccaccaacuucaccaucagcgugaccacagagauccugccuguguccaugaccaagaccagcguggacugcaccauguacaucugcggcgauuccaccgagugcuccaaccugcugcugcaguacggcagcuucugcacccagcugaauagagcccugacagggaucgccguggaacaggacaagaacacccaagagguguucgcccaagugaagcagaucuacaagaccccuccuaucaaggacuucggcggcuucaauuucagccagauucugcccgauccuagcaagcccagcaagcggagcuucaucgaggaccugcuguucaacaaagugacacuggccgacgccggcuucaucaagcaguauggcgauugucugggcgacauugccgccagggaucugauuugcgcccagaaguuuaacggacugacagugcugccuccucugcugaccgaugagaugaucgcccaguacacaucugcccugcuggccggcacaaucacaagcggcuggacauuuggagcaggcgccgcucugcagauccccuuugcuaugcagauggccuaccgguucaacggcaucggagugacccagaaugugcuguacgagaaccagaagcugaucgccaaccaguucaacagcgccaucggcaagauccaggacagccugagcagcacagcaagcgcccugggaaagcugcaggacguggucaaccagaaugcccaggcacugaacacccuggucaagcagcuguccuccaacuucggcgccaucagcucugugcugaacgauauccugagcagacuggacccuccugaggccgaggugcagaucgacagacugaucacaggcagacugcagagccuccagacauacgugacccagcagcugaucagagccgccgagauuagagccucugccaaucuggccgccaccaagaugucugagugugugcugggccagagcaagagaguggacuuuugcggcaagggcuaccaccugaugagcuucccucagucugccccucacggcgugguguuucugcacgugacauaugugcccgcucaagagaagaauuucaccaccgcuccagccaucugccacgacggcaaagcccacuuuccuagagaaggcguguucguguccaacggcacccauugguucgugacacagcggaacuucuacgagccccagaucaucaccaccgacaacaccuucgugucuggcaacugcgacgucgugaucggcauugugaacaauaccguguacgacccucugcagcccgagcuggacagcuucaaagaggaacuggacaaguacuuuaagaaccacacaagccccgacguggaccugggcgauaucagcggaaucaaugccagcgucgugaacauccagaaagagaucgaccggcugaacgagguggccaagaaucugaacgagagccugaucgaccugcaagaacuggggaaguacgagcaguacaucaaguggcccugguacaucuggcugggcuuuaucgccggacugauugccaucgugauggucacaaucaugcuguguugcaugaccagcugcuguagcugccugaagggcuguuguagcuguggcagcugcugcaaguucgacgaggacgauucugagcccgugcugaagggcgugaaacugcacuacacaugauaauaggcuggagccucgguggccuagcuucuugccccuugggccuccccccagccccuccuccccuuccugcacccguacccccguggucuuugaauaaagucugagugggcggcaaaaaaaaaaaaaaaaaaaaaaaaaaaaaaaaaaaaaaaaaaaaaaaaaaaaaaaaaaaaaaaaaaaaaaaaaaaaaaaaaaaaaaaaaaaaaaaaaaaaucuag

SEQ ID NO: 26694 - RNA, 4100 nt, Artificial Sequence
  SARS-CoV-2/Wuhan/WIV05/2019__EPI_ISL_402128 spike protein mRNA gc mod (1-1273)(K986P_V987P_Y453F_D614G)
gggaaauaagagagaaaagaagaguaagaagaaauauaagaccccggcgccgccaccauguucguguuccuggugcugcugccucugguguccagccagugugugaaccugaccaccagaacacagcugccuccagccuacaccaacagcuuuaccagaggcguguacuaccccgacaagguguucagauccagcgugcugcacucuacccaggaccuguuccugccuuucuucagcaacgugaccugguuccacgccauccacguguccggcaccaauggcaccaagagauucgacaaccccgugcugcccuucaacgacgggguguacuuugccagcaccgagaaguccaacaucaucagaggcuggaucuucggcaccacacuggacagcaagacccagagccugcugaucgugaacaacgccaccaacguggucaucaaagugugcgaguuccaguucugcaacgaccccuuccugggcgucuacuaccacaagaacaacaagagcuggauggaaagcgaguuccggguguacagcagcgccaacaacugcaccuucgaguacgugucccagccuuuccugauggaccuggaaggcaagcagggcaacuucaagaaccugcgcgaguucguguuuaagaacaucgacggcuacuucaagaucuacagcaagcacaccccuaucaaccucgugcgggaucugccucagggcuucucugcucuggaaccccugguggaucugcccaucggcaucaacaucacccgguuucagacacugcuggcccugcacagaagcuaccugacaccuggcgauagcagcagcggauggacagcuggugccgccgcuuacuaugugggcuaccugcagccuagaaccuuccugcugaaguacaacgagaacggcaccaucaccgacgccguggauugugcucuggauccucugagcgagacaaagugcacccugaaguccuucaccguggaaaagggcaucuaccagaccagcaacuuccgggugcagcccaccgaauccaucgugcgguuccccaauaucaccaaucugugccccuucggcgagguguucaaugccaccagauucgccucuguguacgccuggaaccggaagcggaucagcaauugcguggccgacuacuccgugcuguacaacuccgccagcuucagcaccuucaagugcuacggcguguccccuaccaagcugaacgaccugugcuucacaaacguguacgccgacagcuucgugauccggggagaugaagugcggcagauugccccuggacagacaggcaagaucgccgacuacaacuacaagcugcccgacgacuucaccggcugugugauugccuggaacagcaacaaccuggacuccaaagucggcggcaacuacaauuaccuguuccggcuguuccggaaguccaaucugaagcccuucgagcgggacaucuccaccgagaucuaucaggccggcagcaccccuuguaacggcguggaaggcuucaacugcuacuucccacugcaguccuacggcuuucagcccacaaauggcgugggcuaucagcccuacagagugguggugcugagcuucgaacugcugcaugccccugccacagugugcggcccuaagaaaagcaccaaucucgugaagaacaaaugcgugaacuucaacuucaacggccugaccggcaccggcgugcugacagagagcaacaagaaguuccugccauuccagcaguuuggccgggauaucgccgauaccacagacgccguuagagauccccagacacuggaaauccuggacaucaccccuugcagcuucggcggagugucugugaucaccccuggcaccaacaccagcaaucagguggcagugcuguaccagggcgugaacuguaccgaagugcccguggccauucacgccgaucagcugacaccuacauggcggguguacuccaccggcagcaauguguuucagaccagagccggcugucugaucggagccgagcacgugaacaauagcuacgagugcgacauccccaucggcgcuggaaucugcgccagcuaccagacacagacaaacagcccucggagagccagaagcguggccagccagagcaucauugccuacacaaugucucugggcgccgagaacagcguggccuacuccaacaacucuaucgcuauccccaccaacuucaccaucagcgugaccacagagauccugccuguguccaugaccaagaccagcguggacugcaccauguacaucugcggcgauuccaccgagugcuccaaccugcugcugcaguacggcagcuucugcacccagcugaauagagcccugacagggaucgccguggaacaggacaagaacacccaagagguguucgcccaagugaagcagaucuacaagaccccuccuaucaaggacuucggcggcuucaauuucagccagauucugcccgauccuagcaagcccagcaagcggagcuucaucgaggaccugcuguucaacaaagugacacuggccgacgccggcuucaucaagcaguauggcgauugucugggcgacauugccgccagggaucugauuugcgcccagaaguuuaacggacugacagugcugccuccucugcugaccgaugagaugaucgcccaguacacaucugcccugcuggccggcacaaucacaagcggcuggacauuuggagcaggcgccgcucugcagauccccuuugcuaugcagauggccuaccgguucaacggcaucggagugacccagaaugugcuguacgagaaccagaagcugaucgccaaccaguucaacagcgccaucggcaagauccaggacagccugagcagcacagcaagcgcccugggaaagcugcaggacguggucaaccagaaugcccaggcacugaacacccuggucaagcagcuguccuccaacuucggcgccaucagcucugugcugaacgauauccugagcagacuggacccuccugaggccgaggugcagaucgacagacugaucacaggcagacugcagagccuccagacauacgugacccagcagcugaucagagccgccgagauuagagccucugccaaucuggccgccaccaagaugucugagugugugcugggccagagcaagagaguggacuuuugcggcaagggcuaccaccugaugagcuucccucagucugccccucacggcgugguguuucugcacgugacauaugugcccgcucaagagaagaauuucaccaccgcuccagccaucugccacgacggcaaagcccacuuuccuagagaaggcguguucguguccaacggcacccauugguucgugacacagcggaacuucuacgagccccagaucaucaccaccgacaacaccuucgugucuggcaacugcgacgucgugaucggcauugugaacaauaccguguacgacccucugcagcccgagcuggacagcuucaaagaggaacuggacaaguacuuuaagaaccacacaagccccgacguggaccugggcgauaucagcggaaucaaugccagcgucgugaacauccagaaagagaucgaccggcugaacgagguggccaagaaucugaacgagagccugaucgaccugcaagaacuggggaaguacgagcaguacaucaaguggcccugguacaucuggcugggcuuuaucgccggacugauugccaucgugauggucacaaucaugcuguguugcaugaccagcugcuguagcugccugaagggcuguuguagcuguggcagcugcugcaaguucgacgaggacgauucugagcccgugcugaagggcgugaaacugcacuacacaugauaauaggcuggagccucgguggccuagcuucuugccccuugggccuccccccagccccuccuccccuuccugcacccguacccccguggucuuugaauaaagucugagugggcggcaaaaaaaaaaaaaaaaaaaaaaaaaaaaaaaaaaaaaaaaaaaaaaaaaaaaaaaaaaaaaaaaaaaaaaaaaaaaaaaaaaaaaaaaaaaaaaaaaaaaucuag

SEQ ID NO: 26695 - RNA, 4100 nt, Artificial Sequence
  SARS-CoV-2/Wuhan/WIV05/2019__EPI_ISL_402128 spike protein mRNA gc mod (1-1273)(K986P_V987P_D614G_I692V)
gggaaauaagagagaaaagaagaguaagaagaaauauaagaccccggcgccgccaccauguucguguuccuggugcugcugccucugguguccagccagugugugaaccugaccaccagaacacagcugccuccagccuacaccaacagcuuuaccagaggcguguacuaccccgacaagguguucagauccagcgugcugcacucuacccaggaccuguuccugccuuucuucagcaacgugaccugguuccacgccauccacguguccggcaccaauggcaccaagagauucgacaaccccgugcugcccuucaacgacgggguguacuuugccagcaccgagaaguccaacaucaucagaggcuggaucuucggcaccacacuggacagcaagacccagagccugcugaucgugaacaacgccaccaacguggucaucaaagugugcgaguuccaguucugcaacgaccccuuccugggcgucuacuaccacaagaacaacaagagcuggauggaaagcgaguuccggguguacagcagcgccaacaacugcaccuucgaguacgugucccagccuuuccugauggaccuggaaggcaagcagggcaacuucaagaaccugcgcgaguucguguuuaagaacaucgacggcuacuucaagaucuacagcaagcacaccccuaucaaccucgugcgggaucugccucagggcuucucugcucuggaaccccugguggaucugcccaucggcaucaacaucacccgguuucagacacugcuggcccugcacagaagcuaccugacaccuggcgauagcagcagcggauggacagcuggugccgccgcuuacuaugugggcuaccugcagccuagaaccuuccugcugaaguacaacgagaacggcaccaucaccgacgccguggauugugcucuggauccucugagcgagacaaagugcacccugaaguccuucaccguggaaaagggcaucuaccagaccagcaacuuccgggugcagcccaccgaauccaucgugcgguuccccaauaucaccaaucugugccccuucggcgagguguucaaugccaccagauucgccucuguguacgccuggaaccggaagcggaucagcaauugcguggccgacuacuccgugcuguacaacuccgccagcuucagcaccuucaagugcuacggcguguccccuaccaagcugaacgaccugugcuucacaaacguguacgccgacagcuucgugauccggggagaugaagugcggcagauugccccuggacagacaggcaagaucgccgacuacaacuacaagcugcccgacgacuucaccggcugugugauugccuggaacagcaacaaccuggacuccaaagucggcggcaacuacaauuaccuguaccggcuguuccggaaguccaaucugaagcccuucgagcgggacaucuccaccgagaucuaucaggccggcagcaccccuuguaacggcguggaaggcuucaacugcuacuucccacugcaguccuacggcuuucagcccacaaauggcgugggcuaucagcccuacagagugguggugcugagcuucgaacugcugcaugccccugccacagugugcggcccuaagaaaagcaccaaucucgugaagaacaaaugcgugaacuucaacuucaacggccugaccggcaccggcgugcugacagagagcaacaagaaguuccugccauuccagcaguuuggccgggauaucgccgauaccacagacgccguuagagauccccagacacuggaaauccuggacaucaccccuugcagcuucggcggagugucugugaucaccccuggcaccaacaccagcaaucagguggcagugcuguaccagggcgugaacuguaccgaagugcccguggccauucacgccgaucagcugacaccuacauggcggguguacuccaccggcagcaauguguuucagaccagagccggcugucugaucggagccgagcacgugaacaauagcuacgagugcgacauccccaucggcgcuggaaucugcgccagcuaccagacacagacaaacagcccucggagagccagaagcguggccagccagagcgugauugccuacacaaugucucugggcgccgagaacagcguggccuacuccaacaacucuaucgcuauccccaccaacuucaccaucagcgugaccacagagauccugccuguguccaugaccaagaccagcguggacugcaccauguacaucugcggcgauuccaccgagugcuccaaccugcugcugcaguacggcagcuucugcacccagcugaauagagcccugacagggaucgccguggaacaggacaagaacacccaagagguguucgcccaagugaagcagaucuacaagaccccuccuaucaaggacuucggcggcuucaauuucagccagauucugcccgauccuagcaagcccagcaagcggagcuucaucgaggaccugcuguucaacaaagugacacuggccgacgccggcuucaucaagcaguauggcgauugucugggcgacauugccgccagggaucugauuugcgcccagaaguuuaacggacugacagugcugccuccucugcugaccgaugagaugaucgcccaguacacaucugcccugcuggccggcacaaucacaagcggcuggacauuuggagcaggcgccgcucugcagauccccuuugcuaugcagauggccuaccgguucaacggcaucggagugacccagaaugugcuguacgagaaccagaagcugaucgccaaccaguucaacagcgccaucggcaagauccaggacagccugagcagcacagcaagcgcccugggaaagcugcaggacguggucaaccagaaugcccaggcacugaacacccuggucaagcagcuguccuccaacuucggcgccaucagcucugugcugaacgauauccugagcagacuggacccuccugaggccgaggugcagaucgacagacugaucacaggcagacugcagagccuccagacauacgugacccagcagcugaucagagccgccgagauuagagccucugccaaucuggccgccaccaagaugucugagugugugcugggccagagcaagagaguggacuuuugcggcaagggcuaccaccugaugagcuucccucagucugccccucacggcgugguguuucugcacgugacauaugugcccgcucaagagaagaauuucaccaccgcuccagccaucugccacgacggcaaagcccacuuuccuagagaaggcguguucguguccaacggcacccauugguucgugacacagcggaacuucuacgagccccagaucaucaccaccgacaacaccuucgugucuggcaacugcgacgucgugaucggcauugugaacaauaccguguacgacccucugcagcccgagcuggacagcuucaaagaggaacuggacaaguacuuuaagaaccacacaagccccgacguggaccugggcgauaucagcggaaucaaugccagcgucgugaacauccagaaagagaucgaccggcugaacgagguggccaagaaucugaacgagagccugaucgaccugcaagaacuggggaaguacgagcaguacaucaaguggcccugguacaucuggcugggcuuuaucgccggacugauugccaucgugauggucacaaucaugcuguguugcaugaccagcugcuguagcugccugaagggcuguuguagcuguggcagcugcugcaaguucgacgaggacgauucugagcccgugcugaagggcgugaaacugcacuacacaugauaauaggcuggagccucgguggccuagcuucuugccccuugggccuccccccagccccuccuccccuuccugcacccguacccccguggucuuugaauaaagucugagugggcggcaaaaaaaaaaaaaaaaaaaaaaaaaaaaaaaaaaaaaaaaaaaaaaaaaaaaaaaaaaaaaaaaaaaaaaaaaaaaaaaaaaaaaaaaaaaaaaaaaaaaucuag

SEQ ID NO: 26696 - RNA, 4100 nt, Artificial Sequence
  SARS-CoV-2/Wuhan/WIV05/2019__EPI_ISL_402128 spike protein mRNA gc mod (1-1273)(K986P_V987P_D614G_M1229I)
gggaaauaagagagaaaagaagaguaagaagaaauauaagaccccggcgccgccaccauguucguguuccuggugcugcugccucugguguccagccagugugugaaccugaccaccagaacacagcugccuccagccuacaccaacagcuuuaccagaggcguguacuaccccgacaagguguucagauccagcgugcugcacucuacccaggaccuguuccugccuuucuucagcaacgugaccugguuccacgccauccacguguccggcaccaauggcaccaagagauucgacaaccccgugcugcccuucaacgacgggguguacuuugccagcaccgagaaguccaacaucaucagaggcuggaucuucggcaccacacuggacagcaagacccagagccugcugaucgugaacaacgccaccaacguggucaucaaagugugcgaguuccaguucugcaacgaccccuuccugggcgucuacuaccacaagaacaacaagagcuggauggaaagcgaguuccggguguacagcagcgccaacaacugcaccuucgaguacgugucccagccuuuccugauggaccuggaaggcaagcagggcaacuucaagaaccugcgcgaguucguguuuaagaacaucgacggcuacuucaagaucuacagcaagcacaccccuaucaaccucgugcgggaucugccucagggcuucucugcucuggaaccccugguggaucugcccaucggcaucaacaucacccgguuucagacacugcuggcccugcacagaagcuaccugacaccuggcgauagcagcagcggauggacagcuggugccgccgcuuacuaugugggcuaccugcagccuagaaccuuccugcugaaguacaacgagaacggcaccaucaccgacgccguggauugugcucuggauccucugagcgagacaaagugcacccugaaguccuucaccguggaaaagggcaucuaccagaccagcaacuuccgggugcagcccaccgaauccaucgugcgguuccccaauaucaccaaucugugccccuucggcgagguguucaaugccaccagauucgccucuguguacgccuggaaccggaagcggaucagcaauugcguggccgacuacuccgugcuguacaacuccgccagcuucagcaccuucaagugcuacggcguguccccuaccaagcugaacgaccugugcuucacaaacguguacgccgacagcuucgugauccggggagaugaagugcggcagauugccccuggacagacaggcaagaucgccgacuacaacuacaagcugcccgacgacuucaccggcugugugauugccuggaacagcaacaaccuggacuccaaagucggcggcaacuacaauuaccuguaccggcuguuccggaaguccaaucugaagcccuucgagcgggacaucuccaccgagaucuaucaggccggcagcaccccuuguaacggcguggaaggcuucaacugcuacuucccacugcaguccuacggcuuucagcccacaaauggcgugggcuaucagcccuacagagugguggugcugagcuucgaacugcugcaugccccugccacagugugcggcccuaagaaaagcaccaaucucgugaagaacaaaugcgugaacuucaacuucaacggccugaccggcaccggcgugcugacagagagcaacaagaaguuccugccauuccagcaguuuggccgggauaucgccgauaccacagacgccguuagagauccccagacacuggaaauccuggacaucaccccuugcagcuucggcggagugucugugaucaccccuggcaccaacaccagcaaucagguggcagugcuguaccagggcgugaacuguaccgaagugcccguggccauucacgccgaucagcugacaccuacauggcggguguacuccaccggcagcaauguguuucagaccagagccggcugucugaucggagccgagcacgugaacaauagcuacgagugcgacauccccaucggcgcuggaaucugcgccagcuaccagacacagacaaacagcccucggagagccagaagcguggccagccagagcaucauugccuacacaaugucucugggcgccgagaacagcguggccuacuccaacaacucuaucgcuauccccaccaacuucaccaucagcgugaccacagagauccugccuguguccaugaccaagaccagcguggacugcaccauguacaucugcggcgauuccaccgagugcuccaaccugcugcugcaguacggcagcuucugcacccagcugaauagagcccugacagggaucgccguggaacaggacaagaacacccaagagguguucgcccaagugaagcagaucuacaagaccccuccuaucaaggacuucggcggcuucaauuucagccagauucugcccgauccuagcaagcccagcaagcggagcuucaucgaggaccugcuguucaacaaagugacacuggccgacgccggcuucaucaagcaguauggcgauugucugggcgacauugccgccagggaucugauuugcgcccagaaguuuaacggacugacagugcugccuccucugcugaccgaugagaugaucgcccaguacacaucugcccugcuggccggcacaaucacaagcggcuggacauuuggagcaggcgccgcucugcagauccccuuugcuaugcagauggccuaccgguucaacggcaucggagugacccagaaugugcuguacgagaaccagaagcugaucgccaaccaguucaacagcgccaucggcaagauccaggacagccugagcagcacagcaagcgcccugggaaagcugcaggacguggucaaccagaaugcccaggcacugaacacccuggucaagcagcuguccuccaacuucggcgccaucagcucugugcugaacgauauccugagcagacuggacccuccugaggccgaggugcagaucgacagacugaucacaggcagacugcagagccuccagacauacgugacccagcagcugaucagagccgccgagauuagagccucugccaaucuggccgccaccaagaugucugagugugugcugggccagagcaagagaguggacuuuugcggcaagggcuaccaccugaugagcuucccucagucugccccucacggcgugguguuucugcacgugacauaugugcccgcucaagagaagaauuucaccaccgcuccagccaucugccacgacggcaaagcccacuuuccuagagaaggcguguucguguccaacggcacccauugguucgugacacagcggaacuucuacgagccccagaucaucaccaccgacaacaccuucgugucuggcaacugcgacgucgugaucggcauugugaacaauaccguguacgacccucugcagcccgagcuggacagcuucaaagaggaacuggacaaguacuuuaagaaccacacaagccccgacguggaccugggcgauaucagcggaaucaaugccagcgucgugaacauccagaaagagaucgaccggcugaacgagguggccaagaaucugaacgagagccugaucgaccugcaagaacuggggaaguacgagcaguacaucaaguggcccugguacaucuggcugggcuuuaucgccggacugauugccaucgugaucgucacaaucaugcuguguugcaugaccagcugcuguagcugccugaagggcuguuguagcuguggcagcugcugcaaguucgacgaggacgauucugagcccgugcugaagggcgugaaacugcacuacacaugauaauaggcuggagccucgguggccuagcuucuugccccuugggccuccccccagccccuccuccccuuccugcacccguacccccguggucuuugaauaaagucugagugggcggcaaaaaaaaaaaaaaaaaaaaaaaaaaaaaaaaaaaaaaaaaaaaaaaaaaaaaaaaaaaaaaaaaaaaaaaaaaaaaaaaaaaaaaaaaaaaaaaaaaaaucuag

SEQ ID NO: 26697 - RNA, 4094 nt, Artificial Sequence
  SARS-CoV-2/Wuhan/WIV05/2019__EPI_ISL_402128 spike protein mRNA gc mod (1-1273)(K986P_V987P_H69del_V70del_A222V_Y453F_S477N_D614G_I692V)
gggaaauaagagagaaaagaagaguaagaagaaauauaagaccccggcgccgccaccauguucguguuccuggugcugcugccucugguguccagccagugugugaaccugaccaccagaacacagcugccuccagccuacaccaacagcuuuaccagaggcguguacuaccccgacaagguguucagauccagcgugcugcacucuacccaggaccuguuccugccuuucuucagcaacgugaccugguuccacgccaucuccggcaccaauggcaccaagagauucgacaaccccgugcugcccuucaacgacgggguguacuuugccagcaccgagaaguccaacaucaucagaggcuggaucuucggcaccacacuggacagcaagacccagagccugcugaucgugaacaacgccaccaacguggucaucaaagugugcgaguuccaguucugcaacgaccccuuccugggcgucuacuaccacaagaacaacaagagcuggauggaaagcgaguuccggguguacagcagcgccaacaacugcaccuucgaguacgugucccagccuuuccugauggaccuggaaggcaagcagggcaacuucaagaaccugcgcgaguucguguuuaagaacaucgacggcuacuucaagaucuacagcaagcacaccccuaucaaccucgugcgggaucugccucagggcuucucugugcuggaaccccugguggaucugcccaucggcaucaacaucacccgguuucagacacugcuggcccugcacagaagcuaccugacaccuggcgauagcagcagcggauggacagcuggugccgccgcuuacuaugugggcuaccugcagccuagaaccuuccugcugaaguacaacgagaacggcaccaucaccgacgccguggauugugcucuggauccucugagcgagacaaagugcacccugaaguccuucaccguggaaaagggcaucuaccagaccagcaacuuccgggugcagcccaccgaauccaucgugcgguuccccaauaucaccaaucugugccccuucggcgagguguucaaugccaccagauucgccucuguguacgccuggaaccggaagcggaucagcaauugcguggccgacuacuccgugcuguacaacuccgccagcuucagcaccuucaagugcuacggcguguccccuaccaagcugaacgaccugugcuucacaaacguguacgccgacagcuucgugauccggggagaugaagugcggcagauugccccuggacagacaggcaagaucgccgacuacaacuacaagcugcccgacgacuucaccggcugugugauugccuggaacagcaacaaccuggacuccaaagucggcggcaacuacaauuaccuguuccggcuguuccggaaguccaaucugaagcccuucgagcgggacaucuccaccgagaucuaucaggccggcaacaccccuuguaacggcguggaaggcuucaacugcuacuucccacugcaguccuacggcuuucagcccacaaauggcgugggcuaucagcccuacagagugguggugcugagcuucgaacugcugcaugccccugccacagugugcggcccuaagaaaagcaccaaucucgugaagaacaaaugcgugaacuucaacuucaacggccugaccggcaccggcgugcugacagagagcaacaagaaguuccugccauuccagcaguuuggccgggauaucgccgauaccacagacgccguuagagauccccagacacuggaaauccuggacaucaccccuugcagcuucggcggagugucugugaucaccccuggcaccaacaccagcaaucagguggcagugcuguaccagggcgugaacuguaccgaagugcccguggccauucacgccgaucagcugacaccuacauggcggguguacuccaccggcagcaauguguuucagaccagagccggcugucugaucggagccgagcacgugaacaauagcuacgagugcgacauccccaucggcgcuggaaucugcgccagcuaccagacacagacaaacagcccucggagagccagaagcguggccagccagagcgugauugccuacacaaugucucugggcgccgagaacagcguggccuacuccaacaacucuaucgcuauccccaccaacuucaccaucagcgugaccacagagauccugccuguguccaugaccaagaccagcguggacugcaccauguacaucugcggcgauuccaccgagugcuccaaccugcugcugcaguacggcagcuucugcacccagcugaauagagcccugacagggaucgccguggaacaggacaagaacacccaagagguguucgcccaagugaagcagaucuacaagaccccuccuaucaaggacuucggcggcuucaauuucagccagauucugcccgauccuagcaagcccagcaagcggagcuucaucgaggaccugcuguucaacaaagugacacuggccgacgccggcuucaucaagcaguauggcgauugucugggcgacauugccgccagggaucugauuugcgcccagaaguuuaacggacugacagugcugccuccucugcugaccgaugagaugaucgcccaguacacaucugcccugcuggccggcacaaucacaagcggcuggacauuuggagcaggcgccgcucugcagauccccuuugcuaugcagauggccuaccgguucaacggcaucggagugacccagaaugugcuguacgagaaccagaagcugaucgccaaccaguucaacagcgccaucggcaagauccaggacagccugagcagcacagcaagcgcccugggaaagcugcaggacguggucaaccagaaugcccaggcacugaacacccuggucaagcagcuguccuccaacuucggcgccaucagcucugugcugaacgauauccugagcagacuggacccuccugaggccgaggugcagaucgacagacugaucacaggcagacugcagagccuccagacauacgugacccagcagcugaucagagccgccgagauuagagccucugccaaucuggccgccaccaagaugucugagugugugcugggccagagcaagagaguggacuuuugcggcaagggcuaccaccugaugagcuucccucagucugccccucacggcgugguguuucugcacgugacauaugugcccgcucaagagaagaauuucaccaccgcuccagccaucugccacgacggcaaagcccacuuuccuagagaaggcguguucguguccaacggcacccauugguucgugacacagcggaacuucuacgagccccagaucaucaccaccgacaacaccuucgugucuggcaacugcgacgucgugaucggcauugugaacaauaccguguacgacccucugcagcccgagcuggacagcuucaaagaggaacuggacaaguacuuuaagaaccacacaagccccgacguggaccugggcgauaucagcggaaucaaugccagcgucgugaacauccagaaagagaucgaccggcugaacgagguggccaagaaucugaacgagagccugaucgaccugcaagaacuggggaaguacgagcaguacaucaaguggcccugguacaucuggcugggcuuuaucgccggacugauugccaucgugauggucacaaucaugcuguguugcaugaccagcugcuguagcugccugaagggcuguuguagcuguggcagcugcugcaaguucgacgaggacgauucugagcccgugcugaagggcgugaaacugcacuacacaugauaauaggcuggagccucgguggccuagcuucuugccccuugggccuccccccagccccuccuccccuuccugcacccguacccccguggucuuugaauaaagucugagugggcggcaaaaaaaaaaaaaaaaaaaaaaaaaaaaaaaaaaaaaaaaaaaaaaaaaaaaaaaaaaaaaaaaaaaaaaaaaaaaaaaaaaaaaaaaaaaaaaaaaaaaucuag

SEQ ID NO: 26698 - RNA, 4094 nt, Artificial Sequence
  SARS-CoV-2/Wuhan/WIV05/2019__EPI_ISL_402128 spike protein mRNA gc mod (1-1273)(K986P_V987P_H69del_V70del_Y453F_D614G_I692V_M1229I)
gggaaauaagagagaaaagaagaguaagaagaaauauaagaccccggcgccgccaccauguucguguuccuggugcugcugccucugguguccagccagugugugaaccugaccaccagaacacagcugccuccagccuacaccaacagcuuuaccagaggcguguacuaccccgacaagguguucagauccagcgugcugcacucuacccaggaccuguuccugccuuucuucagcaacgugaccugguuccacgccaucuccggcaccaauggcaccaagagauucgacaaccccgugcugcccuucaacgacgggguguacuuugccagcaccgagaaguccaacaucaucagaggcuggaucuucggcaccacacuggacagcaagacccagagccugcugaucgugaacaacgccaccaacguggucaucaaagugugcgaguuccaguucugcaacgaccccuuccugggcgucuacuaccacaagaacaacaagagcuggauggaaagcgaguuccggguguacagcagcgccaacaacugcaccuucgaguacgugucccagccuuuccugauggaccuggaaggcaagcagggcaacuucaagaaccugcgcgaguucguguuuaagaacaucgacggcuacuucaagaucuacagcaagcacaccccuaucaaccucgugcgggaucugccucagggcuucucugcucuggaaccccugguggaucugcccaucggcaucaacaucacccgguuucagacacugcuggcccugcacagaagcuaccugacaccuggcgauagcagcagcggauggacagcuggugccgccgcuuacuaugugggcuaccugcagccuagaaccuuccugcugaaguacaacgagaacggcaccaucaccgacgccguggauugugcucuggauccucugagcgagacaaagugcacccugaaguccuucaccguggaaaagggcaucuaccagaccagcaacuuccgggugcagcccaccgaauccaucgugcgguuccccaauaucaccaaucugugccccuucggcgagguguucaaugccaccagauucgccucuguguacgccuggaaccggaagcggaucagcaauugcguggccgacuacuccgugcuguacaacuccgccagcuucagcaccuucaagugcuacggcguguccccuaccaagcugaacgaccugugcuucacaaacguguacgccgacagcuucgugauccggggagaugaagugcggcagauugccccuggacagacaggcaagaucgccgacuacaacuacaagcugcccgacgacuucaccggcugugugauugccuggaacagcaacaaccuggacuccaaagucggcggcaacuacaauuaccuguuccggcuguuccggaaguccaaucugaagcccuucgagcgggacaucuccaccgagaucuaucaggccggcagcaccccuuguaacggcguggaaggcuucaacugcuacuucccacugcaguccuacggcuuucagcccacaaauggcgugggcuaucagcccuacagagugguggugcugagcuucgaacugcugcaugccccugccacagugugcggcccuaagaaaagcaccaaucucgugaagaacaaaugcgugaacuucaacuucaacggccugaccggcaccggcgugcugacagagagcaacaagaaguuccugccauuccagcaguuuggccgggauaucgccgauaccacagacgccguuagagauccccagacacuggaaauccuggacaucaccccuugcagcuucggcggagugucugugaucaccccuggcaccaacaccagcaaucagguggcagugcuguaccagggcgugaacuguaccgaagugcccguggccauucacgccgaucagcugacaccuacauggcggguguacuccaccggcagcaauguguuucagaccagagccggcugucugaucggagccgagcacgugaacaauagcuacgagugcgacauccccaucggcgcuggaaucugcgccagcuaccagacacagacaaacagcccucggagagccagaagcguggccagccagagcgugauugccuacacaaugucucugggcgccgagaacagcguggccuacuccaacaacucuaucgcuauccccaccaacuucaccaucagcgugaccacagagauccugccuguguccaugaccaagaccagcguggacugcaccauguacaucugcggcgauuccaccgagugcuccaaccugcugcugcaguacggcagcuucugcacccagcugaauagagcccugacagggaucgccguggaacaggacaagaacacccaagagguguucgcccaagugaagcagaucuacaagaccccuccuaucaaggacuucggcggcuucaauuucagccagauucugcccgauccuagcaagcccagcaagcggagcuucaucgaggaccugcuguucaacaaagugacacuggccgacgccggcuucaucaagcaguauggcgauugucugggcgacauugccgccagggaucugauuugcgcccagaaguuuaacggacugacagugcugccuccucugcugaccgaugagaugaucgcccaguacacaucugcccugcuggccggcacaaucacaagcggcuggacauuuggagcaggcgccgcucugcagauccccuuugcuaugcagauggccuaccgguucaacggcaucggagugacccagaaugugcuguacgagaaccagaagcugaucgccaaccaguucaacagcgccaucggcaagauccaggacagccugagcagcacagcaagcgcccugggaaagcugcaggacguggucaaccagaaugcccaggcacugaacacccuggucaagcagcuguccuccaacuucggcgccaucagcucugugcugaacgauauccugagcagacuggacccuccugaggccgaggugcagaucgacagacugaucacaggcagacugcagagccuccagacauacgugacccagcagcugaucagagccgccgagauuagagccucugccaaucuggccgccaccaagaugucugagugugugcugggccagagcaagagaguggacuuuugcggcaagggcuaccaccugaugagcuucccucagucugccccucacggcgugguguuucugcacgugacauaugugcccgcucaagagaagaauuucaccaccgcuccagccaucugccacgacggcaaagcccacuuuccuagagaaggcguguucguguccaacggcacccauugguucgugacacagcggaacuucuacgagccccagaucaucaccaccgacaacaccuucgugucuggcaacugcgacgucgugaucggcauugugaacaauaccguguacgacccucugcagcccgagcuggacagcuucaaagaggaacuggacaaguacuuuaagaaccacacaagccccgacguggaccugggcgauaucagcggaaucaaugccagcgucgugaacauccagaaagagaucgaccggcugaacgagguggccaagaaucugaacgagagccugaucgaccugcaagaacuggggaaguacgagcaguacaucaaguggcccugguacaucuggcugggcuuuaucgccggacugauugccaucgugaucgucacaaucaugcuguguugcaugaccagcugcuguagcugccugaagggcuguuguagcuguggcagcugcugcaaguucgacgaggacgauucugagcccgugcugaagggcgugaaacugcacuacacaugauaauaggcuggagccucgguggccuagcuucuugccccuugggccuccccccagccccuccuccccuuccugcacccguacccccguggucuuugaauaaagucugagugggcggcaaaaaaaaaaaaaaaaaaaaaaaaaaaaaaaaaaaaaaaaaaaaaaaaaaaaaaaaaaaaaaaaaaaaaaaaaaaaaaaaaaaaaaaaaaaaaaaaaaaaucuag

SEQ ID NO: 26699 - RNA, 4091 nt, Artificial Sequence
  SARS-CoV-2/Wuhan/WIV05/2019__EPI_ISL_402128 spike protein mRNA gc mod (1-1273)(K986P_V987P_K986P_V987P_H69del_V70del_Y144del_N501Y_A570 D_D614G_P681H_T716I_S982A_D1118H)
gggaaauaagagagaaaagaagaguaagaagaaauauaagaccccggcgccgccaccauguucguguuccuggugcugcugccucugguguccagccagugugugaaccugaccaccagaacacagcugccuccagccuacaccaacagcuuuaccagaggcguguacuaccccgacaagguguucagauccagcgugcugcacucuacccaggaccuguuccugccuuucuucagcaacgugaccugguuccacgccaucuccggcaccaauggcaccaagagauucgacaaccccgugcugcccuucaacgacgggguguacuuugccagcaccgagaaguccaacaucaucagaggcuggaucuucggcaccacacuggacagcaagacccagagccugcugaucgugaacaacgccaccaacguggucaucaaagugugcgaguuccaguucugcaacgaccccuuccugggcgucuaccacaagaacaacaagagcuggauggaaagcgaguuccggguguacagcagcgccaacaacugcaccuucgaguacgugucccagccuuuccugauggaccuggaaggcaagcagggcaacuucaagaaccugcgcgaguucguguuuaagaacaucgacggcuacuucaagaucuacagcaagcacaccccuaucaaccucgugcgggaucugccucagggcuucucugcucuggaaccccugguggaucugcccaucggcaucaacaucacccgguuucagacacugcuggcccugcacagaagcuaccugacaccuggcgauagcagcagcggauggacagcuggugccgccgcuuacuaugugggcuaccugcagccuagaaccuuccugcugaaguacaacgagaacggcaccaucaccgacgccguggauugugcucuggauccucugagcgagacaaagugcacccugaaguccuucaccguggaaaagggcaucuaccagaccagcaacuuccgggugcagcccaccgaauccaucgugcgguuccccaauaucaccaaucugugccccuucggcgagguguucaaugccaccagauucgccucuguguacgccuggaaccggaagcggaucagcaauugcguggccgacuacuccgugcuguacaacuccgccagcuucagcaccuucaagugcuacggcguguccccuaccaagcugaacgaccugugcuucacaaacguguacgccgacagcuucgugauccggggagaugaagugcggcagauugccccuggacagacaggcaagaucgccgacuacaacuacaagcugcccgacgacuucaccggcugugugauugccuggaacagcaacaaccuggacuccaaagucggcggcaacuacaauuaccuguaccggcuguuccggaaguccaaucugaagcccuucgagcgggacaucuccaccgagaucuaucaggccggcagcaccccuuguaacggcguggaaggcuucaacugcuacuucccacugcaguccuacggcuuucagcccacauacggcgugggcuaucagcccuacagagugguggugcugagcuucgaacugcugcaugccccugccacagugugcggcccuaagaaaagcaccaaucucgugaagaacaaaugcgugaacuucaacuucaacggccugaccggcaccggcgugcugacagagagcaacaagaaguuccugccauuccagcaguuuggccgggauaucgacgauaccacagacgccguuagagauccccagacacuggaaauccuggacaucaccccuugcagcuucggcggagugucugugaucaccccuggcaccaacaccagcaaucagguggcagugcuguaccagggcgugaacuguaccgaagugcccguggccauucacgccgaucagcugacaccuacauggcggguguacuccaccggcagcaauguguuucagaccagagccggcugucugaucggagccgagcacgugaacaauagcuacgagugcgacauccccaucggcgcuggaaucugcgccagcuaccagacacagacaaacagccaccggagagccagaagcguggccagccagagcaucauugccuacacaaugucucugggcgccgagaacagcguggccuacuccaacaacucuaucgcuauccccaucaacuucaccaucagcgugaccacagagauccugccuguguccaugaccaagaccagcguggacugcaccauguacaucugcggcgauuccaccgagugcuccaaccugcugcugcaguacggcagcuucugcacccagcugaauagagcccugacagggaucgccguggaacaggacaagaacacccaagagguguucgcccaagugaagcagaucuacaagaccccuccuaucaaggacuucggcggcuucaauuucagccagauucugcccgauccuagcaagcccagcaagcggagcuucaucgaggaccugcuguucaacaaagugacacuggccgacgccggcuucaucaagcaguauggcgauugucugggcgacauugccgccagggaucugauuugcgcccagaaguuuaacggacugacagugcugccuccucugcugaccgaugagaugaucgcccaguacacaucugcccugcuggccggcacaaucacaagcggcuggacauuuggagcaggcgccgcucugcagauccccuuugcuaugcagauggccuaccgguucaacggcaucggagugacccagaaugugcuguacgagaaccagaagcugaucgccaaccaguucaacagcgccaucggcaagauccaggacagccugagcagcacagcaagcgcccugggaaagcugcaggacguggucaaccagaaugcccaggcacugaacacccuggucaagcagcuguccuccaacuucggcgccaucagcucugugcugaacgauauccuggccagacuggacccuccugaggccgaggugcagaucgacagacugaucacaggcagacugcagagccuccagacauacgugacccagcagcugaucagagccgccgagauuagagccucugccaaucuggccgccaccaagaugucugagugugugcugggccagagcaagagaguggacuuuugcggcaagggcuaccaccugaugagcuucccucagucugccccucacggcgugguguuucugcacgugacauaugugcccgcucaagagaagaauuucaccaccgcuccagccaucugccacgacggcaaagcccacuuuccuagagaaggcguguucguguccaacggcacccauugguucgugacacagcggaacuucuacgagccccagaucaucaccacccacaacaccuucgugucuggcaacugcgacgucgugaucggcauugugaacaauaccguguacgacccucugcagcccgagcuggacagcuucaaagaggaacuggacaaguacuuuaagaaccacacaagccccgacguggaccugggcgauaucagcggaaucaaugccagcgucgugaacauccagaaagagaucgaccggcugaacgagguggccaagaaucugaacgagagccugaucgaccugcaagaacuggggaaguacgagcaguacaucaaguggcccugguacaucuggcugggcuuuaucgccggacugauugccaucgugauggucacaaucaugcuguguugcaugaccagcugcuguagcugccugaagggcuguuguagcuguggcagcugcugcaaguucgacgaggacgauucugagcccgugcugaagggcgugaaacugcacuacacaugauaauaggcuggagccucgguggccuagcuucuugccccuugggccuccccccagccccuccuccccuuccugcacccguacccccguggucuuugaauaaagucugagugggcggcaaaaaaaaaaaaaaaaaaaaaaaaaaaaaaaaaaaaaaaaaaaaaaaaaaaaaaaaaaaaaaaaaaaaaaaaaaaaaaaaaaaaaaaaaaaaaaaaaaaaucuag

SEQ ID NO: 26700 - RNA, 4100 nt, Artificial Sequence
  SARS-CoV-2/Wuhan/WIV05/2019__EPI_ISL_402128 spike protein mRNA gc mod (1-1273)(K986P_V987P_K986P_V987P_K417N_E484K_N501Y_D614G)
gggaaauaagagagaaaagaagaguaagaagaaauauaagaccccggcgccgccaccauguucguguuccuggugcugcugccucugguguccagccagugugugaaccugaccaccagaacacagcugccuccagccuacaccaacagcuuuaccagaggcguguacuaccccgacaagguguucagauccagcgugcugcacucuacccaggaccuguuccugccuuucuucagcaacgugaccugguuccacgccauccacguguccggcaccaauggcaccaagagauucgacaaccccgugcugcccuucaacgacgggguguacuuugccagcaccgagaaguccaacaucaucagaggcuggaucuucggcaccacacuggacagcaagacccagagccugcugaucgugaacaacgccaccaacguggucaucaaagugugcgaguuccaguucugcaacgaccccuuccugggcgucuacuaccacaagaacaacaagagcuggauggaaagcgaguuccggguguacagcagcgccaacaacugcaccuucgaguacgugucccagccuuuccugauggaccuggaaggcaagcagggcaacuucaagaaccugcgcgaguucguguuuaagaacaucgacggcuacuucaagaucuacagcaagcacaccccuaucaaccucgugcgggaucugccucagggcuucucugcucuggaaccccugguggaucugcccaucggcaucaacaucacccgguuucagacacugcuggcccugcacagaagcuaccugacaccuggcgauagcagcagcggauggacagcuggugccgccgcuuacuaugugggcuaccugcagccuagaaccuuccugcugaaguacaacgagaacggcaccaucaccgacgccguggauugugcucuggauccucugagcgagacaaagugcacccugaaguccuucaccguggaaaagggcaucuaccagaccagcaacuuccgggugcagcccaccgaauccaucgugcgguuccccaauaucaccaaucugugccccuucggcgagguguucaaugccaccagauucgccucuguguacgccuggaaccggaagcggaucagcaauugcguggccgacuacuccgugcuguacaacuccgccagcuucagcaccuucaagugcuacggcguguccccuaccaagcugaacgaccugugcuucacaaacguguacgccgacagcuucgugauccggggagaugaagugcggcagauugccccuggacagacaggcaacaucgccgacuacaacuacaagcugcccgacgacuucaccggcugugugauugccuggaacagcaacaaccuggacuccaaagucggcggcaacuacaauuaccuguaccggcuguuccggaaguccaaucugaagcccuucgagcgggacaucuccaccgagaucuaucaggccggcagcaccccuuguaacggcgugaagggcuucaacugcuacuucccacugcaguccuacggcuuucagcccacauacggcgugggcuaucagcccuacagagugguggugcugagcuucgaacugcugcaugccccugccacagugugcggcccuaagaaaagcaccaaucucgugaagaacaaaugcgugaacuucaacuucaacggccugaccggcaccggcgugcugacagagagcaacaagaaguuccugccauuccagcaguuuggccgggauaucgccgauaccacagacgccguuagagauccccagacacuggaaauccuggacaucaccccuugcagcuucggcggagugucugugaucaccccuggcaccaacaccagcaaucagguggcagugcuguaccagggcgugaacuguaccgaagugcccguggccauucacgccgaucagcugacaccuacauggcggguguacuccaccggcagcaauguguuucagaccagagccggcugucugaucggagccgagcacgugaacaauagcuacgagugcgacauccccaucggcgcuggaaucugcgccagcuaccagacacagacaaacagcccucggagagccagaagcguggccagccagagcaucauugccuacacaaugucucugggcgccgagaacagcguggccuacuccaacaacucuaucgcuauccccaccaacuucaccaucagcgugaccacagagauccugccuguguccaugaccaagaccagcguggacugcaccauguacaucugcggcgauuccaccgagugcuccaaccugcugcugcaguacggcagcuucugcacccagcugaauagagcccugacagggaucgccguggaacaggacaagaacacccaagagguguucgcccaagugaagcagaucuacaagaccccuccuaucaaggacuucggcggcuucaauuucagccagauucugcccgauccuagcaagcccagcaagcggagcuucaucgaggaccugcuguucaacaaagugacacuggccgacgccggcuucaucaagcaguauggcgauugucugggcgacauugccgccagggaucugauuugcgcccagaaguuuaacggacugacagugcugccuccucugcugaccgaugagaugaucgcccaguacacaucugcccugcuggccggcacaaucacaagcggcuggacauuuggagcaggcgccgcucugcagauccccuuugcuaugcagauggccuaccgguucaacggcaucggagugacccagaaugugcuguacgagaaccagaagcugaucgccaaccaguucaacagcgccaucggcaagauccaggacagccugagcagcacagcaagcgcccugggaaagcugcaggacguggucaaccagaaugcccaggcacugaacacccuggucaagcagcuguccuccaacuucggcgccaucagcucugugcugaacgauauccugagcagacuggacccuccugaggccgaggugcagaucgacagacugaucacaggcagacugcagagccuccagacauacgugacccagcagcugaucagagccgccgagauuagagccucugccaaucuggccgccaccaagaugucugagugugugcugggccagagcaagagaguggacuuuugcggcaagggcuaccaccugaugagcuucccucagucugccccucacggcgugguguuucugcacgugacauaugugcccgcucaagagaagaauuucaccaccgcuccagccaucugccacgacggcaaagcccacuuuccuagagaaggcguguucguguccaacggcacccauugguucgugacacagcggaacuucuacgagccccagaucaucaccaccgacaacaccuucgugucuggcaacugcgacgucgugaucggcauugugaacaauaccguguacgacccucugcagcccgagcuggacagcuucaaagaggaacuggacaaguacuuuaagaaccacacaagccccgacguggaccugggcgauaucagcggaaucaaugccagcgucgugaacauccagaaagagaucgaccggcugaacgagguggccaagaaucugaacgagagccugaucgaccugcaagaacuggggaaguacgagcaguacaucaaguggcccugguacaucuggcugggcuuuaucgccggacugauugccaucgugauggucacaaucaugcuguguugcaugaccagcugcuguagcugccugaagggcuguuguagcuguggcagcugcugcaaguucgacgaggacgauucugagcccgugcugaagggcgugaaacugcacuacacaugauaauaggcuggagccucgguggccuagcuucuugccccuugggccuccccccagccccuccuccccuuccugcacccguacccccguggucuuugaauaaagucugagugggcggcaaaaaaaaaaaaaaaaaaaaaaaaaaaaaaaaaaaaaaaaaaaaaaaaaaaaaaaaaaaaaaaaaaaaaaaaaaaaaaaaaaaaaaaaaaaaaaaaaaaaucuag

SEQ ID NO: 26701 - RNA, 4091 nt, Artificial Sequence
  SARS-CoV-2/Wuhan/WIV05/2019__EPI_ISL_402128 spike protein mRNA gc mod (1-1273)(K986P_V987P_K986P_V987P_L18F_D80A_D215G_L242del_A243del_ L244del_R246I_K417N_E484K_N501Y_D614G_A701V)
gggaaauaagagagaaaagaagaguaagaagaaauauaagaccccggcgccgccaccauguucguguuccuggugcugcugccucugguguccagccagugugugaacuucaccaccagaacacagcugccuccagccuacaccaacagcuuuaccagaggcguguacuaccccgacaagguguucagauccagcgugcugcacucuacccaggaccuguuccugccuuucuucagcaacgugaccugguuccacgccauccacguguccggcaccaauggcaccaagagauucgccaaccccgugcugcccuucaacgacgggguguacuuugccagcaccgagaaguccaacaucaucagaggcuggaucuucggcaccacacuggacagcaagacccagagccugcugaucgugaacaacgccaccaacguggucaucaaagugugcgaguuccaguucugcaacgaccccuuccugggcgucuacuaccacaagaacaacaagagcuggauggaaagcgaguuccggguguacagcagcgccaacaacugcaccuucgaguacgugucccagccuuuccugauggaccuggaaggcaagcagggcaacuucaagaaccugcgcgaguucguguuuaagaacaucgacggcuacuucaagaucuacagcaagcacaccccuaucaaccucgugcggggccugccucagggcuucucugcucuggaaccccugguggaucugcccaucggcaucaacaucacccgguuucagacacugcacaucagcuaccugacaccuggcgauagcagcagcggauggacagcuggugccgccgcuuacuaugugggcuaccugcagccuagaaccuuccugcugaaguacaacgagaacggcaccaucaccgacgccguggauugugcucuggauccucugagcgagacaaagugcacccugaaguccuucaccguggaaaagggcaucuaccagaccagcaacuuccgggugcagcccaccgaauccaucgugcgguuccccaauaucaccaaucugugccccuucggcgagguguucaaugccaccagauucgccucuguguacgccuggaaccggaagcggaucagcaauugcguggccgacuacuccgugcuguacaacuccgccagcuucagcaccuucaagugcuacggcguguccccuaccaagcugaacgaccugugcuucacaaacguguacgccgacagcuucgugauccggggagaugaagugcggcagauugccccuggacagacaggcaacaucgccgacuacaacuacaagcugcccgacgacuucaccggcugugugauugccuggaacagcaacaaccuggacuccaaagucggcggcaacuacaauuaccuguaccggcuguuccggaaguccaaucugaagcccuucgagcgggacaucuccaccgagaucuaucaggccggcagcaccccuuguaacggcgugaagggcuucaacugcuacuucccacugcaguccuacggcuuucagcccacauacggcgugggcuaucagcccuacagagugguggugcugagcuucgaacugcugcaugccccugccacagugugcggcccuaagaaaagcaccaaucucgugaagaacaaaugcgugaacuucaacuucaacggccugaccggcaccggcgugcugacagagagcaacaagaaguuccugccauuccagcaguuuggccgggauaucgccgauaccacagacgccguuagagauccccagacacuggaaauccuggacaucaccccuugcagcuucggcggagugucugugaucaccccuggcaccaacaccagcaaucagguggcagugcuguaccagggcgugaacuguaccgaagugcccguggccauucacgccgaucagcugacaccuacauggcggguguacuccaccggcagcaauguguuucagaccagagccggcugucugaucggagccgagcacgugaacaauagcuacgagugcgacauccccaucggcgcuggaaucugcgccagcuaccagacacagacaaacagcccucggagagccagaagcguggccagccagagcaucauugccuacacaaugucucugggcguggagaacagcguggccuacuccaacaacucuaucgcuauccccaccaacuucaccaucagcgugaccacagagauccugccuguguccaugaccaagaccagcguggacugcaccauguacaucugcggcgauuccaccgagugcuccaaccugcugcugcaguacggcagcuucugcacccagcugaauagagcccugacagggaucgccguggaacaggacaagaacacccaagagguguucgcccaagugaagcagaucuacaagaccccuccuaucaaggacuucggcggcuucaauuucagccagauucugcccgauccuagcaagcccagcaagcggagcuucaucgaggaccugcuguucaacaaagugacacuggccgacgccggcuucaucaagcaguauggcgauugucugggcgacauugccgccagggaucugauuugcgcccagaaguuuaacggacugacagugcugccuccucugcugaccgaugagaugaucgcccaguacacaucugcccugcuggccggcacaaucacaagcggcuggacauuuggagcaggcgccgcucugcagauccccuuugcuaugcagauggccuaccgguucaacggcaucggagugacccagaaugugcuguacgagaaccagaagcugaucgccaaccaguucaacagcgccaucggcaagauccaggacagccugagcagcacagcaagcgcccugggaaagcugcaggacguggucaaccagaaugcccaggcacugaacacccuggucaagcagcuguccuccaacuucggcgccaucagcucugugcugaacgauauccugagcagacuggacccuccugaggccgaggugcagaucgacagacugaucacaggcagacugcagagccuccagacauacgugacccagcagcugaucagagccgccgagauuagagccucugccaaucuggccgccaccaagaugucugagugugugcugggccagagcaagagaguggacuuuugcggcaagggcuaccaccugaugagcuucccucagucugccccucacggcgugguguuucugcacgugacauaugugcccgcucaagagaagaauuucaccaccgcuccagccaucugccacgacggcaaagcccacuuuccuagagaaggcguguucguguccaacggcacccauugguucgugacacagcggaacuucuacgagccccagaucaucaccaccgacaacaccuucgugucuggcaacugcgacgucgugaucggcauugugaacaauaccguguacgacccucugcagcccgagcuggacagcuucaaagaggaacuggacaaguacuuuaagaaccacacaagccccgacguggaccugggcgauaucagcggaaucaaugccagcgucgugaacauccagaaagagaucgaccggcugaacgagguggccaagaaucugaacgagagccugaucgaccugcaagaacuggggaaguacgagcaguacaucaaguggcccugguacaucuggcugggcuuuaucgccggacugauugccaucgugauggucacaaucaugcuguguugcaugaccagcugcuguagcugccugaagggcuguuguagcuguggcagcugcugcaaguucgacgaggacgauucugagcccgugcugaagggcgugaaacugcacuacacaugauaauaggcuggagccucgguggccuagcuucuugccccuugggccuccccccagccccuccuccccuuccugcacccguacccccguggucuuugaauaaagucugagugggcggcaaaaaaaaaaaaaaaaaaaaaaaaaaaaaaaaaaaaaaaaaaaaaaaaaaaaaaaaaaaaaaaaaaaaaaaaaaaaaaaaaaaaaaaaaaaaaaaaaaaaucuag

SEQ ID NO: 26702 - RNA, 4100 nt, Artificial Sequence
  SARS-CoV-2/Wuhan/WIV05/2019__EPI_ISL_402128 spike protein mRNA gc mod (1-1273)(K986P_V987P_K986P_V987P_E484K_D614G)
gggaaauaagagagaaaagaagaguaagaagaaauauaagaccccggcgccgccaccauguucguguuccuggugcugcugccucugguguccagccagugugugaaccugaccaccagaacacagcugccuccagccuacaccaacagcuuuaccagaggcguguacuaccccgacaagguguucagauccagcgugcugcacucuacccaggaccuguuccugccuuucuucagcaacgugaccugguuccacgccauccacguguccggcaccaauggcaccaagagauucgacaaccccgugcugcccuucaacgacgggguguacuuugccagcaccgagaaguccaacaucaucagaggcuggaucuucggcaccacacuggacagcaagacccagagccugcugaucgugaacaacgccaccaacguggucaucaaagugugcgaguuccaguucugcaacgaccccuuccugggcgucuacuaccacaagaacaacaagagcuggauggaaagcgaguuccggguguacagcagcgccaacaacugcaccuucgaguacgugucccagccuuuccugauggaccuggaaggcaagcagggcaacuucaagaaccugcgcgaguucguguuuaagaacaucgacggcuacuucaagaucuacagcaagcacaccccuaucaaccucgugcgggaucugccucagggcuucucugcucuggaaccccugguggaucugcccaucggcaucaacaucacccgguuucagacacugcuggcccugcacagaagcuaccugacaccuggcgauagcagcagcggauggacagcuggugccgccgcuuacuaugugggcuaccugcagccuagaaccuuccugcugaaguacaacgagaacggcaccaucaccgacgccguggauugugcucuggauccucugagcgagacaaagugcacccugaaguccuucaccguggaaaagggcaucuaccagaccagcaacuuccgggugcagcccaccgaauccaucgugcgguuccccaauaucaccaaucugugccccuucggcgagguguucaaugccaccagauucgccucuguguacgccuggaaccggaagcggaucagcaauugcguggccgacuacuccgugcuguacaacuccgccagcuucagcaccuucaagugcuacggcguguccccuaccaagcugaacgaccugugcuucacaaacguguacgccgacagcuucgugauccggggagaugaagugcggcagauugccccuggacagacaggcaagaucgccgacuacaacuacaagcugcccgacgacuucaccggcugugugauugccuggaacagcaacaaccuggacuccaaagucggcggcaacuacaauuaccuguaccggcuguuccggaaguccaaucugaagcccuucgagcgggacaucuccaccgagaucuaucaggccggcagcaccccuuguaacggcgugaagggcuucaacugcuacuucccacugcaguccuacggcuuucagcccacaaauggcgugggcuaucagcccuacagagugguggugcugagcuucgaacugcugcaugccccugccacagugugcggcccuaagaaaagcaccaaucucgugaagaacaaaugcgugaacuucaacuucaacggccugaccggcaccggcgugcugacagagagcaacaagaaguuccugccauuccagcaguuuggccgggauaucgccgauaccacagacgccguuagagauccccagacacuggaaauccuggacaucaccccuugcagcuucggcggagugucugugaucaccccuggcaccaacaccagcaaucagguggcagugcuguaccagggcgugaacuguaccgaagugcccguggccauucacgccgaucagcugacaccuacauggcggguguacuccaccggcagcaauguguuucagaccagagccggcugucugaucggagccgagcacgugaacaauagcuacgagugcgacauccccaucggcgcuggaaucugcgccagcuaccagacacagacaaacagcccucggagagccagaagcguggccagccagagcaucauugccuacacaaugucucugggcgccgagaacagcguggccuacuccaacaacucuaucgcuauccccaccaacuucaccaucagcgugaccacagagauccugccuguguccaugaccaagaccagcguggacugcaccauguacaucugcggcgauuccaccgagugcuccaaccugcugcugcaguacggcagcuucugcacccagcugaauagagcccugacagggaucgccguggaacaggacaagaacacccaagagguguucgcccaagugaagcagaucuacaagaccccuccuaucaaggacuucggcggcuucaauuucagccagauucugcccgauccuagcaagcccagcaagcggagcuucaucgaggaccugcuguucaacaaagugacacuggccgacgccggcuucaucaagcaguauggcgauugucugggcgacauugccgccagggaucugauuugcgcccagaaguuuaacggacugacagugcugccuccucugcugaccgaugagaugaucgcccaguacacaucugcccugcuggccggcacaaucacaagcggcuggacauuuggagcaggcgccgcucugcagauccccuuugcuaugcagauggccuaccgguucaacggcaucggagugacccagaaugugcuguacgagaaccagaagcugaucgccaaccaguucaacagcgccaucggcaagauccaggacagccugagcagcacagcaagcgcccugggaaagcugcaggacguggucaaccagaaugcccaggcacugaacacccuggucaagcagcuguccuccaacuucggcgccaucagcucugugcugaacgauauccugagcagacuggacccuccugaggccgaggugcagaucgacagacugaucacaggcagacugcagagccuccagacauacgugacccagcagcugaucagagccgccgagauuagagccucugccaaucuggccgccaccaagaugucugagugugugcugggccagagcaagagaguggacuuuugcggcaagggcuaccaccugaugagcuucccucagucugccccucacggcgugguguuucugcacgugacauaugugcccgcucaagagaagaauuucaccaccgcuccagccaucugccacgacggcaaagcccacuuuccuagagaaggcguguucguguccaacggcacccauugguucgugacacagcggaacuucuacgagccccagaucaucaccaccgacaacaccuucgugucuggcaacugcgacgucgugaucggcauugugaacaauaccguguacgacccucugcagcccgagcuggacagcuucaaagaggaacuggacaaguacuuuaagaaccacacaagccccgacguggaccugggcgauaucagcggaaucaaugccagcgucgugaacauccagaaagagaucgaccggcugaacgagguggccaagaaucugaacgagagccugaucgaccugcaagaacuggggaaguacgagcaguacaucaaguggcccugguacaucuggcugggcuuuaucgccggacugauugccaucgugauggucacaaucaugcuguguugcaugaccagcugcuguagcugccugaagggcuguuguagcuguggcagcugcugcaaguucgacgaggacgauucugagcccgugcugaagggcgugaaacugcacuacacaugauaauaggcuggagccucgguggccuagcuucuugccccuugggccuccccccagccccuccuccccuuccugcacccguacccccguggucuuugaauaaagucugagugggcggcaaaaaaaaaaaaaaaaaaaaaaaaaaaaaaaaaaaaaaaaaaaaaaaaaaaaaaaaaaaaaaaaaaaaaaaaaaaaaaaaaaaaaaaaaaaaaaaaaaaaucuag

SEQ ID NO: 26703 - RNA, 4100 nt, Artificial Sequence
  SARS-CoV-2/Wuhan/WIV05/2019__EPI_ISL_402128 spike protein mRNA gc mod (1-1273)(K986P_V987P_K986P_V987P_L18F_T20N_P26S_D138Y_R190S_K417T _E484K_N501Y_D614G_H655Y_T1027I)
gggaaauaagagagaaaagaagaguaagaagaaauauaagaccccggcgccgccaccauguucguguuccuggugcugcugccucugguguccagccagugugugaacuucaccaacagaacacagcugccuagcgccuacaccaacagcuuuaccagaggcguguacuaccccgacaagguguucagauccagcgugcugcacucuacccaggaccuguuccugccuuucuucagcaacgugaccugguuccacgccauccacguguccggcaccaauggcaccaagagauucgacaaccccgugcugcccuucaacgacgggguguacuuugccagcaccgagaaguccaacaucaucagaggcuggaucuucggcaccacacuggacagcaagacccagagccugcugaucgugaacaacgccaccaacguggucaucaaagugugcgaguuccaguucugcaacuaccccuuccugggcgucuacuaccacaagaacaacaagagcuggauggaaagcgaguuccggguguacagcagcgccaacaacugcaccuucgaguacgugucccagccuuuccugauggaccuggaaggcaagcagggcaacuucaagaaccugagcgaguucguguuuaagaacaucgacggcuacuucaagaucuacagcaagcacaccccuaucaaccucgugcgggaucugccucagggcuucucugcucuggaaccccugguggaucugcccaucggcaucaacaucacccgguuucagacacugcuggcccugcacagaagcuaccugacaccuggcgauagcagcagcggauggacagcuggugccgccgcuuacuaugugggcuaccugcagccuagaaccuuccugcugaaguacaacgagaacggcaccaucaccgacgccguggauugugcucuggauccucugagcgagacaaagugcacccugaaguccuucaccguggaaaagggcaucuaccagaccagcaacuuccgggugcagcccaccgaauccaucgugcgguuccccaauaucaccaaucugugccccuucggcgagguguucaaugccaccagauucgccucuguguacgccuggaaccggaagcggaucagcaauugcguggccgacuacuccgugcuguacaacuccgccagcuucagcaccuucaagugcuacggcguguccccuaccaagcugaacgaccugugcuucacaaacguguacgccgacagcuucgugauccggggagaugaagugcggcagauugccccuggacagacaggcaccaucgccgacuacaacuacaagcugcccgacgacuucaccggcugugugauugccuggaacagcaacaaccuggacuccaaagucggcggcaacuacaauuaccuguaccggcuguuccggaaguccaaucugaagcccuucgagcgggacaucuccaccgagaucuaucaggccggcagcaccccuuguaacggcgugaagggcuucaacugcuacuucccacugcaguccuacggcuuucagcccacauacggcgugggcuaucagcccuacagagugguggugcugagcuucgaacugcugcaugccccugccacagugugcggcccuaagaaaagcaccaaucucgugaagaacaaaugcgugaacuucaacuucaacggccugaccggcaccggcgugcugacagagagcaacaagaaguuccugccauuccagcaguuuggccgggauaucgccgauaccacagacgccguuagagauccccagacacuggaaauccuggacaucaccccuugcagcuucggcggagugucugugaucaccccuggcaccaacaccagcaaucagguggcagugcuguaccagggcgugaacuguaccgaagugcccguggccauucacgccgaucagcugacaccuacauggcggguguacuccaccggcagcaauguguuucagaccagagccggcugucugaucggagccgaguacgugaacaauagcuacgagugcgacauccccaucggcgcuggaaucugcgccagcuaccagacacagacaaacagcccucggagagccagaagcguggccagccagagcaucauugccuacacaaugucucugggcgccgagaacagcguggccuacuccaacaacucuaucgcuauccccaccaacuucaccaucagcgugaccacagagauccugccuguguccaugaccaagaccagcguggacugcaccauguacaucugcggcgauuccaccgagugcuccaaccugcugcugcaguacggcagcuucugcacccagcugaauagagcccugacagggaucgccguggaacaggacaagaacacccaagagguguucgcccaagugaagcagaucuacaagaccccuccuaucaaggacuucggcggcuucaauuucagccagauucugcccgauccuagcaagcccagcaagcggagcuucaucgaggaccugcuguucaacaaagugacacuggccgacgccggcuucaucaagcaguauggcgauugucugggcgacauugccgccagggaucugauuugcgcccagaaguuuaacggacugacagugcugccuccucugcugaccgaugagaugaucgcccaguacacaucugcccugcuggccggcacaaucacaagcggcuggacauuuggagcaggcgccgcucugcagauccccuuugcuaugcagauggccuaccgguucaacggcaucggagugacccagaaugugcuguacgagaaccagaagcugaucgccaaccaguucaacagcgccaucggcaagauccaggacagccugagcagcacagcaagcgcccugggaaagcugcaggacguggucaaccagaaugcccaggcacugaacacccuggucaagcagcuguccuccaacuucggcgccaucagcucugugcugaacgauauccugagcagacuggacccuccugaggccgaggugcagaucgacagacugaucacaggcagacugcagagccuccagacauacgugacccagcagcugaucagagccgccgagauuagagccucugccaaucuggccgccaucaagaugucugagugugugcugggccagagcaagagaguggacuuuugcggcaagggcuaccaccugaugagcuucccucagucugccccucacggcgugguguuucugcacgugacauaugugcccgcucaagagaagaauuucaccaccgcuccagccaucugccacgacggcaaagcccacuuuccuagagaaggcguguucguguccaacggcacccauugguucgugacacagcggaacuucuacgagccccagaucaucaccaccgacaacaccuucgugucuggcaacugcgacgucgugaucggcauugugaacaauaccguguacgacccucugcagcccgagcuggacagcuucaaagaggaacuggacaaguacuuuaagaaccacacaagccccgacguggaccugggcgauaucagcggaaucaaugccagcgucgugaacauccagaaagagaucgaccggcugaacgagguggccaagaaucugaacgagagccugaucgaccugcaagaacuggggaaguacgagcaguacaucaaguggcccugguacaucuggcugggcuuuaucgccggacugauugccaucgugauggucacaaucaugcuguguugcaugaccagcugcuguagcugccugaagggcuguuguagcuguggcagcugcugcaaguucgacgaggacgauucugagcccgugcugaagggcgugaaacugcacuacacaugauaauaggcuggagccucgguggccuagcuucuugccccuugggccuccccccagccccuccuccccuuccugcacccguacccccguggucuuugaauaaagucugagugggcggcaaaaaaaaaaaaaaaaaaaaaaaaaaaaaaaaaaaaaaaaaaaaaaaaaaaaaaaaaaaaaaaaaaaaaaaaaaaaaaaaaaaaaaaaaaaaaaaaaaaaucuag

SEQ ID NO: 26704 - RNA, 4100 nt, Artificial Sequence
  SARS-CoV-2/Wuhan/WIV05/2019__EPI_ISL_402128 spike protein mRNA gc mod (1-1273)(K986P_V987P_K986P_V987P_S13I_W152C_L452R_D614G)
gggaaauaagagagaaaagaagaguaagaagaaauauaagaccccggcgccgccaccauguucguguuccuggugcugcugccucugguguccauccagugugugaaccugaccaccagaacacagcugccuccagccuacaccaacagcuuuaccagaggcguguacuaccccgacaagguguucagauccagcgugcugcacucuacccaggaccuguuccugccuuucuucagcaacgugaccugguuccacgccauccacguguccggcaccaauggcaccaagagauucgacaaccccgugcugcccuucaacgacgggguguacuuugccagcaccgagaaguccaacaucaucagaggcuggaucuucggcaccacacuggacagcaagacccagagccugcugaucgugaacaacgccaccaacguggucaucaaagugugcgaguuccaguucugcaacgaccccuuccugggcgucuacuaccacaagaacaacaagagcugcauggaaagcgaguuccggguguacagcagcgccaacaacugcaccuucgaguacgugucccagccuuuccugauggaccuggaaggcaagcagggcaacuucaagaaccugcgcgaguucguguuuaagaacaucgacggcuacuucaagaucuacagcaagcacaccccuaucaaccucgugcgggaucugccucagggcuucucugcucuggaaccccugguggaucugcccaucggcaucaacaucacccgguuucagacacugcuggcccugcacagaagcuaccugacaccuggcgauagcagcagcggauggacagcuggugccgccgcuuacuaugugggcuaccugcagccuagaaccuuccugcugaaguacaacgagaacggcaccaucaccgacgccguggauugugcucuggauccucugagcgagacaaagugcacccugaaguccuucaccguggaaaagggcaucuaccagaccagcaacuuccgggugcagcccaccgaauccaucgugcgguuccccaauaucaccaaucugugccccuucggcgagguguucaaugccaccagauucgccucuguguacgccuggaaccggaagcggaucagcaauugcguggccgacuacuccgugcuguacaacuccgccagcuucagcaccuucaagugcuacggcguguccccuaccaagcugaacgaccugugcuucacaaacguguacgccgacagcuucgugauccggggagaugaagugcggcagauugccccuggacagacaggcaagaucgccgacuacaacuacaagcugcccgacgacuucaccggcugugugauugccuggaacagcaacaaccuggacuccaaagucggcggcaacuacaauuaccgcuaccggcuguuccggaaguccaaucugaagcccuucgagcgggacaucuccaccgagaucuaucaggccggcagcaccccuuguaacggcguggaaggcuucaacugcuacuucccacugcaguccuacggcuuucagcccacaaauggcgugggcuaucagcccuacagagugguggugcugagcuucgaacugcugcaugccccugccacagugugcggcccuaagaaaagcaccaaucucgugaagaacaaaugcgugaacuucaacuucaacggccugaccggcaccggcgugcugacagagagcaacaagaaguuccugccauuccagcaguuuggccgggauaucgccgauaccacagacgccguuagagauccccagacacuggaaauccuggacaucaccccuugcagcuucggcggagugucugugaucaccccuggcaccaacaccagcaaucagguggcagugcuguaccagggcgugaacuguaccgaagugcccguggccauucacgccgaucagcugacaccuacauggcggguguacuccaccggcagcaauguguuucagaccagagccggcugucugaucggagccgagcacgugaacaauagcuacgagugcgacauccccaucggcgcuggaaucugcgccagcuaccagacacagacaaacagcccucggagagccagaagcguggccagccagagcaucauugccuacacaaugucucugggcgccgagaacagcguggccuacuccaacaacucuaucgcuauccccaccaacuucaccaucagcgugaccacagagauccugccuguguccaugaccaagaccagcguggacugcaccauguacaucugcggcgauuccaccgagugcuccaaccugcugcugcaguacggcagcuucugcacccagcugaauagagcccugacagggaucgccguggaacaggacaagaacacccaagagguguucgcccaagugaagcagaucuacaagaccccuccuaucaaggacuucggcggcuucaauuucagccagauucugcccgauccuagcaagcccagcaagcggagcuucaucgaggaccugcuguucaacaaagugacacuggccgacgccggcuucaucaagcaguauggcgauugucugggcgacauugccgccagggaucugauuugcgcccagaaguuuaacggacugacagugcugccuccucugcugaccgaugagaugaucgcccaguacacaucugcccugcuggccggcacaaucacaagcggcuggacauuuggagcaggcgccgcucugcagauccccuuugcuaugcagauggccuaccgguucaacggcaucggagugacccagaaugugcuguacgagaaccagaagcugaucgccaaccaguucaacagcgccaucggcaagauccaggacagccugagcagcacagcaagcgcccugggaaagcugcaggacguggucaaccagaaugcccaggcacugaacacccuggucaagcagcuguccuccaacuucggcgccaucagcucugugcugaacgauauccugagcagacuggacccuccugaggccgaggugcagaucgacagacugaucacaggcagacugcagagccuccagacauacgugacccagcagcugaucagagccgccgagauuagagccucugccaaucuggccgccaccaagaugucugagugugugcugggccagagcaagagaguggacuuuugcggcaagggcuaccaccugaugagcuucccucagucugccccucacggcgugguguuucugcacgugacauaugugcccgcucaagagaagaauuucaccaccgcuccagccaucugccacgacggcaaagcccacuuuccuagagaaggcguguucguguccaacggcacccauugguucgugacacagcggaacuucuacgagccccagaucaucaccaccgacaacaccuucgugucuggcaacugcgacgucgugaucggcauugugaacaauaccguguacgacccucugcagcccgagcuggacagcuucaaagaggaacuggacaaguacuuuaagaaccacacaagccccgacguggaccugggcgauaucagcggaaucaaugccagcgucgugaacauccagaaagagaucgaccggcugaacgagguggccaagaaucugaacgagagccugaucgaccugcaagaacuggggaaguacgagcaguacaucaaguggcccugguacaucuggcugggcuuuaucgccggacugauugccaucgugauggucacaaucaugcuguguugcaugaccagcugcuguagcugccugaagggcuguuguagcuguggcagcugcugcaaguucgacgaggacgauucugagcccgugcugaagggcgugaaacugcacuacacaugauaauaggcuggagccucgguggccuagcuucuugccccuugggccuccccccagccccuccuccccuuccugcacccguacccccguggucuuugaauaaagucugagugggcggcaaaaaaaaaaaaaaaaaaaaaaaaaaaaaaaaaaaaaaaaaaaaaaaaaaaaaaaaaaaaaaaaaaaaaaaaaaaaaaaaaaaaaaaaaaaaaaaaaaaaucuag

SEQ ID NO: 26705 - RNA, 1613 nt, Artificial Sequence
  SARS-CoV-2/Wuhan/WIV05/2019__EPI_ISL_402128 spike protein mRNA gc (1-15,334-528) Ferritin construct
agaauaaacuaguauucuucugguccccacagacucagagagaacccgccaccauguucguguuccugguccuccugccccuggugagcucccagugcaaccugugccccuucggcgagguguucaacgccacccgguucgccagcgucuacgccuggaaccgcaagcggaucuccaacugcguggcggacuacagcgugcuguacaacuccgccagcuucuccacguucaagugcuacggcgucagccccaccaagcucaacgaccugugcuucaccaacguguacgccgacuccuucgugauccgcggggacgagguccggcagaucgcccccggccagaccgggaagaucgccgacuacaacuacaagcugccggacgacuucacgggcugcgugaucgcguggaacagcaacaaccucgacuccaaggucgggggcaacuacaacuaccuguaccgccuguuccgcaagagcaaccucaagcccuucgagcgggacaucuccaccgagaucuaccaggccggcagcacccccugcaacgggguggagggcuucaacugcuacuucccccugcaguccuacggguuccagccgaccaacggcgugggguaccagcccuaccggguggucgugcugagcuucgagcuccugcacgcccccgccacggugugcggccccaagggcggggguggaagcggcggggguggaagugacaucaucaagcuccugaacgagcaggucaacaaggagaugcaguccagcaaccuguacauguccaugagcuccuggugcuacacccacagccucgacggcgccgggcuguuccuguucgaccacgccgcggaggaguacgagcacgccaagaagcucaucaucuuccugaacgagaacaacgugcccgugcagcugaccuccaucagcgccccggagcacaaguucgagggccucacgcagaucuuccagaaggccuacgagcacgagcagcacaucuccgagagcaucaacaacaucguggaccacgccaucaaguccaaggaccacgcgaccuucaacuuccugcagugguacgucgccgagcagcacgaggaggaggugcuguucaaggacauccucgacaagaucgagcugaucgggaacgagaaccacggccuguaccucgccgaccaguacgugaaggggaucgccaagagccgcaaguccugaugacucgagcugguacugcaugcacgcaaugcuagcugccccuuucccguccuggguaccccgagucucccccgaccucgggucccagguaugcucccaccuccaccugccccacucaccaccucugcuaguuccagacaccucccaagcacgcagcaaugcagcucaaaacgcuuagccuagccacacccccacgggaaacagcagugauuaaccuuuagcaauaaacgaaaguuuaacuaagcuauacuaaccccaggguuggucaauuucgugccagccacacccuggagcuagcaaaaaaaaaaaaaaaaaaaaaaaaaaaaaagcauaugacuaaaaaaaaaaaaaaaaaaaaaaaaaaaaaaaaaaaaaaaaaaaaaaaaaaaaaaaaaaaaaaaaaaaaaa

SEQ ID NO: 26706 - RNA, 1211 nt, Artificial Sequence
  SARS-CoV-2/Wuhan/WIV05/2019__EPI_ISL_402128 spike protein mRNA gc (334-528) Foldon construct
agaauaaacuaguauucuucugguccccacagacucagagagaacccgccaccaugcccaugggcagccugcagccgcucgccacccuguaccugcucgggaugcugguggccuccguccuggcgaaccugugccccuucggcgagguguucaacgccacccgguucgccagcgucuacgccuggaaccgcaagcggaucuccaacugcguggcggacuacagcgugcuguacaacuccgccagcuucuccacguucaagugcuacggcgucagccccaccaagcucaacgaccugugcuucaccaacguguacgccgacuccuucgugauccgcggggacgagguccggcagaucgcccccggccagaccgggaagaucgccgacuacaacuacaagcugccggacgacuucacgggcugcgugaucgcguggaacagcaacaaccucgacuccaaggucgggggcaacuacaacuaccuguaccgccuguuccgcaagagcaaccucaagcccuucgagcgggacaucuccaccgagaucuaccaggccggcagcacccccugcaacgggguggagggcuucaacugcuacuucccccugcaguccuacggguuccagccgaccaacggcgugggguaccagcccuaccggguggucgugcugagcuucgagcuccugcacgcccccgccacggugugcggccccaagggcagcggcggguacauccccgaggccccgcgcgacggccaggccuacgugcggaaggacggcgaguggguccugcugagcaccuuccucugaugacucgagcugguacugcaugcacgcaaugcuagcugccccuuucccguccuggguaccccgagucucccccgaccucgggucccagguaugcucccaccuccaccugccccacucaccaccucugcuaguuccagacaccucccaagcacgcagcaaugcagcucaaaacgcuuagccuagccacacccccacgggaaacagcagugauuaaccuuuagcaauaaacgaaaguuuaacuaagcuauacuaaccccaggguuggucaauuucgugccagccacacccuggagcuagcaaaaaaaaaaaaaaaaaaaaaaaaaaaaaagcauaugacuaaaaaaaaaaaaaaaaaaaaaaaaaaaaaaaaaaaaaaaaaaaaaaaaaaaaaaaaaaaaaaaaaaaaaa

SEQ ID NO: 26707 - RNA, 1589 nt, Artificial Sequence
  SARS-CoV-2/Wuhan/WIV05/2019__EPI_ISL_402128 spike protein mRNA gc (1-15,334-528) LumSynth construct
agaauaaacuaguauucuucugguccccacagacucagagagaacccgccaccauguucguguuccugguccuccugccccuggugagcucccagugcaaccugugccccuucggcgagguguucaacgccacccgguucgccagcgucuacgccuggaaccgcaagcggaucuccaacugcguggcggacuacagcgugcuguacaacuccgccagcuucuccacguucaagugcuacggcgucagccccaccaagcucaacgaccugugcuucaccaacguguacgccgacuccuucgugauccgcggggacgagguccggcagaucgcccccggccagaccgggaagaucgccgacuacaacuacaagcugccggacgacuucacgggcugcgugaucgcguggaacagcaacaaccucgacuccaaggucgggggcaacuacaacuaccuguaccgccuguuccgcaagagcaaccucaagcccuucgagcgggacaucuccaccgagaucuaccaggccggcagcacccccugcaacgggguggagggcuucaacugcuacuucccccugcaguccuacggguuccagccgaccaacggcgugggguaccagcccuaccggguggucgugcugagcuucgagcuccugcacgcccccgccacggugugcggccccaagggcggcggcggcuccggaggcggagguagcgggggacagaucuacgagggcaagcugaccgccgaggggcuccgcuucggcaucguggccagccgguucaaccacgcgcuggucgaccgccugguggagggggccaucgacgccaucgugcggcacggcgggcgcgaggaggacaucacccucguccgggugcccggcuccugggagaucccgguggccgccggcgagcuggcccgcaaggaggacaucgacgcggucaucgccaucggggugcugauccggggcgccacgccccacuucgacuacaucgccagcgagguguccaaggggcucgcggaccugagccuggagcuccgcaagcccaucaccuucggcgucaucaccgccgacacccuggagcaggccaucgagcgggccgggacgaagcacggcaacaagggcugggaggccgcgcuguccgccaucgagauggccaaccucuucaagagccugcgcugaugacucgagcugguacugcaugcacgcaaugcuagcugccccuuucccguccuggguaccccgagucucccccgaccucgggucccagguaugcucccaccuccaccugccccacucaccaccucugcuaguuccagacaccucccaagcacgcagcaaugcagcucaaaacgcuuagccuagccacacccccacgggaaacagcagugauuaaccuuuagcaauaaacgaaaguuuaacuaagcuauacuaaccccaggguuggucaauuucgugccagccacacccuggagcuagcaaaaaaaaaaaaaaaaaaaaaaaaaaaaaagcauaugacuaaaaaaaaaaaaaaaaaaaaaaaaaaaaaaaaaaaaaaaaaaaaaaaaaaaaaaaaaaaaaaaaaaaaaa

SEQ ID NO: 26708 - RNA, 1550 nt, Artificial Sequence
  SARS-CoV-2/Wuhan/WIV05/2019__EPI_ISL_402128 spike protein mRNA gc (334-528) LumSynth construct
agaauaaacuaguauucuucugguccccacagacucagagagaacccgccaccaugcagaucuacgagggcaagcugaccgccgaggggcuccgcuucggcaucguggccagccgguucaaccacgcgcuggucgaccgccugguggagggggccaucgacgccaucgugcggcacggcgggcgcgaggaggacaucacccucguccgggugcccggcuccugggagaucccgguggccgccggcgagcuggcccgcaaggaggacaucgacgcggucaucgccaucggggugcugauccggggcgccacgccccacuucgacuacaucgccagcgagguguccaaggggcucgcggaccugagccuggagcuccgcaagcccaucaccuucggcgucaucaccgccgacacccuggagcaggccaucgagcgggccgggacgaagcacggcaacaagggcugggaggccgcgcuguccgccaucgagauggccaaccucuucaagagccugcgcggcgggggcgggagcggcgggggcggcuccgggggcgggaaccugugccccuucggcgagguguucaacgccacccgguucgccagcgucuacgccuggaaccgcaagcggaucuccaacugcguggcggacuacagcgugcuguacaacuccgccagcuucuccacguucaagugcuacggcgucagccccaccaagcucaacgaccugugcuucaccaacguguacgccgacuccuucgugauccgcggggacgagguccggcagaucgcccccggccagaccgggaagaucgccgacuacaacuacaagcugccggacgacuucacgggcugcgugaucgcguggaacagcaacaaccucgacuccaaggucgggggcaacuacaacuaccuguaccgccuguuccgcaagagcaaccucaagcccuucgagcgggacaucuccaccgagaucuaccaggccggcagcacccccugcaacgggguggagggcuucaacugcuacuucccccugcaguccuacggguuccagccgaccaacggcgugggguaccagcccuaccggguggucgugcugagcuucgagcuccugcacgcccccgccacggugugcggccccaagugaugacucgagcugguacugcaugcacgcaaugcuagcugccccuuucccguccuggguaccccgagucucccccgaccucgggucccagguaugcucccaccuccaccugccccacucaccaccucugcuaguuccagacaccucccaagcacgcagcaaugcagcucaaaacgcuuagccuagccacacccccacgggaaacagcagugauuaaccuuuagcaauaaacgaaaguuuaacuaagcuauacuaaccccaggguuggucaauuucgugccagccacacccuggagcuagcaaaaaaaaaaaaaaaaaaaaaaaaaaaaaagcauaugacuaaaaaaaaaaaaaaaaaaaaaaaaaaaaaaaaaaaaaaaaaaaaaaaaaaaaaaaaaaaaaaaaaaaaaa

SEQ ID NO: 26709 - RNA, 4283 nt, Artificial Sequence
  SARS-CoV-2/Wuhan/WIV05/2019__EPI_ISL_402128 spike protein mRNA gc (1-1273)
agaauaaacuaguauucuucugguccccacagacucagagagaacccgccaccauguucguguuccugguccuccugccccuggugagcucccagugcgugaaccucaccacccgcacgcagcugccgcccgccuacaccaacagcuucacccggggcgucuacuaccccgacaagguguuccgcuccagcgugcugcacuccacccaggaccucuuccugcccuucuucagcaacgucacgugguuccacgccauccacguguccgggaccaacggcaccaagcgguucgacaacccggugcugcccuucaacgacggggucuacuucgcgagcaccgagaaguccaacaucauccgcggcuggaucuucgggacgacccucgacagcaagacccagucccugcugaucgugaacaacgccaccaacguggucaucaaggugugcgaguuccaguucugcaacgaccccuuccucggcguguacuaccacaagaacaacaagagcuggauggaguccgaguuccgggucuacagcuccgccaacaacugcacguucgaguacgugagccagcccuuccugauggaccuggagggcaagcaggggaacuucaagaaccuccgcgaguucguguucaagaacaucgacggcuacuucaagaucuacuccaagcacaccccgaucaaccugguccgggaccugccccagggguucagcgcccucgagccccugguggaccugcccaucggcaucaacaucacccgcuuccagacccuccuggcccugcaccgguccuaccucacgccgggggacagcagcuccggcuggaccgcgggcgccgccgccuacuacgugggguaccugcagccccgcaccuuccugcucaaguacaacgagaacggcaccaucacggacgcggucgacugcgcccuggacccccugagcgagaccaagugcacccucaaguccuucaccguggagaaggggaucuaccagacgagcaacuuccgggugcagcccaccgaguccaucguccgcuucccgaacaucaccaaccugugccccuucggcgagguguucaacgccacccgguucgccagcgucuacgccuggaaccgcaagcggaucuccaacugcguggcggacuacagcgugcuguacaacuccgccagcuucuccacguucaagugcuacggcgucagccccaccaagcucaacgaccugugcuucaccaacguguacgccgacuccuucgugauccgcggggacgagguccggcagaucgcccccggccagaccgggaagaucgccgacuacaacuacaagcugccggacgacuucacgggcugcgugaucgcguggaacagcaacaaccucgacuccaaggucgggggcaacuacaacuaccuguaccgccuguuccgcaagagcaaccucaagcccuucgagcgggacaucuccaccgagaucuaccaggccggcagcacccccugcaacgggguggagggcuucaacugcuacuucccccugcaguccuacggguuccagccgaccaacggcgugggguaccagcccuaccggguggucgugcugagcuucgagcuccugcacgcccccgccacggugugcggccccaagaaguccaccaaccuggucaagaacaagugcgugaacuucaacuucaacggccucaccgggaccggcgugcugaccgagagcaacaagaaguuccugccguuccagcaguucgggcgcgacaucgccgacacgaccgacgcgguccgcgacccccagacccuggagauccucgacaucacccccugcagcuucggcgggguguccgugaucacgccgggcaccaacaccagcaaccaggucgccgugcuguaccaggacgugaacugcaccgagguccccguggccauccacgccgaccagcugacgcccaccuggcggguguacuccaccggcagcaacgucuuccagacccgcgccgggugccucaucggcgcggagcacgugaacaacuccuacgagugcgacauccccaucggggccggcaucugcgccagcuaccagacgcagaccaacuccccgcggcgcgcccggagcguggcgucccagagcaucaucgccuacaccaugucccugggcgccgagaacagcgucgccuacuccaacaacagcaucgccauccccaccaacuucacgaucuccgugaccaccgagauccugcccgugagcaugaccaagacgagcgucgacugcaccauguacaucugcggggacuccaccgagugcagcaaccuccugcugcaguacggcuccuucugcacccagcucaaccgcgcgcugacggggaucgccguggagcaggacaagaacacccaggagguguucgcccaggucaagcagaucuacaagacgcccccgaucaaggacuucggcggguucaacuucagccagauccugcccgaccccuccaagcccagcaagcgguccuucaucgaggaccuccuguucaacaaggugacccuggccgacgccggcuucaucaagcaguacggcgacugccucggggacaucgcggcccgcgaccugaucugcgcccagaaguucaacggccugaccgugcucccgccccugcugaccgacgagaugaucgcccaguacaccagcgcccuccuggcggggaccaucacguccggcuggaccuucggggccggcgccgcccugcagauccccuucgcgaugcagauggccuaccgguucaacggcaucggggucacccagaacgugcucuacgagaaccagaagcugaucgccaaccaguucaacagcgccaucggcaagauccaggacucccugagcuccaccgccagcgcgcucgggaagcugcaggacguggucaaccagaacgcccaggcccugaacacgcucgugaagcagcuguccagcaacuucggcgccaucuccagcgugcugaacgacauccucucccgccuggacaaggucgaggccgaggugcagaucgaccggcugaucaccgggcgccuccagagccugcagaccuacgugacccagcagcugauccgggcggccgagauccgcgccagcgccaaccucgccgcgaccaagauguccgagugcguccugggccagagcaagcggguggacuucugcggcaagggguaccaccugauguccuucccccagagcgccccgcacggcguggucuuccuccacgugacguacguccccgcccaggagaagaacuucaccaccgcccccgcgaucugccacgacgggaaggcccacuucccccgcgagggcguguucguguccaacgggacccacugguucgucacgcagcggaacuucuacgagccgcagaucaucaccaccgacaacaccuucgugagcggcaacugcgacguggucaucggcaucgugaacaacacgguguacgacccccugcagcccgagcuggacuccuucaaggaggagcucgacaaguacuucaagaaccacaccagccccgacgucgaccugggggacaucuccggcaucaacgccagcguggugaacauccagaaggagaucgaccgccugaacgaggucgccaagaaccucaacgagucccugaucgaccugcaggagcucgggaaguacgagcaguacaucaaguggccgugguacaucuggcugggcuucaucgccggccugaucgcgaucgugauggugaccaucaugcucugcugcaugaccagcugcugcuccugccugaaggggugcugcagcugcggcuccugcugcaaguucgacgaggacgacagcgagcccguccugaagggggugaagcuccacuacacgugaugacucgagcugguacugcaugcacgcaaugcuagcugccccuuucccguccuggguaccccgagucucccccgaccucgggucccagguaugcucccaccuccaccugccccacucaccaccucugcuaguuccagacaccucccaagcacgcagcaaugcagcucaaaacgcuuagccuagccacacccccacgggaaacagcagugauuaaccuuuagcaauaaacgaaaguuuaacuaagcuauacuaaccccaggguuggucaauuucgugccagccacacccuggagcuagcaaaaaaaaaaaaaaaaaaaaaaaaaaaaaagcauaugacuaaaaaaaaaaaaaaaaaaaaaaaaaaaaaaaaaaaaaaaaaaaaaaaaaaaaaaaaaaaaaaaaaaaaaa

SEQ ID NO: 26710 - RNA, 4283 nt, Artificial Sequence
  SARS-CoV-2/Wuhan/WIV05/2019__EPI_ISL_402128 spike protein mRNA gc (1-1273)(D614G)
agaauaaacuaguauucuucugguccccacagacucagagagaacccgccaccauguucguguuccugguccuccugccccuggugagcucccagugcgugaaccucaccacccgcacgcagcugccgcccgccuacaccaacagcuucacccggggcgucuacuaccccgacaagguguuccgcuccagcgugcugcacuccacccaggaccucuuccugcccuucuucagcaacgucacgugguuccacgccauccacguguccgggaccaacggcaccaagcgguucgacaacccggugcugcccuucaacgacggggucuacuucgcgagcaccgagaaguccaacaucauccgcggcuggaucuucgggacgacccucgacagcaagacccagucccugcugaucgugaacaacgccaccaacguggucaucaaggugugcgaguuccaguucugcaacgaccccuuccucggcguguacuaccacaagaacaacaagagcuggauggaguccgaguuccgggucuacagcuccgccaacaacugcacguucgaguacgugagccagcccuuccugauggaccuggagggcaagcaggggaacuucaagaaccuccgcgaguucguguucaagaacaucgacggcuacuucaagaucuacuccaagcacaccccgaucaaccugguccgggaccugccccagggguucagcgcccucgagccccugguggaccugcccaucggcaucaacaucacccgcuuccagacccuccuggcccugcaccgguccuaccucacgccgggggacagcagcuccggcuggaccgcgggcgccgccgccuacuacgugggguaccugcagccccgcaccuuccugcucaaguacaacgagaacggcaccaucacggacgcggucgacugcgcccuggacccccugagcgagaccaagugcacccucaaguccuucaccguggagaaggggaucuaccagacgagcaacuuccgggugcagcccaccgaguccaucguccgcuucccgaacaucaccaaccugugccccuucggcgagguguucaacgccacccgguucgccagcgucuacgccuggaaccgcaagcggaucuccaacugcguggcggacuacagcgugcuguacaacuccgccagcuucuccacguucaagugcuacggcgucagccccaccaagcucaacgaccugugcuucaccaacguguacgccgacuccuucgugauccgcggggacgagguccggcagaucgcccccggccagaccgggaagaucgccgacuacaacuacaagcugccggacgacuucacgggcugcgugaucgcguggaacagcaacaaccucgacuccaaggucgggggcaacuacaacuaccuguaccgccuguuccgcaagagcaaccucaagcccuucgagcgggacaucuccaccgagaucuaccaggccggcagcacccccugcaacgggguggagggcuucaacugcuacuucccccugcaguccuacggguuccagccgaccaacggcgugggguaccagcccuaccggguggucgugcugagcuucgagcuccugcacgcccccgccacggugugcggccccaagaaguccaccaaccuggucaagaacaagugcgugaacuucaacuucaacggccucaccgggaccggcgugcugaccgagagcaacaagaaguuccugccguuccagcaguucgggcgcgacaucgccgacacgaccgacgcgguccgcgacccccagacccuggagauccucgacaucacccccugcagcuucggcgggguguccgugaucacgccgggcaccaacaccagcaaccaggucgccgugcuguaccagggcgugaacugcaccgagguccccguggccauccacgccgaccagcugacgcccaccuggcggguguacuccaccggcagcaacgucuuccagacccgcgccgggugccucaucggcgcggagcacgugaacaacuccuacgagugcgacauccccaucggggccggcaucugcgccagcuaccagacgcagaccaacuccccgcggcgcgcccggagcguggcgucccagagcaucaucgccuacaccaugucccugggcgccgagaacagcgucgccuacuccaacaacagcaucgccauccccaccaacuucacgaucuccgugaccaccgagauccugcccgugagcaugaccaagacgagcgucgacugcaccauguacaucugcggggacuccaccgagugcagcaaccuccugcugcaguacggcuccuucugcacccagcucaaccgcgcgcugacggggaucgccguggagcaggacaagaacacccaggagguguucgcccaggucaagcagaucuacaagacgcccccgaucaaggacuucggcggguucaacuucagccagauccugcccgaccccuccaagcccagcaagcgguccuucaucgaggaccuccuguucaacaaggugacccuggccgacgccggcuucaucaagcaguacggcgacugccucggggacaucgcggcccgcgaccugaucugcgcccagaaguucaacggccugaccgugcucccgccccugcugaccgacgagaugaucgcccaguacaccagcgcccuccuggcggggaccaucacguccggcuggaccuucggggccggcgccgcccugcagauccccuucgcgaugcagauggccuaccgguucaacggcaucggggucacccagaacgugcucuacgagaaccagaagcugaucgccaaccaguucaacagcgccaucggcaagauccaggacucccugagcuccaccgccagcgcgcucgggaagcugcaggacguggucaaccagaacgcccaggcccugaacacgcucgugaagcagcuguccagcaacuucggcgccaucuccagcgugcugaacgacauccucucccgccuggacaaggucgaggccgaggugcagaucgaccggcugaucaccgggcgccuccagagccugcagaccuacgugacccagcagcugauccgggcggccgagauccgcgccagcgccaaccucgccgcgaccaagauguccgagugcguccugggccagagcaagcggguggacuucugcggcaagggguaccaccugauguccuucccccagagcgccccgcacggcguggucuuccuccacgugacguacguccccgcccaggagaagaacuucaccaccgcccccgcgaucugccacgacgggaaggcccacuucccccgcgagggcguguucguguccaacgggacccacugguucgucacgcagcggaacuucuacgagccgcagaucaucaccaccgacaacaccuucgugagcggcaacugcgacguggucaucggcaucgugaacaacacgguguacgacccccugcagcccgagcuggacuccuucaaggaggagcucgacaaguacuucaagaaccacaccagccccgacgucgaccugggggacaucuccggcaucaacgccagcguggugaacauccagaaggagaucgaccgccugaacgaggucgccaagaaccucaacgagucccugaucgaccugcaggagcucgggaaguacgagcaguacaucaaguggccgugguacaucuggcugggcuucaucgccggccugaucgcgaucgugauggugaccaucaugcucugcugcaugaccagcugcugcuccugccugaaggggugcugcagcugcggcuccugcugcaaguucgacgaggacgacagcgagcccguccugaagggggugaagcuccacuacacgugaugacucgagcugguacugcaugcacgcaaugcuagcugccccuuucccguccuggguaccccgagucucccccgaccucgggucccagguaugcucccaccuccaccugccccacucaccaccucugcuaguuccagacaccucccaagcacgcagcaaugcagcucaaaacgcuuagccuagccacacccccacgggaaacagcagugauuaaccuuuagcaauaaacgaaaguuuaacuaagcuauacuaaccccaggguuggucaauuucgugccagccacacccuggagcuagcaaaaaaaaaaaaaaaaaaaaaaaaaaaaaagcauaugacuaaaaaaaaaaaaaaaaaaaaaaaaaaaaaaaaaaaaaaaaaaaaaaaaaaaaaaaaaaaaaaaaaaaaaa

SEQ ID NO: 26711 - RNA, 4283 nt, Artificial Sequence
  SARS-CoV-2/Wuhan/WIV05/2019__EPI_ISL_402128 spike protein mRNA gc (1-1273)(A222V_D614G)
agaauaaacuaguauucuucugguccccacagacucagagagaacccgccaccauguucguguuccugguccuccugccccuggugagcucccagugcgugaaccucaccacccgcacgcagcugccgcccgccuacaccaacagcuucacccggggcgucuacuaccccgacaagguguuccgcuccagcgugcugcacuccacccaggaccucuuccugcccuucuucagcaacgucacgugguuccacgccauccacguguccgggaccaacggcaccaagcgguucgacaacccggugcugcccuucaacgacggggucuacuucgcgagcaccgagaaguccaacaucauccgcggcuggaucuucgggacgacccucgacagcaagacccagucccugcugaucgugaacaacgccaccaacguggucaucaaggugugcgaguuccaguucugcaacgaccccuuccucggcguguacuaccacaagaacaacaagagcuggauggaguccgaguuccgggucuacagcuccgccaacaacugcacguucgaguacgugagccagcccuuccugauggaccuggagggcaagcaggggaacuucaagaaccuccgcgaguucguguucaagaacaucgacggcuacuucaagaucuacuccaagcacaccccgaucaaccugguccgggaccugccccagggguucagcguccucgagccccugguggaccugcccaucggcaucaacaucacccgcuuccagacccuccuggcccugcaccgguccuaccucacgccgggggacagcagcuccggcuggaccgcgggcgccgccgccuacuacgugggguaccugcagccccgcaccuuccugcucaaguacaacgagaacggcaccaucacggacgcggucgacugcgcccuggacccccugagcgagaccaagugcacccucaaguccuucaccguggagaaggggaucuaccagacgagcaacuuccgggugcagcccaccgaguccaucguccgcuucccgaacaucaccaaccugugccccuucggcgagguguucaacgccacccgguucgccagcgucuacgccuggaaccgcaagcggaucuccaacugcguggcggacuacagcgugcuguacaacuccgccagcuucuccacguucaagugcuacggcgucagccccaccaagcucaacgaccugugcuucaccaacguguacgccgacuccuucgugauccgcggggacgagguccggcagaucgcccccggccagaccgggaagaucgccgacuacaacuacaagcugccggacgacuucacgggcugcgugaucgcguggaacagcaacaaccucgacuccaaggucgggggcaacuacaacuaccuguaccgccuguuccgcaagagcaaccucaagcccuucgagcgggacaucuccaccgagaucuaccaggccggcagcacccccugcaacgggguggagggcuucaacugcuacuucccccugcaguccuacggguuccagccgaccaacggcgugggguaccagcccuaccggguggucgugcugagcuucgagcuccugcacgcccccgccacggugugcggccccaagaaguccaccaaccuggucaagaacaagugcgugaacuucaacuucaacggccucaccgggaccggcgugcugaccgagagcaacaagaaguuccugccguuccagcaguucgggcgcgacaucgccgacacgaccgacgcgguccgcgacccccagacccuggagauccucgacaucacccccugcagcuucggcgggguguccgugaucacgccgggcaccaacaccagcaaccaggucgccgugcuguaccagggcgugaacugcaccgagguccccguggccauccacgccgaccagcugacgcccaccuggcggguguacuccaccggcagcaacgucuuccagacccgcgccgggugccucaucggcgcggagcacgugaacaacuccuacgagugcgacauccccaucggggccggcaucugcgccagcuaccagacgcagaccaacuccccgcggcgcgcccggagcguggcgucccagagcaucaucgccuacaccaugucccugggcgccgagaacagcgucgccuacuccaacaacagcaucgccauccccaccaacuucacgaucuccgugaccaccgagauccugcccgugagcaugaccaagacgagcgucgacugcaccauguacaucugcggggacuccaccgagugcagcaaccuccugcugcaguacggcuccuucugcacccagcucaaccgcgcgcugacggggaucgccguggagcaggacaagaacacccaggagguguucgcccaggucaagcagaucuacaagacgcccccgaucaaggacuucggcggguucaacuucagccagauccugcccgaccccuccaagcccagcaagcgguccuucaucgaggaccuccuguucaacaaggugacccuggccgacgccggcuucaucaagcaguacggcgacugccucggggacaucgcggcccgcgaccugaucugcgcccagaaguucaacggccugaccgugcucccgccccugcugaccgacgagaugaucgcccaguacaccagcgcccuccuggcggggaccaucacguccggcuggaccuucggggccggcgccgcccugcagauccccuucgcgaugcagauggccuaccgguucaacggcaucggggucacccagaacgugcucuacgagaaccagaagcugaucgccaaccaguucaacagcgccaucggcaagauccaggacucccugagcuccaccgccagcgcgcucgggaagcugcaggacguggucaaccagaacgcccaggcccugaacacgcucgugaagcagcuguccagcaacuucggcgccaucuccagcgugcugaacgacauccucucccgccuggacaaggucgaggccgaggugcagaucgaccggcugaucaccgggcgccuccagagccugcagaccuacgugacccagcagcugauccgggcggccgagauccgcgccagcgccaaccucgccgcgaccaagauguccgagugcguccugggccagagcaagcggguggacuucugcggcaagggguaccaccugauguccuucccccagagcgccccgcacggcguggucuuccuccacgugacguacguccccgcccaggagaagaacuucaccaccgcccccgcgaucugccacgacgggaaggcccacuucccccgcgagggcguguucguguccaacgggacccacugguucgucacgcagcggaacuucuacgagccgcagaucaucaccaccgacaacaccuucgugagcggcaacugcgacguggucaucggcaucgugaacaacacgguguacgacccccugcagcccgagcuggacuccuucaaggaggagcucgacaaguacuucaagaaccacaccagccccgacgucgaccugggggacaucuccggcaucaacgccagcguggugaacauccagaaggagaucgaccgccugaacgaggucgccaagaaccucaacgagucccugaucgaccugcaggagcucgggaaguacgagcaguacaucaaguggccgugguacaucuggcugggcuucaucgccggccugaucgcgaucgugauggugaccaucaugcucugcugcaugaccagcugcugcuccugccugaaggggugcugcagcugcggcuccugcugcaaguucgacgaggacgacagcgagcccguccugaagggggugaagcuccacuacacgugaugacucgagcugguacugcaugcacgcaaugcuagcugccccuuucccguccuggguaccccgagucucccccgaccucgggucccagguaugcucccaccuccaccugccccacucaccaccucugcuaguuccagacaccucccaagcacgcagcaaugcagcucaaaacgcuuagccuagccacacccccacgggaaacagcagugauuaaccuuuagcaauaaacgaaaguuuaacuaagcuauacuaaccccaggguuggucaauuucgugccagccacacccuggagcuagcaaaaaaaaaaaaaaaaaaaaaaaaaaaaaagcauaugacuaaaaaaaaaaaaaaaaaaaaaaaaaaaaaaaaaaaaaaaaaaaaaaaaaaaaaaaaaaaaaaaaaaaaaa

SEQ ID NO: 26712 - RNA, 4283 nt, Artificial Sequence
  SARS-CoV-2/Wuhan/WIV05/2019__EPI_ISL_402128 spike protein mRNA gc (1-1273)(N439K_D614G)
agaauaaacuaguauucuucugguccccacagacucagagagaacccgccaccauguucguguuccugguccuccugccccuggugagcucccagugcgugaaccucaccacccgcacgcagcugccgcccgccuacaccaacagcuucacccggggcgucuacuaccccgacaagguguuccgcuccagcgugcugcacuccacccaggaccucuuccugcccuucuucagcaacgucacgugguuccacgccauccacguguccgggaccaacggcaccaagcgguucgacaacccggugcugcccuucaacgacggggucuacuucgcgagcaccgagaaguccaacaucauccgcggcuggaucuucgggacgacccucgacagcaagacccagucccugcugaucgugaacaacgccaccaacguggucaucaaggugugcgaguuccaguucugcaacgaccccuuccucggcguguacuaccacaagaacaacaagagcuggauggaguccgaguuccgggucuacagcuccgccaacaacugcacguucgaguacgugagccagcccuuccugauggaccuggagggcaagcaggggaacuucaagaaccuccgcgaguucguguucaagaacaucgacggcuacuucaagaucuacuccaagcacaccccgaucaaccugguccgggaccugccccagggguucagcgcccucgagccccugguggaccugcccaucggcaucaacaucacccgcuuccagacccuccuggcccugcaccgguccuaccucacgccgggggacagcagcuccggcuggaccgcgggcgccgccgccuacuacgugggguaccugcagccccgcaccuuccugcucaaguacaacgagaacggcaccaucacggacgcggucgacugcgcccuggacccccugagcgagaccaagugcacccucaaguccuucaccguggagaaggggaucuaccagacgagcaacuuccgggugcagcccaccgaguccaucguccgcuucccgaacaucaccaaccugugccccuucggcgagguguucaacgccacccgguucgccagcgucuacgccuggaaccgcaagcggaucuccaacugcguggcggacuacagcgugcuguacaacuccgccagcuucuccacguucaagugcuacggcgucagccccaccaagcucaacgaccugugcuucaccaacguguacgccgacuccuucgugauccgcggggacgagguccggcagaucgcccccggccagaccgggaagaucgccgacuacaacuacaagcugccggacgacuucacgggcugcgugaucgcguggaacagcaagaaccucgacuccaaggucgggggcaacuacaacuaccuguaccgccuguuccgcaagagcaaccucaagcccuucgagcgggacaucuccaccgagaucuaccaggccggcagcacccccugcaacgggguggagggcuucaacugcuacuucccccugcaguccuacggguuccagccgaccaacggcgugggguaccagcccuaccggguggucgugcugagcuucgagcuccugcacgcccccgccacggugugcggccccaagaaguccaccaaccuggucaagaacaagugcgugaacuucaacuucaacggccucaccgggaccggcgugcugaccgagagcaacaagaaguuccugccguuccagcaguucgggcgcgacaucgccgacacgaccgacgcgguccgcgacccccagacccuggagauccucgacaucacccccugcagcuucggcgggguguccgugaucacgccgggcaccaacaccagcaaccaggucgccgugcuguaccagggcgugaacugcaccgagguccccguggccauccacgccgaccagcugacgcccaccuggcggguguacuccaccggcagcaacgucuuccagacccgcgccgggugccucaucggcgcggagcacgugaacaacuccuacgagugcgacauccccaucggggccggcaucugcgccagcuaccagacgcagaccaacuccccgcggcgcgcccggagcguggcgucccagagcaucaucgccuacaccaugucccugggcgccgagaacagcgucgccuacuccaacaacagcaucgccauccccaccaacuucacgaucuccgugaccaccgagauccugcccgugagcaugaccaagacgagcgucgacugcaccauguacaucugcggggacuccaccgagugcagcaaccuccugcugcaguacggcuccuucugcacccagcucaaccgcgcgcugacggggaucgccguggagcaggacaagaacacccaggagguguucgcccaggucaagcagaucuacaagacgcccccgaucaaggacuucggcggguucaacuucagccagauccugcccgaccccuccaagcccagcaagcgguccuucaucgaggaccuccuguucaacaaggugacccuggccgacgccggcuucaucaagcaguacggcgacugccucggggacaucgcggcccgcgaccugaucugcgcccagaaguucaacggccugaccgugcucccgccccugcugaccgacgagaugaucgcccaguacaccagcgcccuccuggcggggaccaucacguccggcuggaccuucggggccggcgccgcccugcagauccccuucgcgaugcagauggccuaccgguucaacggcaucggggucacccagaacgugcucuacgagaaccagaagcugaucgccaaccaguucaacagcgccaucggcaagauccaggacucccugagcuccaccgccagcgcgcucgggaagcugcaggacguggucaaccagaacgcccaggcccugaacacgcucgugaagcagcuguccagcaacuucggcgccaucuccagcgugcugaacgacauccucucccgccuggacaaggucgaggccgaggugcagaucgaccggcugaucaccgggcgccuccagagccugcagaccuacgugacccagcagcugauccgggcggccgagauccgcgccagcgccaaccucgccgcgaccaagauguccgagugcguccugggccagagcaagcggguggacuucugcggcaagggguaccaccugauguccuucccccagagcgccccgcacggcguggucuuccuccacgugacguacguccccgcccaggagaagaacuucaccaccgcccccgcgaucugccacgacgggaaggcccacuucccccgcgagggcguguucguguccaacgggacccacugguucgucacgcagcggaacuucuacgagccgcagaucaucaccaccgacaacaccuucgugagcggcaacugcgacguggucaucggcaucgugaacaacacgguguacgacccccugcagcccgagcuggacuccuucaaggaggagcucgacaaguacuucaagaaccacaccagccccgacgucgaccugggggacaucuccggcaucaacgccagcguggugaacauccagaaggagaucgaccgccugaacgaggucgccaagaaccucaacgagucccugaucgaccugcaggagcucgggaaguacgagcaguacaucaaguggccgugguacaucuggcugggcuucaucgccggccugaucgcgaucgugauggugaccaucaugcucugcugcaugaccagcugcugcuccugccugaaggggugcugcagcugcggcuccugcugcaaguucgacgaggacgacagcgagcccguccugaagggggugaagcuccacuacacgugaugacucgagcugguacugcaugcacgcaaugcuagcugccccuuucccguccuggguaccccgagucucccccgaccucgggucccagguaugcucccaccuccaccugccccacucaccaccucugcuaguuccagacaccucccaagcacgcagcaaugcagcucaaaacgcuuagccuagccacacccccacgggaaacagcagugauuaaccuuuagcaauaaacgaaaguuuaacuaagcuauacuaaccccaggguuggucaauuucgugccagccacacccuggagcuagcaaaaaaaaaaaaaaaaaaaaaaaaaaaaaagcauaugacuaaaaaaaaaaaaaaaaaaaaaaaaaaaaaaaaaaaaaaaaaaaaaaaaaaaaaaaaaaaaaaaaaaaaaa

SEQ ID NO: 26713 - RNA, 4283 nt, Artificial Sequence
  SARS-CoV-2/Wuhan/WIV05/2019__EPI_ISL_402128 spike protein mRNA gc (1-1273)(S477N_D614G)
agaauaaacuaguauucuucugguccccacagacucagagagaacccgccaccauguucguguuccugguccuccugccccuggugagcucccagugcgugaaccucaccacccgcacgcagcugccgcccgccuacaccaacagcuucacccggggcgucuacuaccccgacaagguguuccgcuccagcgugcugcacuccacccaggaccucuuccugcccuucuucagcaacgucacgugguuccacgccauccacguguccgggaccaacggcaccaagcgguucgacaacccggugcugcccuucaacgacggggucuacuucgcgagcaccgagaaguccaacaucauccgcggcuggaucuucgggacgacccucgacagcaagacccagucccugcugaucgugaacaacgccaccaacguggucaucaaggugugcgaguuccaguucugcaacgaccccuuccucggcguguacuaccacaagaacaacaagagcuggauggaguccgaguuccgggucuacagcuccgccaacaacugcacguucgaguacgugagccagcccuuccugauggaccuggagggcaagcaggggaacuucaagaaccuccgcgaguucguguucaagaacaucgacggcuacuucaagaucuacuccaagcacaccccgaucaaccugguccgggaccugccccagggguucagcgcccucgagccccugguggaccugcccaucggcaucaacaucacccgcuuccagacccuccuggcccugcaccgguccuaccucacgccgggggacagcagcuccggcuggaccgcgggcgccgccgccuacuacgugggguaccugcagccccgcaccuuccugcucaaguacaacgagaacggcaccaucacggacgcggucgacugcgcccuggacccccugagcgagaccaagugcacccucaaguccuucaccguggagaaggggaucuaccagacgagcaacuuccgggugcagcccaccgaguccaucguccgcuucccgaacaucaccaaccugugccccuucggcgagguguucaacgccacccgguucgccagcgucuacgccuggaaccgcaagcggaucuccaacugcguggcggacuacagcgugcuguacaacuccgccagcuucuccacguucaagugcuacggcgucagccccaccaagcucaacgaccugugcuucaccaacguguacgccgacuccuucgugauccgcggggacgagguccggcagaucgcccccggccagaccgggaagaucgccgacuacaacuacaagcugccggacgacuucacgggcugcgugaucgcguggaacagcaacaaccucgacuccaaggucgggggcaacuacaacuaccuguaccgccuguuccgcaagagcaaccucaagcccuucgagcgggacaucuccaccgagaucuaccaggccggcaacacccccugcaacgggguggagggcuucaacugcuacuucccccugcaguccuacggguuccagccgaccaacggcgugggguaccagcccuaccggguggucgugcugagcuucgagcuccugcacgcccccgccacggugugcggccccaagaaguccaccaaccuggucaagaacaagugcgugaacuucaacuucaacggccucaccgggaccggcgugcugaccgagagcaacaagaaguuccugccguuccagcaguucgggcgcgacaucgccgacacgaccgacgcgguccgcgacccccagacccuggagauccucgacaucacccccugcagcuucggcgggguguccgugaucacgccgggcaccaacaccagcaaccaggucgccgugcuguaccagggcgugaacugcaccgagguccccguggccauccacgccgaccagcugacgcccaccuggcggguguacuccaccggcagcaacgucuuccagacccgcgccgggugccucaucggcgcggagcacgugaacaacuccuacgagugcgacauccccaucggggccggcaucugcgccagcuaccagacgcagaccaacuccccgcggcgcgcccggagcguggcgucccagagcaucaucgccuacaccaugucccugggcgccgagaacagcgucgccuacuccaacaacagcaucgccauccccaccaacuucacgaucuccgugaccaccgagauccugcccgugagcaugaccaagacgagcgucgacugcaccauguacaucugcggggacuccaccgagugcagcaaccuccugcugcaguacggcuccuucugcacccagcucaaccgcgcgcugacggggaucgccguggagcaggacaagaacacccaggagguguucgcccaggucaagcagaucuacaagacgcccccgaucaaggacuucggcggguucaacuucagccagauccugcccgaccccuccaagcccagcaagcgguccuucaucgaggaccuccuguucaacaaggugacccuggccgacgccggcuucaucaagcaguacggcgacugccucggggacaucgcggcccgcgaccugaucugcgcccagaaguucaacggccugaccgugcucccgccccugcugaccgacgagaugaucgcccaguacaccagcgcccuccuggcggggaccaucacguccggcuggaccuucggggccggcgccgcccugcagauccccuucgcgaugcagauggccuaccgguucaacggcaucggggucacccagaacgugcucuacgagaaccagaagcugaucgccaaccaguucaacagcgccaucggcaagauccaggacucccugagcuccaccgccagcgcgcucgggaagcugcaggacguggucaaccagaacgcccaggcccugaacacgcucgugaagcagcuguccagcaacuucggcgccaucuccagcgugcugaacgacauccucucccgccuggacaaggucgaggccgaggugcagaucgaccggcugaucaccgggcgccuccagagccugcagaccuacgugacccagcagcugauccgggcggccgagauccgcgccagcgccaaccucgccgcgaccaagauguccgagugcguccugggccagagcaagcggguggacuucugcggcaagggguaccaccugauguccuucccccagagcgccccgcacggcguggucuuccuccacgugacguacguccccgcccaggagaagaacuucaccaccgcccccgcgaucugccacgacgggaaggcccacuucccccgcgagggcguguucguguccaacgggacccacugguucgucacgcagcggaacuucuacgagccgcagaucaucaccaccgacaacaccuucgugagcggcaacugcgacguggucaucggcaucgugaacaacacgguguacgacccccugcagcccgagcuggacuccuucaaggaggagcucgacaaguacuucaagaaccacaccagccccgacgucgaccugggggacaucuccggcaucaacgccagcguggugaacauccagaaggagaucgaccgccugaacgaggucgccaagaaccucaacgagucccugaucgaccugcaggagcucgggaaguacgagcaguacaucaaguggccgugguacaucuggcugggcuucaucgccggccugaucgcgaucgugauggugaccaucaugcucugcugcaugaccagcugcugcuccugccugaaggggugcugcagcugcggcuccugcugcaaguucgacgaggacgacagcgagcccguccugaagggggugaagcuccacuacacgugaugacucgagcugguacugcaugcacgcaaugcuagcugccccuuucccguccuggguaccccgagucucccccgaccucgggucccagguaugcucccaccuccaccugccccacucaccaccucugcuaguuccagacaccucccaagcacgcagcaaugcagcucaaaacgcuuagccuagccacacccccacgggaaacagcagugauuaaccuuuagcaauaaacgaaaguuuaacuaagcuauacuaaccccaggguuggucaauuucgugccagccacacccuggagcuagcaaaaaaaaaaaaaaaaaaaaaaaaaaaaaagcauaugacuaaaaaaaaaaaaaaaaaaaaaaaaaaaaaaaaaaaaaaaaaaaaaaaaaaaaaaaaaaaaaaaaaaaaaa

SEQ ID NO: 26714 - RNA, 4283 nt, Artificial Sequence
  SARS-CoV-2/Wuhan/WIV05/2019__EPI_ISL_402128 spike protein mRNA gc (1-1273)(N501Y_D614G)
agaauaaacuaguauucuucugguccccacagacucagagagaacccgccaccauguucguguuccugguccuccugccccuggugagcucccagugcgugaaccucaccacccgcacgcagcugccgcccgccuacaccaacagcuucacccggggcgucuacuaccccgacaagguguuccgcuccagcgugcugcacuccacccaggaccucuuccugcccuucuucagcaacgucacgugguuccacgccauccacguguccgggaccaacggcaccaagcgguucgacaacccggugcugcccuucaacgacggggucuacuucgcgagcaccgagaaguccaacaucauccgcggcuggaucuucgggacgacccucgacagcaagacccagucccugcugaucgugaacaacgccaccaacguggucaucaaggugugcgaguuccaguucugcaacgaccccuuccucggcguguacuaccacaagaacaacaagagcuggauggaguccgaguuccgggucuacagcuccgccaacaacugcacguucgaguacgugagccagcccuuccugauggaccuggagggcaagcaggggaacuucaagaaccuccgcgaguucguguucaagaacaucgacggcuacuucaagaucuacuccaagcacaccccgaucaaccugguccgggaccugccccagggguucagcgcccucgagccccugguggaccugcccaucggcaucaacaucacccgcuuccagacccuccuggcccugcaccgguccuaccucacgccgggggacagcagcuccggcuggaccgcgggcgccgccgccuacuacgugggguaccugcagccccgcaccuuccugcucaaguacaacgagaacggcaccaucacggacgcggucgacugcgcccuggacccccugagcgagaccaagugcacccucaaguccuucaccguggagaaggggaucuaccagacgagcaacuuccgggugcagcccaccgaguccaucguccgcuucccgaacaucaccaaccugugccccuucggcgagguguucaacgccacccgguucgccagcgucuacgccuggaaccgcaagcggaucuccaacugcguggcggacuacagcgugcuguacaacuccgccagcuucuccacguucaagugcuacggcgucagccccaccaagcucaacgaccugugcuucaccaacguguacgccgacuccuucgugauccgcggggacgagguccggcagaucgcccccggccagaccgggaagaucgccgacuacaacuacaagcugccggacgacuucacgggcugcgugaucgcguggaacagcaacaaccucgacuccaaggucgggggcaacuacaacuaccuguaccgccuguuccgcaagagcaaccucaagcccuucgagcgggacaucuccaccgagaucuaccaggccggcagcacccccugcaacgggguggagggcuucaacugcuacuucccccugcaguccuacggguuccagccgaccuacggcgugggguaccagcccuaccggguggucgugcugagcuucgagcuccugcacgcccccgccacggugugcggccccaagaaguccaccaaccuggucaagaacaagugcgugaacuucaacuucaacggccucaccgggaccggcgugcugaccgagagcaacaagaaguuccugccguuccagcaguucgggcgcgacaucgccgacacgaccgacgcgguccgcgacccccagacccuggagauccucgacaucacccccugcagcuucggcgggguguccgugaucacgccgggcaccaacaccagcaaccaggucgccgugcuguaccagggcgugaacugcaccgagguccccguggccauccacgccgaccagcugacgcccaccuggcggguguacuccaccggcagcaacgucuuccagacccgcgccgggugccucaucggcgcggagcacgugaacaacuccuacgagugcgacauccccaucggggccggcaucugcgccagcuaccagacgcagaccaacuccccgcggcgcgcccggagcguggcgucccagagcaucaucgccuacaccaugucccugggcgccgagaacagcgucgccuacuccaacaacagcaucgccauccccaccaacuucacgaucuccgugaccaccgagauccugcccgugagcaugaccaagacgagcgucgacugcaccauguacaucugcggggacuccaccgagugcagcaaccuccugcugcaguacggcuccuucugcacccagcucaaccgcgcgcugacggggaucgccguggagcaggacaagaacacccaggagguguucgcccaggucaagcagaucuacaagacgcccccgaucaaggacuucggcggguucaacuucagccagauccugcccgaccccuccaagcccagcaagcgguccuucaucgaggaccuccuguucaacaaggugacccuggccgacgccggcuucaucaagcaguacggcgacugccucggggacaucgcggcccgcgaccugaucugcgcccagaaguucaacggccugaccgugcucccgccccugcugaccgacgagaugaucgcccaguacaccagcgcccuccuggcggggaccaucacguccggcuggaccuucggggccggcgccgcccugcagauccccuucgcgaugcagauggccuaccgguucaacggcaucggggucacccagaacgugcucuacgagaaccagaagcugaucgccaaccaguucaacagcgccaucggcaagauccaggacucccugagcuccaccgccagcgcgcucgggaagcugcaggacguggucaaccagaacgcccaggcccugaacacgcucgugaagcagcuguccagcaacuucggcgccaucuccagcgugcugaacgacauccucucccgccuggacaaggucgaggccgaggugcagaucgaccggcugaucaccgggcgccuccagagccugcagaccuacgugacccagcagcugauccgggcggccgagauccgcgccagcgccaaccucgccgcgaccaagauguccgagugcguccugggccagagcaagcggguggacuucugcggcaagggguaccaccugauguccuucccccagagcgccccgcacggcguggucuuccuccacgugacguacguccccgcccaggagaagaacuucaccaccgcccccgcgaucugccacgacgggaaggcccacuucccccgcgagggcguguucguguccaacgggacccacugguucgucacgcagcggaacuucuacgagccgcagaucaucaccaccgacaacaccuucgugagcggcaacugcgacguggucaucggcaucgugaacaacacgguguacgacccccugcagcccgagcuggacuccuucaaggaggagcucgacaaguacuucaagaaccacaccagccccgacgucgaccugggggacaucuccggcaucaacgccagcguggugaacauccagaaggagaucgaccgccugaacgaggucgccaagaaccucaacgagucccugaucgaccugcaggagcucgggaaguacgagcaguacaucaaguggccgugguacaucuggcugggcuucaucgccggccugaucgcgaucgugauggugaccaucaugcucugcugcaugaccagcugcugcuccugccugaaggggugcugcagcugcggcuccugcugcaaguucgacgaggacgacagcgagcccguccugaagggggugaagcuccacuacacgugaugacucgagcugguacugcaugcacgcaaugcuagcugccccuuucccguccuggguaccccgagucucccccgaccucgggucccagguaugcucccaccuccaccugccccacucaccaccucugcuaguuccagacaccucccaagcacgcagcaaugcagcucaaaacgcuuagccuagccacacccccacgggaaacagcagugauuaaccuuuagcaauaaacgaaaguuuaacuaagcuauacuaaccccaggguuggucaauuucgugccagccacacccuggagcuagcaaaaaaaaaaaaaaaaaaaaaaaaaaaaaagcauaugacuaaaaaaaaaaaaaaaaaaaaaaaaaaaaaaaaaaaaaaaaaaaaaaaaaaaaaaaaaaaaaaaaaaaaaa

SEQ ID NO: 26715 - RNA, 4277 nt, Artificial Sequence
  SARS-CoV-2/Wuhan/WIV05/2019__EPI_ISL_402128 spike protein mRNA gc (1-1273)(H69del_V70del_D614G)
agaauaaacuaguauucuucugguccccacagacucagagagaacccgccaccauguucguguuccugguccuccugccccuggugagcucccagugcgugaaccucaccacccgcacgcagcugccgcccgccuacaccaacagcuucacccggggcgucuacuaccccgacaagguguuccgcuccagcgugcugcacuccacccaggaccucuuccugcccuucuucagcaacgucacgugguuccacgccaucuccgggaccaacggcaccaagcgguucgacaacccggugcugcccuucaacgacggggucuacuucgcgagcaccgagaaguccaacaucauccgcggcuggaucuucgggacgacccucgacagcaagacccagucccugcugaucgugaacaacgccaccaacguggucaucaaggugugcgaguuccaguucugcaacgaccccuuccucggcguguacuaccacaagaacaacaagagcuggauggaguccgaguuccgggucuacagcuccgccaacaacugcacguucgaguacgugagccagcccuuccugauggaccuggagggcaagcaggggaacuucaagaaccuccgcgaguucguguucaagaacaucgacggcuacuucaagaucuacuccaagcacaccccgaucaaccugguccgggaccugccccagggguucagcgcccucgagccccugguggaccugcccaucggcaucaacaucacccgcuuccagacccuccuggcccugcaccgguccuaccucacgccgggggacagcagcuccggcuggaccgcgggcgccgccgccuacuacgugggguaccugcagccccgcaccuuccugcucaaguacaacgagaacggcaccaucacggacgcggucgacugcgcccuggacccccugagcgagaccaagugcacccucaaguccuucaccguggagaaggggaucuaccagacgagcaacuuccgggugcagcccaccgaguccaucguccgcuucccgaacaucaccaaccugugccccuucggcgagguguucaacgccacccgguucgccagcgucuacgccuggaaccgcaagcggaucuccaacugcguggcggacuacagcgugcuguacaacuccgccagcuucuccacguucaagugcuacggcgucagccccaccaagcucaacgaccugugcuucaccaacguguacgccgacuccuucgugauccgcggggacgagguccggcagaucgcccccggccagaccgggaagaucgccgacuacaacuacaagcugccggacgacuucacgggcugcgugaucgcguggaacagcaacaaccucgacuccaaggucgggggcaacuacaacuaccuguaccgccuguuccgcaagagcaaccucaagcccuucgagcgggacaucuccaccgagaucuaccaggccggcagcacccccugcaacgggguggagggcuucaacugcuacuucccccugcaguccuacggguuccagccgaccaacggcgugggguaccagcccuaccggguggucgugcugagcuucgagcuccugcacgcccccgccacggugugcggccccaagaaguccaccaaccuggucaagaacaagugcgugaacuucaacuucaacggccucaccgggaccggcgugcugaccgagagcaacaagaaguuccugccguuccagcaguucgggcgcgacaucgccgacacgaccgacgcgguccgcgacccccagacccuggagauccucgacaucacccccugcagcuucggcgggguguccgugaucacgccgggcaccaacaccagcaaccaggucgccgugcuguaccagggcgugaacugcaccgagguccccguggccauccacgccgaccagcugacgcccaccuggcggguguacuccaccggcagcaacgucuuccagacccgcgccgggugccucaucggcgcggagcacgugaacaacuccuacgagugcgacauccccaucggggccggcaucugcgccagcuaccagacgcagaccaacuccccgcggcgcgcccggagcguggcgucccagagcaucaucgccuacaccaugucccugggcgccgagaacagcgucgccuacuccaacaacagcaucgccauccccaccaacuucacgaucuccgugaccaccgagauccugcccgugagcaugaccaagacgagcgucgacugcaccauguacaucugcggggacuccaccgagugcagcaaccuccugcugcaguacggcuccuucugcacccagcucaaccgcgcgcugacggggaucgccguggagcaggacaagaacacccaggagguguucgcccaggucaagcagaucuacaagacgcccccgaucaaggacuucggcggguucaacuucagccagauccugcccgaccccuccaagcccagcaagcgguccuucaucgaggaccuccuguucaacaaggugacccuggccgacgccggcuucaucaagcaguacggcgacugccucggggacaucgcggcccgcgaccugaucugcgcccagaaguucaacggccugaccgugcucccgccccugcugaccgacgagaugaucgcccaguacaccagcgcccuccuggcggggaccaucacguccggcuggaccuucggggccggcgccgcccugcagauccccuucgcgaugcagauggccuaccgguucaacggcaucggggucacccagaacgugcucuacgagaaccagaagcugaucgccaaccaguucaacagcgccaucggcaagauccaggacucccugagcuccaccgccagcgcgcucgggaagcugcaggacguggucaaccagaacgcccaggcccugaacacgcucgugaagcagcuguccagcaacuucggcgccaucuccagcgugcugaacgacauccucucccgccuggacaaggucgaggccgaggugcagaucgaccggcugaucaccgggcgccuccagagccugcagaccuacgugacccagcagcugauccgggcggccgagauccgcgccagcgccaaccucgccgcgaccaagauguccgagugcguccugggccagagcaagcggguggacuucugcggcaagggguaccaccugauguccuucccccagagcgccccgcacggcguggucuuccuccacgugacguacguccccgcccaggagaagaacuucaccaccgcccccgcgaucugccacgacgggaaggcccacuucccccgcgagggcguguucguguccaacgggacccacugguucgucacgcagcggaacuucuacgagccgcagaucaucaccaccgacaacaccuucgugagcggcaacugcgacguggucaucggcaucgugaacaacacgguguacgacccccugcagcccgagcuggacuccuucaaggaggagcucgacaaguacuucaagaaccacaccagccccgacgucgaccugggggacaucuccggcaucaacgccagcguggugaacauccagaaggagaucgaccgccugaacgaggucgccaagaaccucaacgagucccugaucgaccugcaggagcucgggaaguacgagcaguacaucaaguggccgugguacaucuggcugggcuucaucgccggccugaucgcgaucgugauggugaccaucaugcucugcugcaugaccagcugcugcuccugccugaaggggugcugcagcugcggcuccugcugcaaguucgacgaggacgacagcgagcccguccugaagggggugaagcuccacuacacgugaugacucgagcugguacugcaugcacgcaaugcuagcugccccuuucccguccuggguaccccgagucucccccgaccucgggucccagguaugcucccaccuccaccugccccacucaccaccucugcuaguuccagacaccucccaagcacgcagcaaugcagcucaaaacgcuuagccuagccacacccccacgggaaacagcagugauuaaccuuuagcaauaaacgaaaguuuaacuaagcuauacuaaccccaggguuggucaauuucgugccagccacacccuggagcuagcaaaaaaaaaaaaaaaaaaaaaaaaaaaaaagcauaugacuaaaaaaaaaaaaaaaaaaaaaaaaaaaaaaaaaaaaaaaaaaaaaaaaaaaaaaaaaaaaaaaaaaaaaa

SEQ ID NO: 26716 - RNA, 4283 nt, Artificial Sequence
  SARS-CoV-2/Wuhan/WIV05/2019__EPI_ISL_402128 spike protein mRNA gc (1-1273)(Y453F_D614G)
agaauaaacuaguauucuucugguccccacagacucagagagaacccgccaccauguucguguuccugguccuccugccccuggugagcucccagugcgugaaccucaccacccgcacgcagcugccgcccgccuacaccaacagcuucacccggggcgucuacuaccccgacaagguguuccgcuccagcgugcugcacuccacccaggaccucuuccugcccuucuucagcaacgucacgugguuccacgccauccacguguccgggaccaacggcaccaagcgguucgacaacccggugcugcccuucaacgacggggucuacuucgcgagcaccgagaaguccaacaucauccgcggcuggaucuucgggacgacccucgacagcaagacccagucccugcugaucgugaacaacgccaccaacguggucaucaaggugugcgaguuccaguucugcaacgaccccuuccucggcguguacuaccacaagaacaacaagagcuggauggaguccgaguuccgggucuacagcuccgccaacaacugcacguucgaguacgugagccagcccuuccugauggaccuggagggcaagcaggggaacuucaagaaccuccgcgaguucguguucaagaacaucgacggcuacuucaagaucuacuccaagcacaccccgaucaaccugguccgggaccugccccagggguucagcgcccucgagccccugguggaccugcccaucggcaucaacaucacccgcuuccagacccuccuggcccugcaccgguccuaccucacgccgggggacagcagcuccggcuggaccgcgggcgccgccgccuacuacgugggguaccugcagccccgcaccuuccugcucaaguacaacgagaacggcaccaucacggacgcggucgacugcgcccuggacccccugagcgagaccaagugcacccucaaguccuucaccguggagaaggggaucuaccagacgagcaacuuccgggugcagcccaccgaguccaucguccgcuucccgaacaucaccaaccugugccccuucggcgagguguucaacgccacccgguucgccagcgucuacgccuggaaccgcaagcggaucuccaacugcguggcggacuacagcgugcuguacaacuccgccagcuucuccacguucaagugcuacggcgucagccccaccaagcucaacgaccugugcuucaccaacguguacgccgacuccuucgugauccgcggggacgagguccggcagaucgcccccggccagaccgggaagaucgccgacuacaacuacaagcugccggacgacuucacgggcugcgugaucgcguggaacagcaacaaccucgacuccaaggucgggggcaacuacaacuaccuguuccgccuguuccgcaagagcaaccucaagcccuucgagcgggacaucuccaccgagaucuaccaggccggcagcacccccugcaacgggguggagggcuucaacugcuacuucccccugcaguccuacggguuccagccgaccaacggcgugggguaccagcccuaccggguggucgugcugagcuucgagcuccugcacgcccccgccacggugugcggccccaagaaguccaccaaccuggucaagaacaagugcgugaacuucaacuucaacggccucaccgggaccggcgugcugaccgagagcaacaagaaguuccugccguuccagcaguucgggcgcgacaucgccgacacgaccgacgcgguccgcgacccccagacccuggagauccucgacaucacccccugcagcuucggcgggguguccgugaucacgccgggcaccaacaccagcaaccaggucgccgugcuguaccagggcgugaacugcaccgagguccccguggccauccacgccgaccagcugacgcccaccuggcggguguacuccaccggcagcaacgucuuccagacccgcgccgggugccucaucggcgcggagcacgugaacaacuccuacgagugcgacauccccaucggggccggcaucugcgccagcuaccagacgcagaccaacuccccgcggcgcgcccggagcguggcgucccagagcaucaucgccuacaccaugucccugggcgccgagaacagcgucgccuacuccaacaacagcaucgccauccccaccaacuucacgaucuccgugaccaccgagauccugcccgugagcaugaccaagacgagcgucgacugcaccauguacaucugcggggacuccaccgagugcagcaaccuccugcugcaguacggcuccuucugcacccagcucaaccgcgcgcugacggggaucgccguggagcaggacaagaacacccaggagguguucgcccaggucaagcagaucuacaagacgcccccgaucaaggacuucggcggguucaacuucagccagauccugcccgaccccuccaagcccagcaagcgguccuucaucgaggaccuccuguucaacaaggugacccuggccgacgccggcuucaucaagcaguacggcgacugccucggggacaucgcggcccgcgaccugaucugcgcccagaaguucaacggccugaccgugcucccgccccugcugaccgacgagaugaucgcccaguacaccagcgcccuccuggcggggaccaucacguccggcuggaccuucggggccggcgccgcccugcagauccccuucgcgaugcagauggccuaccgguucaacggcaucggggucacccagaacgugcucuacgagaaccagaagcugaucgccaaccaguucaacagcgccaucggcaagauccaggacucccugagcuccaccgccagcgcgcucgggaagcugcaggacguggucaaccagaacgcccaggcccugaacacgcucgugaagcagcuguccagcaacuucggcgccaucuccagcgugcugaacgacauccucucccgccuggacaaggucgaggccgaggugcagaucgaccggcugaucaccgggcgccuccagagccugcagaccuacgugacccagcagcugauccgggcggccgagauccgcgccagcgccaaccucgccgcgaccaagauguccgagugcguccugggccagagcaagcggguggacuucugcggcaagggguaccaccugauguccuucccccagagcgccccgcacggcguggucuuccuccacgugacguacguccccgcccaggagaagaacuucaccaccgcccccgcgaucugccacgacgggaaggcccacuucccccgcgagggcguguucguguccaacgggacccacugguucgucacgcagcggaacuucuacgagccgcagaucaucaccaccgacaacaccuucgugagcggcaacugcgacguggucaucggcaucgugaacaacacgguguacgacccccugcagcccgagcuggacuccuucaaggaggagcucgacaaguacuucaagaaccacaccagccccgacgucgaccugggggacaucuccggcaucaacgccagcguggugaacauccagaaggagaucgaccgccugaacgaggucgccaagaaccucaacgagucccugaucgaccugcaggagcucgggaaguacgagcaguacaucaaguggccgugguacaucuggcugggcuucaucgccggccugaucgcgaucgugauggugaccaucaugcucugcugcaugaccagcugcugcuccugccugaaggggugcugcagcugcggcuccugcugcaaguucgacgaggacgacagcgagcccguccugaagggggugaagcuccacuacacgugaugacucgagcugguacugcaugcacgcaaugcuagcugccccuuucccguccuggguaccccgagucucccccgaccucgggucccagguaugcucccaccuccaccugccccacucaccaccucugcuaguuccagacaccucccaagcacgcagcaaugcagcucaaaacgcuuagccuagccacacccccacgggaaacagcagugauuaaccuuuagcaauaaacgaaaguuuaacuaagcuauacuaaccccaggguuggucaauuucgugccagccacacccuggagcuagcaaaaaaaaaaaaaaaaaaaaaaaaaaaaaagcauaugacuaaaaaaaaaaaaaaaaaaaaaaaaaaaaaaaaaaaaaaaaaaaaaaaaaaaaaaaaaaaaaaaaaaaaaa

SEQ ID NO: 26717 - RNA, 4283 nt, Artificial Sequence
  SARS-CoV-2/Wuhan/WIV05/2019__EPI_ISL_402128 spike protein mRNA gc (1-1273)(D614G_I692V)
agaauaaacuaguauucuucugguccccacagacucagagagaacccgccaccauguucguguuccugguccuccugccccuggugagcucccagugcgugaaccucaccacccgcacgcagcugccgcccgccuacaccaacagcuucacccggggcgucuacuaccccgacaagguguuccgcuccagcgugcugcacuccacccaggaccucuuccugcccuucuucagcaacgucacgugguuccacgccauccacguguccgggaccaacggcaccaagcgguucgacaacccggugcugcccuucaacgacggggucuacuucgcgagcaccgagaaguccaacaucauccgcggcuggaucuucgggacgacccucgacagcaagacccagucccugcugaucgugaacaacgccaccaacguggucaucaaggugugcgaguuccaguucugcaacgaccccuuccucggcguguacuaccacaagaacaacaagagcuggauggaguccgaguuccgggucuacagcuccgccaacaacugcacguucgaguacgugagccagcccuuccugauggaccuggagggcaagcaggggaacuucaagaaccuccgcgaguucguguucaagaacaucgacggcuacuucaagaucuacuccaagcacaccccgaucaaccugguccgggaccugccccagggguucagcgcccucgagccccugguggaccugcccaucggcaucaacaucacccgcuuccagacccuccuggcccugcaccgguccuaccucacgccgggggacagcagcuccggcuggaccgcgggcgccgccgccuacuacgugggguaccugcagccccgcaccuuccugcucaaguacaacgagaacggcaccaucacggacgcggucgacugcgcccuggacccccugagcgagaccaagugcacccucaaguccuucaccguggagaaggggaucuaccagacgagcaacuuccgggugcagcccaccgaguccaucguccgcuucccgaacaucaccaaccugugccccuucggcgagguguucaacgccacccgguucgccagcgucuacgccuggaaccgcaagcggaucuccaacugcguggcggacuacagcgugcuguacaacuccgccagcuucuccacguucaagugcuacggcgucagccccaccaagcucaacgaccugugcuucaccaacguguacgccgacuccuucgugauccgcggggacgagguccggcagaucgcccccggccagaccgggaagaucgccgacuacaacuacaagcugccggacgacuucacgggcugcgugaucgcguggaacagcaacaaccucgacuccaaggucgggggcaacuacaacuaccuguaccgccuguuccgcaagagcaaccucaagcccuucgagcgggacaucuccaccgagaucuaccaggccggcagcacccccugcaacgggguggagggcuucaacugcuacuucccccugcaguccuacggguuccagccgaccaacggcgugggguaccagcccuaccggguggucgugcugagcuucgagcuccugcacgcccccgccacggugugcggccccaagaaguccaccaaccuggucaagaacaagugcgugaacuucaacuucaacggccucaccgggaccggcgugcugaccgagagcaacaagaaguuccugccguuccagcaguucgggcgcgacaucgccgacacgaccgacgcgguccgcgacccccagacccuggagauccucgacaucacccccugcagcuucggcgggguguccgugaucacgccgggcaccaacaccagcaaccaggucgccgugcuguaccagggcgugaacugcaccgagguccccguggccauccacgccgaccagcugacgcccaccuggcggguguacuccaccggcagcaacgucuuccagacccgcgccgggugccucaucggcgcggagcacgugaacaacuccuacgagugcgacauccccaucggggccggcaucugcgccagcuaccagacgcagaccaacuccccgcggcgcgcccggagcguggcgucccagagcgucaucgccuacaccaugucccugggcgccgagaacagcgucgccuacuccaacaacagcaucgccauccccaccaacuucacgaucuccgugaccaccgagauccugcccgugagcaugaccaagacgagcgucgacugcaccauguacaucugcggggacuccaccgagugcagcaaccuccugcugcaguacggcuccuucugcacccagcucaaccgcgcgcugacggggaucgccguggagcaggacaagaacacccaggagguguucgcccaggucaagcagaucuacaagacgcccccgaucaaggacuucggcggguucaacuucagccagauccugcccgaccccuccaagcccagcaagcgguccuucaucgaggaccuccuguucaacaaggugacccuggccgacgccggcuucaucaagcaguacggcgacugccucggggacaucgcggcccgcgaccugaucugcgcccagaaguucaacggccugaccgugcucccgccccugcugaccgacgagaugaucgcccaguacaccagcgcccuccuggcggggaccaucacguccggcuggaccuucggggccggcgccgcccugcagauccccuucgcgaugcagauggccuaccgguucaacggcaucggggucacccagaacgugcucuacgagaaccagaagcugaucgccaaccaguucaacagcgccaucggcaagauccaggacucccugagcuccaccgccagcgcgcucgggaagcugcaggacguggucaaccagaacgcccaggcccugaacacgcucgugaagcagcuguccagcaacuucggcgccaucuccagcgugcugaacgacauccucucccgccuggacaaggucgaggccgaggugcagaucgaccggcugaucaccgggcgccuccagagccugcagaccuacgugacccagcagcugauccgggcggccgagauccgcgccagcgccaaccucgccgcgaccaagauguccgagugcguccugggccagagcaagcggguggacuucugcggcaagggguaccaccugauguccuucccccagagcgccccgcacggcguggucuuccuccacgugacguacguccccgcccaggagaagaacuucaccaccgcccccgcgaucugccacgacgggaaggcccacuucccccgcgagggcguguucguguccaacgggacccacugguucgucacgcagcggaacuucuacgagccgcagaucaucaccaccgacaacaccuucgugagcggcaacugcgacguggucaucggcaucgugaacaacacgguguacgacccccugcagcccgagcuggacuccuucaaggaggagcucgacaaguacuucaagaaccacaccagccccgacgucgaccugggggacaucuccggcaucaacgccagcguggugaacauccagaaggagaucgaccgccugaacgaggucgccaagaaccucaacgagucccugaucgaccugcaggagcucgggaaguacgagcaguacaucaaguggccgugguacaucuggcugggcuucaucgccggccugaucgcgaucgugauggugaccaucaugcucugcugcaugaccagcugcugcuccugccugaaggggugcugcagcugcggcuccugcugcaaguucgacgaggacgacagcgagcccguccugaagggggugaagcuccacuacacgugaugacucgagcugguacugcaugcacgcaaugcuagcugccccuuucccguccuggguaccccgagucucccccgaccucgggucccagguaugcucccaccuccaccugccccacucaccaccucugcuaguuccagacaccucccaagcacgcagcaaugcagcucaaaacgcuuagccuagccacacccccacgggaaacagcagugauuaaccuuuagcaauaaacgaaaguuuaacuaagcuauacuaaccccaggguuggucaauuucgugccagccacacccuggagcuagcaaaaaaaaaaaaaaaaaaaaaaaaaaaaaagcauaugacuaaaaaaaaaaaaaaaaaaaaaaaaaaaaaaaaaaaaaaaaaaaaaaaaaaaaaaaaaaaaaaaaaaaaaa

SEQ ID NO: 26718 - RNA, 4283 nt, Artificial Sequence
  SARS-CoV-2/Wuhan/WIV05/2019__EPI_ISL_402128 spike protein mRNA gc (1-1273)(D614G_M1229I)
agaauaaacuaguauucuucugguccccacagacucagagagaacccgccaccauguucguguuccugguccuccugccccuggugagcucccagugcgugaaccucaccacccgcacgcagcugccgcccgccuacaccaacagcuucacccggggcgucuacuaccccgacaagguguuccgcuccagcgugcugcacuccacccaggaccucuuccugcccuucuucagcaacgucacgugguuccacgccauccacguguccgggaccaacggcaccaagcgguucgacaacccggugcugcccuucaacgacggggucuacuucgcgagcaccgagaaguccaacaucauccgcggcuggaucuucgggacgacccucgacagcaagacccagucccugcugaucgugaacaacgccaccaacguggucaucaaggugugcgaguuccaguucugcaacgaccccuuccucggcguguacuaccacaagaacaacaagagcuggauggaguccgaguuccgggucuacagcuccgccaacaacugcacguucgaguacgugagccagcccuuccugauggaccuggagggcaagcaggggaacuucaagaaccuccgcgaguucguguucaagaacaucgacggcuacuucaagaucuacuccaagcacaccccgaucaaccugguccgggaccugccccagggguucagcgcccucgagccccugguggaccugcccaucggcaucaacaucacccgcuuccagacccuccuggcccugcaccgguccuaccucacgccgggggacagcagcuccggcuggaccgcgggcgccgccgccuacuacgugggguaccugcagccccgcaccuuccugcucaaguacaacgagaacggcaccaucacggacgcggucgacugcgcccuggacccccugagcgagaccaagugcacccucaaguccuucaccguggagaaggggaucuaccagacgagcaacuuccgggugcagcccaccgaguccaucguccgcuucccgaacaucaccaaccugugccccuucggcgagguguucaacgccacccgguucgccagcgucuacgccuggaaccgcaagcggaucuccaacugcguggcggacuacagcgugcuguacaacuccgccagcuucuccacguucaagugcuacggcgucagccccaccaagcucaacgaccugugcuucaccaacguguacgccgacuccuucgugauccgcggggacgagguccggcagaucgcccccggccagaccgggaagaucgccgacuacaacuacaagcugccggacgacuucacgggcugcgugaucgcguggaacagcaacaaccucgacuccaaggucgggggcaacuacaacuaccuguaccgccuguuccgcaagagcaaccucaagcccuucgagcgggacaucuccaccgagaucuaccaggccggcagcacccccugcaacgggguggagggcuucaacugcuacuucccccugcaguccuacggguuccagccgaccaacggcgugggguaccagcccuaccggguggucgugcugagcuucgagcuccugcacgcccccgccacggugugcggccccaagaaguccaccaaccuggucaagaacaagugcgugaacuucaacuucaacggccucaccgggaccggcgugcugaccgagagcaacaagaaguuccugccguuccagcaguucgggcgcgacaucgccgacacgaccgacgcgguccgcgacccccagacccuggagauccucgacaucacccccugcagcuucggcgggguguccgugaucacgccgggcaccaacaccagcaaccaggucgccgugcuguaccagggcgugaacugcaccgagguccccguggccauccacgccgaccagcugacgcccaccuggcggguguacuccaccggcagcaacgucuuccagacccgcgccgggugccucaucggcgcggagcacgugaacaacuccuacgagugcgacauccccaucggggccggcaucugcgccagcuaccagacgcagaccaacuccccgcggcgcgcccggagcguggcgucccagagcaucaucgccuacaccaugucccugggcgccgagaacagcgucgccuacuccaacaacagcaucgccauccccaccaacuucacgaucuccgugaccaccgagauccugcccgugagcaugaccaagacgagcgucgacugcaccauguacaucugcggggacuccaccgagugcagcaaccuccugcugcaguacggcuccuucugcacccagcucaaccgcgcgcugacggggaucgccguggagcaggacaagaacacccaggagguguucgcccaggucaagcagaucuacaagacgcccccgaucaaggacuucggcggguucaacuucagccagauccugcccgaccccuccaagcccagcaagcgguccuucaucgaggaccuccuguucaacaaggugacccuggccgacgccggcuucaucaagcaguacggcgacugccucggggacaucgcggcccgcgaccugaucugcgcccagaaguucaacggccugaccgugcucccgccccugcugaccgacgagaugaucgcccaguacaccagcgcccuccuggcggggaccaucacguccggcuggaccuucggggccggcgccgcccugcagauccccuucgcgaugcagauggccuaccgguucaacggcaucggggucacccagaacgugcucuacgagaaccagaagcugaucgccaaccaguucaacagcgccaucggcaagauccaggacucccugagcuccaccgccagcgcgcucgggaagcugcaggacguggucaaccagaacgcccaggcccugaacacgcucgugaagcagcuguccagcaacuucggcgccaucuccagcgugcugaacgacauccucucccgccuggacaaggucgaggccgaggugcagaucgaccggcugaucaccgggcgccuccagagccugcagaccuacgugacccagcagcugauccgggcggccgagauccgcgccagcgccaaccucgccgcgaccaagauguccgagugcguccugggccagagcaagcggguggacuucugcggcaagggguaccaccugauguccuucccccagagcgccccgcacggcguggucuuccuccacgugacguacguccccgcccaggagaagaacuucaccaccgcccccgcgaucugccacgacgggaaggcccacuucccccgcgagggcguguucguguccaacgggacccacugguucgucacgcagcggaacuucuacgagccgcagaucaucaccaccgacaacaccuucgugagcggcaacugcgacguggucaucggcaucgugaacaacacgguguacgacccccugcagcccgagcuggacuccuucaaggaggagcucgacaaguacuucaagaaccacaccagccccgacgucgaccugggggacaucuccggcaucaacgccagcguggugaacauccagaaggagaucgaccgccugaacgaggucgccaagaaccucaacgagucccugaucgaccugcaggagcucgggaaguacgagcaguacaucaaguggccgugguacaucuggcugggcuucaucgccggccugaucgcgaucgugaucgugaccaucaugcucugcugcaugaccagcugcugcuccugccugaaggggugcugcagcugcggcuccugcugcaaguucgacgaggacgacagcgagcccguccugaagggggugaagcuccacuacacgugaugacucgagcugguacugcaugcacgcaaugcuagcugccccuuucccguccuggguaccccgagucucccccgaccucgggucccagguaugcucccaccuccaccugccccacucaccaccucugcuaguuccagacaccucccaagcacgcagcaaugcagcucaaaacgcuuagccuagccacacccccacgggaaacagcagugauuaaccuuuagcaauaaacgaaaguuuaacuaagcuauacuaaccccaggguuggucaauuucgugccagccacacccuggagcuagcaaaaaaaaaaaaaaaaaaaaaaaaaaaaaagcauaugacuaaaaaaaaaaaaaaaaaaaaaaaaaaaaaaaaaaaaaaaaaaaaaaaaaaaaaaaaaaaaaaaaaaaaaa

SEQ ID NO: 26719 - RNA, 4277 nt, Artificial Sequence
  SARS-CoV-2/Wuhan/WIV05/2019__EPI_ISL_402128 spike protein mRNA gc (1-1273)(H69del_V70del_A222V_Y453F_S477N_D614G_I692V)
agaauaaacuaguauucuucugguccccacagacucagagagaacccgccaccauguucguguuccugguccuccugccccuggugagcucccagugcgugaaccucaccacccgcacgcagcugccgcccgccuacaccaacagcuucacccggggcgucuacuaccccgacaagguguuccgcuccagcgugcugcacuccacccaggaccucuuccugcccuucuucagcaacgucacgugguuccacgccaucuccgggaccaacggcaccaagcgguucgacaacccggugcugcccuucaacgacggggucuacuucgcgagcaccgagaaguccaacaucauccgcggcuggaucuucgggacgacccucgacagcaagacccagucccugcugaucgugaacaacgccaccaacguggucaucaaggugugcgaguuccaguucugcaacgaccccuuccucggcguguacuaccacaagaacaacaagagcuggauggaguccgaguuccgggucuacagcuccgccaacaacugcacguucgaguacgugagccagcccuuccugauggaccuggagggcaagcaggggaacuucaagaaccuccgcgaguucguguucaagaacaucgacggcuacuucaagaucuacuccaagcacaccccgaucaaccugguccgggaccugccccagggguucagcguccucgagccccugguggaccugcccaucggcaucaacaucacccgcuuccagacccuccuggcccugcaccgguccuaccucacgccgggggacagcagcuccggcuggaccgcgggcgccgccgccuacuacgugggguaccugcagccccgcaccuuccugcucaaguacaacgagaacggcaccaucacggacgcggucgacugcgcccuggacccccugagcgagaccaagugcacccucaaguccuucaccguggagaaggggaucuaccagacgagcaacuuccgggugcagcccaccgaguccaucguccgcuucccgaacaucaccaaccugugccccuucggcgagguguucaacgccacccgguucgccagcgucuacgccuggaaccgcaagcggaucuccaacugcguggcggacuacagcgugcuguacaacuccgccagcuucuccacguucaagugcuacggcgucagccccaccaagcucaacgaccugugcuucaccaacguguacgccgacuccuucgugauccgcggggacgagguccggcagaucgcccccggccagaccgggaagaucgccgacuacaacuacaagcugccggacgacuucacgggcugcgugaucgcguggaacagcaacaaccucgacuccaaggucgggggcaacuacaacuaccuguuccgccuguuccgcaagagcaaccucaagcccuucgagcgggacaucuccaccgagaucuaccaggccggcaacacccccugcaacgggguggagggcuucaacugcuacuucccccugcaguccuacggguuccagccgaccaacggcgugggguaccagcccuaccggguggucgugcugagcuucgagcuccugcacgcccccgccacggugugcggccccaagaaguccaccaaccuggucaagaacaagugcgugaacuucaacuucaacggccucaccgggaccggcgugcugaccgagagcaacaagaaguuccugccguuccagcaguucgggcgcgacaucgccgacacgaccgacgcgguccgcgacccccagacccuggagauccucgacaucacccccugcagcuucggcgggguguccgugaucacgccgggcaccaacaccagcaaccaggucgccgugcuguaccagggcgugaacugcaccgagguccccguggccauccacgccgaccagcugacgcccaccuggcggguguacuccaccggcagcaacgucuuccagacccgcgccgggugccucaucggcgcggagcacgugaacaacuccuacgagugcgacauccccaucggggccggcaucugcgccagcuaccagacgcagaccaacuccccgcggcgcgcccggagcguggcgucccagagcgucaucgccuacaccaugucccugggcgccgagaacagcgucgccuacuccaacaacagcaucgccauccccaccaacuucacgaucuccgugaccaccgagauccugcccgugagcaugaccaagacgagcgucgacugcaccauguacaucugcggggacuccaccgagugcagcaaccuccugcugcaguacggcuccuucugcacccagcucaaccgcgcgcugacggggaucgccguggagcaggacaagaacacccaggagguguucgcccaggucaagcagaucuacaagacgcccccgaucaaggacuucggcggguucaacuucagccagauccugcccgaccccuccaagcccagcaagcgguccuucaucgaggaccuccuguucaacaaggugacccuggccgacgccggcuucaucaagcaguacggcgacugccucggggacaucgcggcccgcgaccugaucugcgcccagaaguucaacggccugaccgugcucccgccccugcugaccgacgagaugaucgcccaguacaccagcgcccuccuggcggggaccaucacguccggcuggaccuucggggccggcgccgcccugcagauccccuucgcgaugcagauggccuaccgguucaacggcaucggggucacccagaacgugcucuacgagaaccagaagcugaucgccaaccaguucaacagcgccaucggcaagauccaggacucccugagcuccaccgccagcgcgcucgggaagcugcaggacguggucaaccagaacgcccaggcccugaacacgcucgugaagcagcuguccagcaacuucggcgccaucuccagcgugcugaacgacauccucucccgccuggacaaggucgaggccgaggugcagaucgaccggcugaucaccgggcgccuccagagccugcagaccuacgugacccagcagcugauccgggcggccgagauccgcgccagcgccaaccucgccgcgaccaagauguccgagugcguccugggccagagcaagcggguggacuucugcggcaagggguaccaccugauguccuucccccagagcgccccgcacggcguggucuuccuccacgugacguacguccccgcccaggagaagaacuucaccaccgcccccgcgaucugccacgacgggaaggcccacuucccccgcgagggcguguucguguccaacgggacccacugguucgucacgcagcggaacuucuacgagccgcagaucaucaccaccgacaacaccuucgugagcggcaacugcgacguggucaucggcaucgugaacaacacgguguacgacccccugcagcccgagcuggacuccuucaaggaggagcucgacaaguacuucaagaaccacaccagccccgacgucgaccugggggacaucuccggcaucaacgccagcguggugaacauccagaaggagaucgaccgccugaacgaggucgccaagaaccucaacgagucccugaucgaccugcaggagcucgggaaguacgagcaguacaucaaguggccgugguacaucuggcugggcuucaucgccggccugaucgcgaucgugauggugaccaucaugcucugcugcaugaccagcugcugcuccugccugaaggggugcugcagcugcggcuccugcugcaaguucgacgaggacgacagcgagcccguccugaagggggugaagcuccacuacacgugaugacucgagcugguacugcaugcacgcaaugcuagcugccccuuucccguccuggguaccccgagucucccccgaccucgggucccagguaugcucccaccuccaccugccccacucaccaccucugcuaguuccagacaccucccaagcacgcagcaaugcagcucaaaacgcuuagccuagccacacccccacgggaaacagcagugauuaaccuuuagcaauaaacgaaaguuuaacuaagcuauacuaaccccaggguuggucaauuucgugccagccacacccuggagcuagcaaaaaaaaaaaaaaaaaaaaaaaaaaaaaagcauaugacuaaaaaaaaaaaaaaaaaaaaaaaaaaaaaaaaaaaaaaaaaaaaaaaaaaaaaaaaaaaaaaaaaaaaaa

SEQ ID NO: 26720 - RNA, 4277 nt, Artificial Sequence
  SARS-CoV-2/Wuhan/WIV05/2019__EPI_ISL_402128 spike protein mRNA gc (1-1273)(H69del_V70del_Y453F_D614G_I692V_M1229I)
agaauaaacuaguauucuucugguccccacagacucagagagaacccgccaccauguucguguuccugguccuccugccccuggugagcucccagugcgugaaccucaccacccgcacgcagcugccgcccgccuacaccaacagcuucacccggggcgucuacuaccccgacaagguguuccgcuccagcgugcugcacuccacccaggaccucuuccugcccuucuucagcaacgucacgugguuccacgccaucuccgggaccaacggcaccaagcgguucgacaacccggugcugcccuucaacgacggggucuacuucgcgagcaccgagaaguccaacaucauccgcggcuggaucuucgggacgacccucgacagcaagacccagucccugcugaucgugaacaacgccaccaacguggucaucaaggugugcgaguuccaguucugcaacgaccccuuccucggcguguacuaccacaagaacaacaagagcuggauggaguccgaguuccgggucuacagcuccgccaacaacugcacguucgaguacgugagccagcccuuccugauggaccuggagggcaagcaggggaacuucaagaaccuccgcgaguucguguucaagaacaucgacggcuacuucaagaucuacuccaagcacaccccgaucaaccugguccgggaccugccccagggguucagcgcccucgagccccugguggaccugcccaucggcaucaacaucacccgcuuccagacccuccuggcccugcaccgguccuaccucacgccgggggacagcagcuccggcuggaccgcgggcgccgccgccuacuacgugggguaccugcagccccgcaccuuccugcucaaguacaacgagaacggcaccaucacggacgcggucgacugcgcccuggacccccugagcgagaccaagugcacccucaaguccuucaccguggagaaggggaucuaccagacgagcaacuuccgggugcagcccaccgaguccaucguccgcuucccgaacaucaccaaccugugccccuucggcgagguguucaacgccacccgguucgccagcgucuacgccuggaaccgcaagcggaucuccaacugcguggcggacuacagcgugcuguacaacuccgccagcuucuccacguucaagugcuacggcgucagccccaccaagcucaacgaccugugcuucaccaacguguacgccgacuccuucgugauccgcggggacgagguccggcagaucgcccccggccagaccgggaagaucgccgacuacaacuacaagcugccggacgacuucacgggcugcgugaucgcguggaacagcaacaaccucgacuccaaggucgggggcaacuacaacuaccuguuccgccuguuccgcaagagcaaccucaagcccuucgagcgggacaucuccaccgagaucuaccaggccggcagcacccccugcaacgggguggagggcuucaacugcuacuucccccugcaguccuacggguuccagccgaccaacggcgugggguaccagcccuaccggguggucgugcugagcuucgagcuccugcacgcccccgccacggugugcggccccaagaaguccaccaaccuggucaagaacaagugcgugaacuucaacuucaacggccucaccgggaccggcgugcugaccgagagcaacaagaaguuccugccguuccagcaguucgggcgcgacaucgccgacacgaccgacgcgguccgcgacccccagacccuggagauccucgacaucacccccugcagcuucggcgggguguccgugaucacgccgggcaccaacaccagcaaccaggucgccgugcuguaccagggcgugaacugcaccgagguccccguggccauccacgccgaccagcugacgcccaccuggcggguguacuccaccggcagcaacgucuuccagacccgcgccgggugccucaucggcgcggagcacgugaacaacuccuacgagugcgacauccccaucggggccggcaucugcgccagcuaccagacgcagaccaacuccccgcggcgcgcccggagcguggcgucccagagcgugaucgccuacaccaugucccugggcgccgagaacagcgucgccuacuccaacaacagcaucgccauccccaccaacuucacgaucuccgugaccaccgagauccugcccgugagcaugaccaagacgagcgucgacugcaccauguacaucugcggggacuccaccgagugcagcaaccuccugcugcaguacggcuccuucugcacccagcucaaccgcgcgcugacggggaucgccguggagcaggacaagaacacccaggagguguucgcccaggucaagcagaucuacaagacgcccccgaucaaggacuucggcggguucaacuucagccagauccugcccgaccccuccaagcccagcaagcgguccuucaucgaggaccuccuguucaacaaggugacccuggccgacgccggcuucaucaagcaguacggcgacugccucggggacaucgcggcccgcgaccugaucugcgcccagaaguucaacggccugaccgugcucccgccccugcugaccgacgagaugaucgcccaguacaccagcgcccuccuggcggggaccaucacguccggcuggaccuucggggccggcgccgcccugcagauccccuucgcgaugcagauggccuaccgguucaacggcaucggggucacccagaacgugcucuacgagaaccagaagcugaucgccaaccaguucaacagcgccaucggcaagauccaggacucccugagcuccaccgccagcgcgcucgggaagcugcaggacguggucaaccagaacgcccaggcccugaacacgcucgugaagcagcuguccagcaacuucggcgccaucuccagcgugcugaacgacauccucucccgccuggacaaggucgaggccgaggugcagaucgaccggcugaucaccgggcgccuccagagccugcagaccuacgugacccagcagcugauccgggcggccgagauccgcgccagcgccaaccucgccgcgaccaagauguccgagugcguccugggccagagcaagcggguggacuucugcggcaagggguaccaccugauguccuucccccagagcgccccgcacggcguggucuuccuccacgugacguacguccccgcccaggagaagaacuucaccaccgcccccgcgaucugccacgacgggaaggcccacuucccccgcgagggcguguucguguccaacgggacccacugguucgucacgcagcggaacuucuacgagccgcagaucaucaccaccgacaacaccuucgugagcggcaacugcgacguggucaucggcaucgugaacaacacgguguacgacccccugcagcccgagcuggacuccuucaaggaggagcucgacaaguacuucaagaaccacaccagccccgacgucgaccugggggacaucuccggcaucaacgccagcguggugaacauccagaaggagaucgaccgccugaacgaggucgccaagaaccucaacgagucccugaucgaccugcaggagcucgggaaguacgagcaguacaucaaguggccgugguacaucuggcugggcuucaucgccggccugaucgcgaucgugaucgugaccaucaugcucugcugcaugaccagcugcugcuccugccugaaggggugcugcagcugcggcuccugcugcaaguucgacgaggacgacagcgagcccguccugaagggggugaagcuccacuacacgugaugacucgagcugguacugcaugcacgcaaugcuagcugccccuuucccguccuggguaccccgagucucccccgaccucgggucccagguaugcucccaccuccaccugccccacucaccaccucugcuaguuccagacaccucccaagcacgcagcaaugcagcucaaaacgcuuagccuagccacacccccacgggaaacagcagugauuaaccuuuagcaauaaacgaaaguuuaacuaagcuauacuaaccccaggguuggucaauuucgugccagccacacccuggagcuagcaaaaaaaaaaaaaaaaaaaaaaaaaaaaaagcauaugacuaaaaaaaaaaaaaaaaaaaaaaaaaaaaaaaaaaaaaaaaaaaaaaaaaaaaaaaaaaaaaaaaaaaaaa

SEQ ID NO: 26721 - RNA, 4274 nt, Artificial Sequence
  SARS-CoV-2/Wuhan/WIV05/2019__EPI_ISL_402128 spike protein mRNA gc (1-1273)(H69del_V70del_Y144del_N501Y_A570D_D614G_P681H_T716I_S982 A_D1118H)
agaauaaacuaguauucuucugguccccacagacucagagagaacccgccaccauguucguguuccugguccuccugccccuggugagcucccagugcgugaaccucaccacccgcacgcagcugccgcccgccuacaccaacagcuucacccggggcgucuacuaccccgacaagguguuccgcuccagcgugcugcacuccacccaggaccucuuccugcccuucuucagcaacgucacgugguuccacgccaucuccgggaccaacggcaccaagcgguucgacaacccggugcugcccuucaacgacggggucuacuucgcgagcaccgagaaguccaacaucauccgcggcuggaucuucgggacgacccucgacagcaagacccagucccugcugaucgugaacaacgccaccaacguggucaucaaggugugcgaguuccaguucugcaacgaccccuuccucggcguguaccacaagaacaacaagagcuggauggaguccgaguuccgggucuacagcuccgccaacaacugcacguucgaguacgugagccagcccuuccugauggaccuggagggcaagcaggggaacuucaagaaccuccgcgaguucguguucaagaacaucgacggcuacuucaagaucuacuccaagcacaccccgaucaaccugguccgggaccugccccagggguucagcgcccucgagccccugguggaccugcccaucggcaucaacaucacccgcuuccagacccuccuggcccugcaccgguccuaccucacgccgggggacagcagcuccggcuggaccgcgggcgccgccgccuacuacgugggguaccugcagccccgcaccuuccugcucaaguacaacgagaacggcaccaucacggacgcggucgacugcgcccuggacccccugagcgagaccaagugcacccucaaguccuucaccguggagaaggggaucuaccagacgagcaacuuccgggugcagcccaccgaguccaucguccgcuucccgaacaucaccaaccugugccccuucggcgagguguucaacgccacccgguucgccagcgucuacgccuggaaccgcaagcggaucuccaacugcguggcggacuacagcgugcuguacaacuccgccagcuucuccacguucaagugcuacggcgucagccccaccaagcucaacgaccugugcuucaccaacguguacgccgacuccuucgugauccgcggggacgagguccggcagaucgcccccggccagaccgggaagaucgccgacuacaacuacaagcugccggacgacuucacgggcugcgugaucgcguggaacagcaacaaccucgacuccaaggucgggggcaacuacaacuaccuguaccgccuguuccgcaagagcaaccucaagcccuucgagcgggacaucuccaccgagaucuaccaggccggcagcacccccugcaacgggguggagggcuucaacugcuacuucccccugcaguccuacggguuccagccgaccuacggcgugggguaccagcccuaccggguggucgugcugagcuucgagcuccugcacgcccccgccacggugugcggccccaagaaguccaccaaccuggucaagaacaagugcgugaacuucaacuucaacggccucaccgggaccggcgugcugaccgagagcaacaagaaguuccugccguuccagcaguucgggcgcgacaucgacgacacgaccgacgcgguccgcgacccccagacccuggagauccucgacaucacccccugcagcuucggcgggguguccgugaucacgccgggcaccaacaccagcaaccaggucgccgugcuguaccagggcgugaacugcaccgagguccccguggccauccacgccgaccagcugacgcccaccuggcggguguacuccaccggcagcaacgucuuccagacccgcgccgggugccucaucggcgcggagcacgugaacaacuccuacgagugcgacauccccaucggggccggcaucugcgccagcuaccagacgcagaccaacucccaccggcgcgcccggagcguggcgucccagagcaucaucgccuacaccaugucccugggcgccgagaacagcgucgccuacuccaacaacagcaucgccauccccaucaacuucacgaucuccgugaccaccgagauccugcccgugagcaugaccaagacgagcgucgacugcaccauguacaucugcggggacuccaccgagugcagcaaccuccugcugcaguacggcuccuucugcacccagcucaaccgcgcgcugacggggaucgccguggagcaggacaagaacacccaggagguguucgcccaggucaagcagaucuacaagacgcccccgaucaaggacuucggcggguucaacuucagccagauccugcccgaccccuccaagcccagcaagcgguccuucaucgaggaccuccuguucaacaaggugacccuggccgacgccggcuucaucaagcaguacggcgacugccucggggacaucgcggcccgcgaccugaucugcgcccagaaguucaacggccugaccgugcucccgccccugcugaccgacgagaugaucgcccaguacaccagcgcccuccuggcggggaccaucacguccggcuggaccuucggggccggcgccgcccugcagauccccuucgcgaugcagauggccuaccgguucaacggcaucggggucacccagaacgugcucuacgagaaccagaagcugaucgccaaccaguucaacagcgccaucggcaagauccaggacucccugagcuccaccgccagcgcgcucgggaagcugcaggacguggucaaccagaacgcccaggcccugaacacgcucgugaagcagcuguccagcaacuucggcgccaucuccagcgugcugaacgacauccucgcccgccuggacaaggucgaggccgaggugcagaucgaccggcugaucaccgggcgccuccagagccugcagaccuacgugacccagcagcugauccgggcggccgagauccgcgccagcgccaaccucgccgcgaccaagauguccgagugcguccugggccagagcaagcggguggacuucugcggcaagggguaccaccugauguccuucccccagagcgccccgcacggcguggucuuccuccacgugacguacguccccgcccaggagaagaacuucaccaccgcccccgcgaucugccacgacgggaaggcccacuucccccgcgagggcguguucguguccaacgggacccacugguucgucacgcagcggaacuucuacgagccgcagaucaucaccacccacaacaccuucgugagcggcaacugcgacguggucaucggcaucgugaacaacacgguguacgacccccugcagcccgagcuggacuccuucaaggaggagcucgacaaguacuucaagaaccacaccagccccgacgucgaccugggggacaucuccggcaucaacgccagcguggugaacauccagaaggagaucgaccgccugaacgaggucgccaagaaccucaacgagucccugaucgaccugcaggagcucgggaaguacgagcaguacaucaaguggccgugguacaucuggcugggcuucaucgccggccugaucgcgaucgugauggugaccaucaugcucugcugcaugaccagcugcugcuccugccugaaggggugcugcagcugcggcuccugcugcaaguucgacgaggacgacagcgagcccguccugaagggggugaagcuccacuacacgugaugacucgagcugguacugcaugcacgcaaugcuagcugccccuuucccguccuggguaccccgagucucccccgaccucgggucccagguaugcucccaccuccaccugccccacucaccaccucugcuaguuccagacaccucccaagcacgcagcaaugcagcucaaaacgcuuagccuagccacacccccacgggaaacagcagugauuaaccuuuagcaauaaacgaaaguuuaacuaagcuauacuaaccccaggguuggucaauuucgugccagccacacccuggagcuagcaaaaaaaaaaaaaaaaaaaaaaaaaaaaaagcauaugacuaaaaaaaaaaaaaaaaaaaaaaaaaaaaaaaaaaaaaaaaaaaaaaaaaaaaaaaaaaaaaaaaaaaaaa

SEQ ID NO: 26722 - RNA, 4283 nt, Artificial Sequence
  SARS-CoV-2/Wuhan/WIV05/2019__EPI_ISL_402128 spike protein mRNA gc (1-1273)(K417N_E484K_N501Y_D614G)
agaauaaacuaguauucuucugguccccacagacucagagagaacccgccaccauguucguguuccugguccuccugccccuggugagcucccagugcgugaaccucaccacccgcacgcagcugccgcccgccuacaccaacagcuucacccggggcgucuacuaccccgacaagguguuccgcuccagcgugcugcacuccacccaggaccucuuccugcccuucuucagcaacgucacgugguuccacgccauccacguguccgggaccaacggcaccaagcgguucgacaacccggugcugcccuucaacgacggggucuacuucgcgagcaccgagaaguccaacaucauccgcggcuggaucuucgggacgacccucgacagcaagacccagucccugcugaucgugaacaacgccaccaacguggucaucaaggugugcgaguuccaguucugcaacgaccccuuccucggcguguacuaccacaagaacaacaagagcuggauggaguccgaguuccgggucuacagcuccgccaacaacugcacguucgaguacgugagccagcccuuccugauggaccuggagggcaagcaggggaacuucaagaaccuccgcgaguucguguucaagaacaucgacggcuacuucaagaucuacuccaagcacaccccgaucaaccugguccgggaccugccccagggguucagcgcccucgagccccugguggaccugcccaucggcaucaacaucacccgcuuccagacccuccuggcccugcaccgguccuaccucacgccgggggacagcagcuccggcuggaccgcgggcgccgccgccuacuacgugggguaccugcagccccgcaccuuccugcucaaguacaacgagaacggcaccaucacggacgcggucgacugcgcccuggacccccugagcgagaccaagugcacccucaaguccuucaccguggagaaggggaucuaccagacgagcaacuuccgggugcagcccaccgaguccaucguccgcuucccgaacaucaccaaccugugccccuucggcgagguguucaacgccacccgguucgccagcgucuacgccuggaaccgcaagcggaucuccaacugcguggcggacuacagcgugcuguacaacuccgccagcuucuccacguucaagugcuacggcgucagccccaccaagcucaacgaccugugcuucaccaacguguacgccgacuccuucgugauccgcggggacgagguccggcagaucgcccccggccagaccgggaacaucgccgacuacaacuacaagcugccggacgacuucacgggcugcgugaucgcguggaacagcaacaaccucgacuccaaggucgggggcaacuacaacuaccuguaccgccuguuccgcaagagcaaccucaagcccuucgagcgggacaucuccaccgagaucuaccaggccggcagcacccccugcaacggggugaagggcuucaacugcuacuucccccugcaguccuacggguuccagccgaccuacggcgugggguaccagcccuaccggguggucgugcugagcuucgagcuccugcacgcccccgccacggugugcggccccaagaaguccaccaaccuggucaagaacaagugcgugaacuucaacuucaacggccucaccgggaccggcgugcugaccgagagcaacaagaaguuccugccguuccagcaguucgggcgcgacaucgccgacacgaccgacgcgguccgcgacccccagacccuggagauccucgacaucacccccugcagcuucggcgggguguccgugaucacgccgggcaccaacaccagcaaccaggucgccgugcuguaccagggcgugaacugcaccgagguccccguggccauccacgccgaccagcugacgcccaccuggcggguguacuccaccggcagcaacgucuuccagacccgcgccgggugccucaucggcgcggagcacgugaacaacuccuacgagugcgacauccccaucggggccggcaucugcgccagcuaccagacgcagaccaacuccccgcggcgcgcccggagcguggcgucccagagcaucaucgccuacaccaugucccugggcgccgagaacagcgucgccuacuccaacaacagcaucgccauccccaccaacuucacgaucuccgugaccaccgagauccugcccgugagcaugaccaagacgagcgucgacugcaccauguacaucugcggggacuccaccgagugcagcaaccuccugcugcaguacggcuccuucugcacccagcucaaccgcgcgcugacggggaucgccguggagcaggacaagaacacccaggagguguucgcccaggucaagcagaucuacaagacgcccccgaucaaggacuucggcggguucaacuucagccagauccugcccgaccccuccaagcccagcaagcgguccuucaucgaggaccuccuguucaacaaggugacccuggccgacgccggcuucaucaagcaguacggcgacugccucggggacaucgcggcccgcgaccugaucugcgcccagaaguucaacggccugaccgugcucccgccccugcugaccgacgagaugaucgcccaguacaccagcgcccuccuggcggggaccaucacguccggcuggaccuucggggccggcgccgcccugcagauccccuucgcgaugcagauggccuaccgguucaacggcaucggggucacccagaacgugcucuacgagaaccagaagcugaucgccaaccaguucaacagcgccaucggcaagauccaggacucccugagcuccaccgccagcgcgcucgggaagcugcaggacguggucaaccagaacgcccaggcccugaacacgcucgugaagcagcuguccagcaacuucggcgccaucuccagcgugcugaacgacauccucucccgccuggacaaggucgaggccgaggugcagaucgaccggcugaucaccgggcgccuccagagccugcagaccuacgugacccagcagcugauccgggcggccgagauccgcgccagcgccaaccucgccgcgaccaagauguccgagugcguccugggccagagcaagcggguggacuucugcggcaagggguaccaccugauguccuucccccagagcgccccgcacggcguggucuuccuccacgugacguacguccccgcccaggagaagaacuucaccaccgcccccgcgaucugccacgacgggaaggcccacuucccccgcgagggcguguucguguccaacgggacccacugguucgucacgcagcggaacuucuacgagccgcagaucaucaccaccgacaacaccuucgugagcggcaacugcgacguggucaucggcaucgugaacaacacgguguacgacccccugcagcccgagcuggacuccuucaaggaggagcucgacaaguacuucaagaaccacaccagccccgacgucgaccugggggacaucuccggcaucaacgccagcguggugaacauccagaaggagaucgaccgccugaacgaggucgccaagaaccucaacgagucccugaucgaccugcaggagcucgggaaguacgagcaguacaucaaguggccgugguacaucuggcugggcuucaucgccggccugaucgcgaucgugauggugaccaucaugcucugcugcaugaccagcugcugcuccugccugaaggggugcugcagcugcggcuccugcugcaaguucgacgaggacgacagcgagcccguccugaagggggugaagcuccacuacacgugaugacucgagcugguacugcaugcacgcaaugcuagcugccccuuucccguccuggguaccccgagucucccccgaccucgggucccagguaugcucccaccuccaccugccccacucaccaccucugcuaguuccagacaccucccaagcacgcagcaaugcagcucaaaacgcuuagccuagccacacccccacgggaaacagcagugauuaaccuuuagcaauaaacgaaaguuuaacuaagcuauacuaaccccaggguuggucaauuucgugccagccacacccuggagcuagcaaaaaaaaaaaaaaaaaaaaaaaaaaaaaagcauaugacuaaaaaaaaaaaaaaaaaaaaaaaaaaaaaaaaaaaaaaaaaaaaaaaaaaaaaaaaaaaaaaaaaaaaaa

SEQ ID NO: 26723 - RNA, 4274 nt, Artificial Sequence
  SARS-CoV-2/Wuhan/WIV05/2019__EPI_ISL_402128 spike protein mRNA gc (1-1273)(L18F_D80A_D215G_L242del_A243del_L244del_R246I_K417N_E484 K_N501Y_D614G_A701V)
agaauaaacuaguauucuucugguccccacagacucagagagaacccgccaccauguucguguuccugguccuccugccccuggugagcucccagugcgugaacuucaccacccgcacgcagcugccgcccgccuacaccaacagcuucacccggggcgucuacuaccccgacaagguguuccgcuccagcgugcugcacuccacccaggaccucuuccugcccuucuucagcaacgucacgugguuccacgccauccacguguccgggaccaacggcaccaagcgguucgccaacccggugcugcccuucaacgacggggucuacuucgcgagcaccgagaaguccaacaucauccgcggcuggaucuucgggacgacccucgacagcaagacccagucccugcugaucgugaacaacgccaccaacguggucaucaaggugugcgaguuccaguucugcaacgaccccuuccucggcguguacuaccacaagaacaacaagagcuggauggaguccgaguuccgggucuacagcuccgccaacaacugcacguucgaguacgugagccagcccuuccugauggaccuggagggcaagcaggggaacuucaagaaccuccgcgaguucguguucaagaacaucgacggcuacuucaagaucuacuccaagcacaccccgaucaaccugguccggggccugccccagggguucagcgcccucgagccccugguggaccugcccaucggcaucaacaucacccgcuuccagacccuccacaucuccuaccucacgccgggggacagcagcuccggcuggaccgcgggcgccgccgccuacuacgugggguaccugcagccccgcaccuuccugcucaaguacaacgagaacggcaccaucacggacgcggucgacugcgcccuggacccccugagcgagaccaagugcacccucaaguccuucaccguggagaaggggaucuaccagacgagcaacuuccgggugcagcccaccgaguccaucguccgcuucccgaacaucaccaaccugugccccuucggcgagguguucaacgccacccgguucgccagcgucuacgccuggaaccgcaagcggaucuccaacugcguggcggacuacagcgugcuguacaacuccgccagcuucuccacguucaagugcuacggcgucagccccaccaagcucaacgaccugugcuucaccaacguguacgccgacuccuucgugauccgcggggacgagguccggcagaucgcccccggccagaccgggaacaucgccgacuacaacuacaagcugccggacgacuucacgggcugcgugaucgcguggaacagcaacaaccucgacuccaaggucgggggcaacuacaacuaccuguaccgccuguuccgcaagagcaaccucaagcccuucgagcgggacaucuccaccgagaucuaccaggccggcagcacccccugcaacggggugaagggcuucaacugcuacuucccccugcaguccuacggguuccagccgaccuacggcgugggguaccagcccuaccggguggucgugcugagcuucgagcuccugcacgcccccgccacggugugcggccccaagaaguccaccaaccuggucaagaacaagugcgugaacuucaacuucaacggccucaccgggaccggcgugcugaccgagagcaacaagaaguuccugccguuccagcaguucgggcgcgacaucgccgacacgaccgacgcgguccgcgacccccagacccuggagauccucgacaucacccccugcagcuucggcgggguguccgugaucacgccgggcaccaacaccagcaaccaggucgccgugcuguaccagggcgugaacugcaccgagguccccguggccauccacgccgaccagcugacgcccaccuggcggguguacuccaccggcagcaacgucuuccagacccgcgccgggugccucaucggcgcggagcacgugaacaacuccuacgagugcgacauccccaucggggccggcaucugcgccagcuaccagacgcagaccaacuccccgcggcgcgcccggagcguggcgucccagagcaucaucgccuacaccaugucccugggcguggagaacagcgucgccuacuccaacaacagcaucgccauccccaccaacuucacgaucuccgugaccaccgagauccugcccgugagcaugaccaagacgagcgucgacugcaccauguacaucugcggggacuccaccgagugcagcaaccuccugcugcaguacggcuccuucugcacccagcucaaccgcgcgcugacggggaucgccguggagcaggacaagaacacccaggagguguucgcccaggucaagcagaucuacaagacgcccccgaucaaggacuucggcggguucaacuucagccagauccugcccgaccccuccaagcccagcaagcgguccuucaucgaggaccuccuguucaacaaggugacccuggccgacgccggcuucaucaagcaguacggcgacugccucggggacaucgcggcccgcgaccugaucugcgcccagaaguucaacggccugaccgugcucccgccccugcugaccgacgagaugaucgcccaguacaccagcgcccuccuggcggggaccaucacguccggcuggaccuucggggccggcgccgcccugcagauccccuucgcgaugcagauggccuaccgguucaacggcaucggggucacccagaacgugcucuacgagaaccagaagcugaucgccaaccaguucaacagcgccaucggcaagauccaggacucccugagcuccaccgccagcgcgcucgggaagcugcaggacguggucaaccagaacgcccaggcccugaacacgcucgugaagcagcuguccagcaacuucggcgccaucuccagcgugcugaacgacauccucucccgccuggacaaggucgaggccgaggugcagaucgaccggcugaucaccgggcgccuccagagccugcagaccuacgugacccagcagcugauccgggcggccgagauccgcgccagcgccaaccucgccgcgaccaagauguccgagugcguccugggccagagcaagcggguggacuucugcggcaagggguaccaccugauguccuucccccagagcgccccgcacggcguggucuuccuccacgugacguacguccccgcccaggagaagaacuucaccaccgcccccgcgaucugccacgacgggaaggcccacuucccccgcgagggcguguucguguccaacgggacccacugguucgucacgcagcggaacuucuacgagccgcagaucaucaccaccgacaacaccuucgugagcggcaacugcgacguggucaucggcaucgugaacaacacgguguacgacccccugcagcccgagcuggacuccuucaaggaggagcucgacaaguacuucaagaaccacaccagccccgacgucgaccugggggacaucuccggcaucaacgccagcguggugaacauccagaaggagaucgaccgccugaacgaggucgccaagaaccucaacgagucccugaucgaccugcaggagcucgggaaguacgagcaguacaucaaguggccgugguacaucuggcugggcuucaucgccggccugaucgcgaucgugauggugaccaucaugcucugcugcaugaccagcugcugcuccugccugaaggggugcugcagcugcggcuccugcugcaaguucgacgaggacgacagcgagcccguccugaagggggugaagcuccacuacacgugaugacucgagcugguacugcaugcacgcaaugcuagcugccccuuucccguccuggguaccccgagucucccccgaccucgggucccagguaugcucccaccuccaccugccccacucaccaccucugcuaguuccagacaccucccaagcacgcagcaaugcagcucaaaacgcuuagccuagccacacccccacgggaaacagcagugauuaaccuuuagcaauaaacgaaaguuuaacuaagcuauacuaaccccaggguuggucaauuucgugccagccacacccuggagcuagcaaaaaaaaaaaaaaaaaaaaaaaaaaaaaagcauaugacuaaaaaaaaaaaaaaaaaaaaaaaaaaaaaaaaaaaaaaaaaaaaaaaaaaaaaaaaaaaaaaaaaaaaaa

SEQ ID NO: 26724 - RNA, 4283 nt, Artificial Sequence
  SARS-CoV-2/Wuhan/WIV05/2019__EPI_ISL_402128 spike protein mRNA gc (1-1273)(E484K_D614G)
agaauaaacuaguauucuucugguccccacagacucagagagaacccgccaccauguucguguuccugguccuccugccccuggugagcucccagugcgugaaccucaccacccgcacgcagcugccgcccgccuacaccaacagcuucacccggggcgucuacuaccccgacaagguguuccgcuccagcgugcugcacuccacccaggaccucuuccugcccuucuucagcaacgucacgugguuccacgccauccacguguccgggaccaacggcaccaagcgguucgacaacccggugcugcccuucaacgacggggucuacuucgcgagcaccgagaaguccaacaucauccgcggcuggaucuucgggacgacccucgacagcaagacccagucccugcugaucgugaacaacgccaccaacguggucaucaaggugugcgaguuccaguucugcaacgaccccuuccucggcguguacuaccacaagaacaacaagagcuggauggaguccgaguuccgggucuacagcuccgccaacaacugcacguucgaguacgugagccagcccuuccugauggaccuggagggcaagcaggggaacuucaagaaccuccgcgaguucguguucaagaacaucgacggcuacuucaagaucuacuccaagcacaccccgaucaaccugguccgggaccugccccagggguucagcgcccucgagccccugguggaccugcccaucggcaucaacaucacccgcuuccagacccuccuggcccugcaccgguccuaccucacgccgggggacagcagcuccggcuggaccgcgggcgccgccgccuacuacgugggguaccugcagccccgcaccuuccugcucaaguacaacgagaacggcaccaucacggacgcggucgacugcgcccuggacccccugagcgagaccaagugcacccucaaguccuucaccguggagaaggggaucuaccagacgagcaacuuccgggugcagcccaccgaguccaucguccgcuucccgaacaucaccaaccugugccccuucggcgagguguucaacgccacccgguucgccagcgucuacgccuggaaccgcaagcggaucuccaacugcguggcggacuacagcgugcuguacaacuccgccagcuucuccacguucaagugcuacggcgucagccccaccaagcucaacgaccugugcuucaccaacguguacgccgacuccuucgugauccgcggggacgagguccggcagaucgcccccggccagaccgggaagaucgccgacuacaacuacaagcugccggacgacuucacgggcugcgugaucgcguggaacagcaacaaccucgacuccaaggucgggggcaacuacaacuaccuguaccgccuguuccgcaagagcaaccucaagcccuucgagcgggacaucuccaccgagaucuaccaggccggcagcacccccugcaacggggugaagggcuucaacugcuacuucccccugcaguccuacggguuccagccgaccaacggcgugggguaccagcccuaccggguggucgugcugagcuucgagcuccugcacgcccccgccacggugugcggccccaagaaguccaccaaccuggucaagaacaagugcgugaacuucaacuucaacggccucaccgggaccggcgugcugaccgagagcaacaagaaguuccugccguuccagcaguucgggcgcgacaucgccgacacgaccgacgcgguccgcgacccccagacccuggagauccucgacaucacccccugcagcuucggcgggguguccgugaucacgccgggcaccaacaccagcaaccaggucgccgugcuguaccagggcgugaacugcaccgagguccccguggccauccacgccgaccagcugacgcccaccuggcggguguacuccaccggcagcaacgucuuccagacccgcgccgggugccucaucggcgcggagcacgugaacaacuccuacgagugcgacauccccaucggggccggcaucugcgccagcuaccagacgcagaccaacuccccgcggcgcgcccggagcguggcgucccagagcaucaucgccuacaccaugucccugggcgccgagaacagcgucgccuacuccaacaacagcaucgccauccccaccaacuucacgaucuccgugaccaccgagauccugcccgugagcaugaccaagacgagcgucgacugcaccauguacaucugcggggacuccaccgagugcagcaaccuccugcugcaguacggcuccuucugcacccagcucaaccgcgcgcugacggggaucgccguggagcaggacaagaacacccaggagguguucgcccaggucaagcagaucuacaagacgcccccgaucaaggacuucggcggguucaacuucagccagauccugcccgaccccuccaagcccagcaagcgguccuucaucgaggaccuccuguucaacaaggugacccuggccgacgccggcuucaucaagcaguacggcgacugccucggggacaucgcggcccgcgaccugaucugcgcccagaaguucaacggccugaccgugcucccgccccugcugaccgacgagaugaucgcccaguacaccagcgcccuccuggcggggaccaucacguccggcuggaccuucggggccggcgccgcccugcagauccccuucgcgaugcagauggccuaccgguucaacggcaucggggucacccagaacgugcucuacgagaaccagaagcugaucgccaaccaguucaacagcgccaucggcaagauccaggacucccugagcuccaccgccagcgcgcucgggaagcugcaggacguggucaaccagaacgcccaggcccugaacacgcucgugaagcagcuguccagcaacuucggcgccaucuccagcgugcugaacgacauccucucccgccuggacaaggucgaggccgaggugcagaucgaccggcugaucaccgggcgccuccagagccugcagaccuacgugacccagcagcugauccgggcggccgagauccgcgccagcgccaaccucgccgcgaccaagauguccgagugcguccugggccagagcaagcggguggacuucugcggcaagggguaccaccugauguccuucccccagagcgccccgcacggcguggucuuccuccacgugacguacguccccgcccaggagaagaacuucaccaccgcccccgcgaucugccacgacgggaaggcccacuucccccgcgagggcguguucguguccaacgggacccacugguucgucacgcagcggaacuucuacgagccgcagaucaucaccaccgacaacaccuucgugagcggcaacugcgacguggucaucggcaucgugaacaacacgguguacgacccccugcagcccgagcuggacuccuucaaggaggagcucgacaaguacuucaagaaccacaccagccccgacgucgaccugggggacaucuccggcaucaacgccagcguggugaacauccagaaggagaucgaccgccugaacgaggucgccaagaaccucaacgagucccugaucgaccugcaggagcucgggaaguacgagcaguacaucaaguggccgugguacaucuggcugggcuucaucgccggccugaucgcgaucgugauggugaccaucaugcucugcugcaugaccagcugcugcuccugccugaaggggugcugcagcugcggcuccugcugcaaguucgacgaggacgacagcgagcccguccugaagggggugaagcuccacuacacgugaugacucgagcugguacugcaugcacgcaaugcuagcugccccuuucccguccuggguaccccgagucucccccgaccucgggucccagguaugcucccaccuccaccugccccacucaccaccucugcuaguuccagacaccucccaagcacgcagcaaugcagcucaaaacgcuuagccuagccacacccccacgggaaacagcagugauuaaccuuuagcaauaaacgaaaguuuaacuaagcuauacuaaccccaggguuggucaauuucgugccagccacacccuggagcuagcaaaaaaaaaaaaaaaaaaaaaaaaaaaaaagcauaugacuaaaaaaaaaaaaaaaaaaaaaaaaaaaaaaaaaaaaaaaaaaaaaaaaaaaaaaaaaaaaaaaaaaaaaa

SEQ ID NO: 26725 - RNA, 4283 nt, Artificial Sequence
  SARS-CoV-2/Wuhan/WIV05/2019__EPI_ISL_402128 spike protein mRNA gc (1-1273)(L18F_T20N_P26S_D138Y_R190S_K417T_E484K_N501Y_D614G_H655Y _T1027I)
agaauaaacuaguauucuucugguccccacagacucagagagaacccgccaccauguucguguuccugguccuccugccccuggugagcucccagugcgugaacuucaccaaccgcacgcagcugccgagcgccuacaccaacagcuucacccggggcgucuacuaccccgacaagguguuccgcuccagcgugcugcacuccacccaggaccucuuccugcccuucuucagcaacgucacgugguuccacgccauccacguguccgggaccaacggcaccaagcgguucgacaacccggugcugcccuucaacgacggggucuacuucgcgagcaccgagaaguccaacaucauccgcggcuggaucuucgggacgacccucgacagcaagacccagucccugcugaucgugaacaacgccaccaacguggucaucaaggugugcgaguuccaguucugcaacuaccccuuccucggcguguacuaccacaagaacaacaagagcuggauggaguccgaguuccgggucuacagcuccgccaacaacugcacguucgaguacgugagccagcccuuccugauggaccuggagggcaagcaggggaacuucaagaaccucagcgaguucguguucaagaacaucgacggcuacuucaagaucuacuccaagcacaccccgaucaaccugguccgggaccugccccagggguucagcgcccucgagccccugguggaccugcccaucggcaucaacaucacccgcuuccagacccuccuggcccugcaccgguccuaccucacgccgggggacagcagcuccggcuggaccgcgggcgccgccgccuacuacgugggguaccugcagccccgcaccuuccugcucaaguacaacgagaacggcaccaucacggacgcggucgacugcgcccuggacccccugagcgagaccaagugcacccucaaguccuucaccguggagaaggggaucuaccagacgagcaacuuccgggugcagcccaccgaguccaucguccgcuucccgaacaucaccaaccugugccccuucggcgagguguucaacgccacccgguucgccagcgucuacgccuggaaccgcaagcggaucuccaacugcguggcggacuacagcgugcuguacaacuccgccagcuucuccacguucaagugcuacggcgucagccccaccaagcucaacgaccugugcuucaccaacguguacgccgacuccuucgugauccgcggggacgagguccggcagaucgcccccggccagaccgggaccaucgccgacuacaacuacaagcugccggacgacuucacgggcugcgugaucgcguggaacagcaacaaccucgacuccaaggucgggggcaacuacaacuaccuguaccgccuguuccgcaagagcaaccucaagcccuucgagcgggacaucuccaccgagaucuaccaggccggcagcacccccugcaacggggugaagggcuucaacugcuacuucccccugcaguccuacggguuccagccgaccuacggcgugggguaccagcccuaccggguggucgugcugagcuucgagcuccugcacgcccccgccacggugugcggccccaagaaguccaccaaccuggucaagaacaagugcgugaacuucaacuucaacggccucaccgggaccggcgugcugaccgagagcaacaagaaguuccugccguuccagcaguucgggcgcgacaucgccgacacgaccgacgcgguccgcgacccccagacccuggagauccucgacaucacccccugcagcuucggcgggguguccgugaucacgccgggcaccaacaccagcaaccaggucgccgugcuguaccagggcgugaacugcaccgagguccccguggccauccacgccgaccagcugacgcccaccuggcggguguacuccaccggcagcaacgucuuccagacccgcgccgggugccucaucggcgcggaguacgugaacaacuccuacgagugcgacauccccaucggggccggcaucugcgccagcuaccagacgcagaccaacuccccgcggcgcgcccggagcguggcgucccagagcaucaucgccuacaccaugucccugggcgccgagaacagcgucgccuacuccaacaacagcaucgccauccccaccaacuucacgaucuccgugaccaccgagauccugcccgugagcaugaccaagacgagcgucgacugcaccauguacaucugcggggacuccaccgagugcagcaaccuccugcugcaguacggcuccuucugcacccagcucaaccgcgcgcugacggggaucgccguggagcaggacaagaacacccaggagguguucgcccaggucaagcagaucuacaagacgcccccgaucaaggacuucggcggguucaacuucagccagauccugcccgaccccuccaagcccagcaagcgguccuucaucgaggaccuccuguucaacaaggugacccuggccgacgccggcuucaucaagcaguacggcgacugccucggggacaucgcggcccgcgaccugaucugcgcccagaaguucaacggccugaccgugcucccgccccugcugaccgacgagaugaucgcccaguacaccagcgcccuccuggcggggaccaucacguccggcuggaccuucggggccggcgccgcccugcagauccccuucgcgaugcagauggccuaccgguucaacggcaucggggucacccagaacgugcucuacgagaaccagaagcugaucgccaaccaguucaacagcgccaucggcaagauccaggacucccugagcuccaccgccagcgcgcucgggaagcugcaggacguggucaaccagaacgcccaggcccugaacacgcucgugaagcagcuguccagcaacuucggcgccaucuccagcgugcugaacgacauccucucccgccuggacaaggucgaggccgaggugcagaucgaccggcugaucaccgggcgccuccagagccugcagaccuacgugacccagcagcugauccgggcggccgagauccgcgccagcgccaaccucgccgcgaucaagauguccgagugcguccugggccagagcaagcggguggacuucugcggcaagggguaccaccugauguccuucccccagagcgccccgcacggcguggucuuccuccacgugacguacguccccgcccaggagaagaacuucaccaccgcccccgcgaucugccacgacgggaaggcccacuucccccgcgagggcguguucguguccaacgggacccacugguucgucacgcagcggaacuucuacgagccgcagaucaucaccaccgacaacaccuucgugagcggcaacugcgacguggucaucggcaucgugaacaacacgguguacgacccccugcagcccgagcuggacuccuucaaggaggagcucgacaaguacuucaagaaccacaccagccccgacgucgaccugggggacaucuccggcaucaacgccagcguggugaacauccagaaggagaucgaccgccugaacgaggucgccaagaaccucaacgagucccugaucgaccugcaggagcucgggaaguacgagcaguacaucaaguggccgugguacaucuggcugggcuucaucgccggccugaucgcgaucgugauggugaccaucaugcucugcugcaugaccagcugcugcuccugccugaaggggugcugcagcugcggcuccugcugcaaguucgacgaggacgacagcgagcccguccugaagggggugaagcuccacuacacgugaugacucgagcugguacugcaugcacgcaaugcuagcugccccuuucccguccuggguaccccgagucucccccgaccucgggucccagguaugcucccaccuccaccugccccacucaccaccucugcuaguuccagacaccucccaagcacgcagcaaugcagcucaaaacgcuuagccuagccacacccccacgggaaacagcagugauuaaccuuuagcaauaaacgaaaguuuaacuaagcuauacuaaccccaggguuggucaauuucgugccagccacacccuggagcuagcaaaaaaaaaaaaaaaaaaaaaaaaaaaaaagcauaugacuaaaaaaaaaaaaaaaaaaaaaaaaaaaaaaaaaaaaaaaaaaaaaaaaaaaaaaaaaaaaaaaaaaaaaa

SEQ ID NO: 26726 - RNA, 4283 nt, Artificial Sequence
  SARS-CoV-2/Wuhan/WIV05/2019__EPI_ISL_402128 spike protein mRNA gc (1-1273)(S13I_W152C_L452R_D614G)
agaauaaacuaguauucuucugguccccacagacucagagagaacccgccaccauguucguguuccugguccuccugccccuggugagcauccagugcgugaaccucaccacccgcacgcagcugccgcccgccuacaccaacagcuucacccggggcgucuacuaccccgacaagguguuccgcuccagcgugcugcacuccacccaggaccucuuccugcccuucuucagcaacgucacgugguuccacgccauccacguguccgggaccaacggcaccaagcgguucgacaacccggugcugcccuucaacgacggggucuacuucgcgagcaccgagaaguccaacaucauccgcggcuggaucuucgggacgacccucgacagcaagacccagucccugcugaucgugaacaacgccaccaacguggucaucaaggugugcgaguuccaguucugcaacgaccccuuccucggcguguacuaccacaagaacaacaagagcugcauggaguccgaguuccgggucuacagcuccgccaacaacugcacguucgaguacgugagccagcccuuccugauggaccuggagggcaagcaggggaacuucaagaaccuccgcgaguucguguucaagaacaucgacggcuacuucaagaucuacuccaagcacaccccgaucaaccugguccgggaccugccccagggguucagcgcccucgagccccugguggaccugcccaucggcaucaacaucacccgcuuccagacccuccuggcccugcaccgguccuaccucacgccgggggacagcagcuccggcuggaccgcgggcgccgccgccuacuacgugggguaccugcagccccgcaccuuccugcucaaguacaacgagaacggcaccaucacggacgcggucgacugcgcccuggacccccugagcgagaccaagugcacccucaaguccuucaccguggagaaggggaucuaccagacgagcaacuuccgggugcagcccaccgaguccaucguccgcuucccgaacaucaccaaccugugccccuucggcgagguguucaacgccacccgguucgccagcgucuacgccuggaaccgcaagcggaucuccaacugcguggcggacuacagcgugcuguacaacuccgccagcuucuccacguucaagugcuacggcgucagccccaccaagcucaacgaccugugcuucaccaacguguacgccgacuccuucgugauccgcggggacgagguccggcagaucgcccccggccagaccgggaagaucgccgacuacaacuacaagcugccggacgacuucacgggcugcgugaucgcguggaacagcaacaaccucgacuccaaggucgggggcaacuacaacuaccgcuaccgccuguuccgcaagagcaaccucaagcccuucgagcgggacaucuccaccgagaucuaccaggccggcagcacccccugcaacgggguggagggcuucaacugcuacuucccccugcaguccuacggguuccagccgaccaacggcgugggguaccagcccuaccggguggucgugcugagcuucgagcuccugcacgcccccgccacggugugcggccccaagaaguccaccaaccuggucaagaacaagugcgugaacuucaacuucaacggccucaccgggaccggcgugcugaccgagagcaacaagaaguuccugccguuccagcaguucgggcgcgacaucgccgacacgaccgacgcgguccgcgacccccagacccuggagauccucgacaucacccccugcagcuucggcgggguguccgugaucacgccgggcaccaacaccagcaaccaggucgccgugcuguaccagggcgugaacugcaccgagguccccguggccauccacgccgaccagcugacgcccaccuggcggguguacuccaccggcagcaacgucuuccagacccgcgccgggugccucaucggcgcggagcacgugaacaacuccuacgagugcgacauccccaucggggccggcaucugcgccagcuaccagacgcagaccaacuccccgcggcgcgcccggagcguggcgucccagagcaucaucgccuacaccaugucccugggcgccgagaacagcgucgccuacuccaacaacagcaucgccauccccaccaacuucacgaucuccgugaccaccgagauccugcccgugagcaugaccaagacgagcgucgacugcaccauguacaucugcggggacuccaccgagugcagcaaccuccugcugcaguacggcuccuucugcacccagcucaaccgcgcgcugacggggaucgccguggagcaggacaagaacacccaggagguguucgcccaggucaagcagaucuacaagacgcccccgaucaaggacuucggcggguucaacuucagccagauccugcccgaccccuccaagcccagcaagcgguccuucaucgaggaccuccuguucaacaaggugacccuggccgacgccggcuucaucaagcaguacggcgacugccucggggacaucgcggcccgcgaccugaucugcgcccagaaguucaacggccugaccgugcucccgccccugcugaccgacgagaugaucgcccaguacaccagcgcccuccuggcggggaccaucacguccggcuggaccuucggggccggcgccgcccugcagauccccuucgcgaugcagauggccuaccgguucaacggcaucggggucacccagaacgugcucuacgagaaccagaagcugaucgccaaccaguucaacagcgccaucggcaagauccaggacucccugagcuccaccgccagcgcgcucgggaagcugcaggacguggucaaccagaacgcccaggcccugaacacgcucgugaagcagcuguccagcaacuucggcgccaucuccagcgugcugaacgacauccucucccgccuggacaaggucgaggccgaggugcagaucgaccggcugaucaccgggcgccuccagagccugcagaccuacgugacccagcagcugauccgggcggccgagauccgcgccagcgccaaccucgccgcgaccaagauguccgagugcguccugggccagagcaagcggguggacuucugcggcaagggguaccaccugauguccuucccccagagcgccccgcacggcguggucuuccuccacgugacguacguccccgcccaggagaagaacuucaccaccgcccccgcgaucugccacgacgggaaggcccacuucccccgcgagggcguguucguguccaacgggacccacugguucgucacgcagcggaacuucuacgagccgcagaucaucaccaccgacaacaccuucgugagcggcaacugcgacguggucaucggcaucgugaacaacacgguguacgacccccugcagcccgagcuggacuccuucaaggaggagcucgacaaguacuucaagaaccacaccagccccgacgucgaccugggggacaucuccggcaucaacgccagcguggugaacauccagaaggagaucgaccgccugaacgaggucgccaagaaccucaacgagucccugaucgaccugcaggagcucgggaaguacgagcaguacaucaaguggccgugguacaucuggcugggcuucaucgccggccugaucgcgaucgugauggugaccaucaugcucugcugcaugaccagcugcugcuccugccugaaggggugcugcagcugcggcuccugcugcaaguucgacgaggacgacagcgagcccguccugaagggggugaagcuccacuacacgugaugacucgagcugguacugcaugcacgcaaugcuagcugccccuuucccguccuggguaccccgagucucccccgaccucgggucccagguaugcucccaccuccaccugccccacucaccaccucugcuaguuccagacaccucccaagcacgcagcaaugcagcucaaaacgcuuagccuagccacacccccacgggaaacagcagugauuaaccuuuagcaauaaacgaaaguuuaacuaagcuauacuaaccccaggguuggucaauuucgugccagccacacccuggagcuagcaaaaaaaaaaaaaaaaaaaaaaaaaaaaaagcauaugacuaaaaaaaaaaaaaaaaaaaaaaaaaaaaaaaaaaaaaaaaaaaaaaaaaaaaaaaaaaaaaaaaaaaaaa

SEQ ID NO: 26727 - RNA, 4283 nt, Artificial Sequence; identical to SEQ ID NO: 26709
  SARS-CoV-2/Wuhan/WIV05/2019__EPI_ISL_402128 spike protein mRNA gc (1-1273)

SEQ ID NO: 26728 - RNA, 4283 nt, Artificial Sequence
  SARS-CoV-2/Wuhan/WIV05/2019__EPI_ISL_402128 spike protein mRNA gc (1-1273)(D614G)
agaauaaacuaguauucuucugguccccacagacucagagagaacccgccaccauguucguguuccugguccuccugccccuggugagcucccagugcgugaaccucaccacccgcacgcagcugccgcccgccuacaccaacagcuucacccggggcgucuacuaccccgacaagguguuccgcuccagcgugcugcacuccacccaggaccucuuccugcccuucuucagcaacgucacgugguuccacgccauccacguguccgggaccaacggcaccaagcgguucgacaacccggugcugcccuucaacgacggggucuacuucgcgagcaccgagaaguccaacaucauccgcggcuggaucuucgggacgacccucgacagcaagacccagucccugcugaucgugaacaacgccaccaacguggucaucaaggugugcgaguuccaguucugcaacgaccccuuccucggcguguacuaccacaagaacaacaagagcuggauggaguccgaguuccgggucuacagcuccgccaacaacugcacguucgaguacgugagccagcccuuccugauggaccuggagggcaagcaggggaacuucaagaaccuccgcgaguucguguucaagaacaucgacggcuacuucaagaucuacuccaagcacaccccgaucaaccugguccgggaccugccccagggguucagcgcccucgagccccugguggaccugcccaucggcaucaacaucacccgcuuccagacccuccuggcccugcaccgguccuaccucacgccgggggacagcagcuccggcuggaccgcgggcgccgccgccuacuacgugggguaccugcagccccgcaccuuccugcucaaguacaacgagaacggcaccaucacggacgcggucgacugcgcccuggacccccugagcgagaccaagugcacccucaaguccuucaccguggagaaggggaucuaccagacgagcaacuuccgggugcagcccaccgaguccaucguccgcuucccgaacaucaccaaccugugccccuucggcgagguguucaacgccacccgguucgccagcgucuacgccuggaaccgcaagcggaucuccaacugcguggcggacuacagcgugcuguacaacuccgccagcuucuccacguucaagugcuacggcgucagccccaccaagcucaacgaccugugcuucaccaacguguacgccgacuccuucgugauccgcggggacgagguccggcagaucgcccccggccagaccgggaagaucgccgacuacaacuacaagcugccggacgacuucacgggcugcgugaucgcguggaacagcaacaaccucgacuccaaggucgggggcaacuacaacuaccuguaccgccuguuccgcaagagcaaccucaagcccuucgagcgggacaucuccaccgagaucuaccaggccggcagcacccccugcaacgggguggagggcuucaacugcuacuucccccugcaguccuacggguuccagccgaccaacggcgugggguaccagcccuaccggguggucgugcugagcuucgagcuccugcacgcccccgccacggugugcggccccaagaaguccaccaaccuggucaagaacaagugcgugaacuucaacuucaacggccucaccgggaccggcgugcugaccgagagcaacaagaaguuccugccguuccagcaguucgggcgcgacaucgccgacacgaccgacgcgguccgcgacccccagacccuggagauccucgacaucacccccugcagcuucggcgggguguccgugaucacgccgggcaccaacaccagcaaccaggucgccgugcuguaccagggcgugaacugcaccgagguccccguggccauccacgccgaccagcugacgcccaccuggcggguguacuccaccgggagcaacgucuuccagacccgcgccggcugccucaucggggcggagcacgugaacaacuccuacgagugcgacauccccaucggcgccggcaucugcgccagcuaccagacgcagaccaacuccccgcggcgcgcccggagcguggcgucccagagcaucaucgccuacaccaugucccugggggccgagaacagcgucgccuacuccaacaacagcaucgccauccccaccaacuucacgaucuccgugaccaccgagauccugcccgugagcaugaccaagacgagcgucgacugcaccauguacaucugcggcgacuccaccgagugcagcaaccuccugcugcaguacggguccuucugcacccagcucaaccgcgcgcugacgggcaucgccguggagcaggacaagaacacccaggagguguucgcccaggucaagcagaucuacaagacgcccccgaucaaggacuucgggggcuucaacuucagccagauccugcccgaccccuccaagcccagcaagcgguccuucaucgaggaccuccuguucaacaaggugacccuggccgacgccggcuucaucaagcaguacggggacugccucggcgacaucgcggcccgcgaccugaucugcgcccagaaguucaacgggcugaccgugcucccgccccugcugaccgacgagaugaucgcccaguacaccagcgcccuccuggcgggcaccaucacguccggguggaccuucggcgccggcgccgcccugcagauccccuucgcgaugcagauggccuaccgguucaacgggaucggcgucacccagaacgugcucuacgagaaccagaagcugaucgccaaccaguucaacagcgccaucgggaagauccaggacucccugagcuccaccgccagcgcgcucggcaagcugcaggacguggucaaccagaacgcccaggcccugaacacgcucgugaagcagcuguccagcaacuucggggccaucuccagcgugcugaacgacauccucucccgccuggacaaggucgaggccgaggugcagaucgaccggcugaucaccggccgccuccagagccugcagaccuacgugacccagcagcugauccgggcggccgagauccgcgccagcgccaaccucgccgcgaccaagauguccgagugcguccugggccagagcaagcggguggacuucugcgggaagggcuaccaccugauguccuucccccagagcgccccgcacgggguggucuuccuccacgugacguacguccccgcccaggagaagaacuucaccaccgcccccgcgaucugccacgacggcaaggcccacuucccccgcgaggggguguucguguccaacggcacccacugguucgucacgcagcggaacuucuacgagccgcagaucaucaccaccgacaacaccuucgugagcggcaacugcgacguggucaucgggaucgugaacaacacgguguacgacccccugcagcccgagcuggacuccuucaaggaggagcucgacaaguacuucaagaaccacaccagccccgacgucgaccugggcgacaucuccgggaucaacgccagcguggugaacauccagaaggagaucgaccgccugaacgaggucgccaagaaccucaacgagucccugaucgaccugcaggagcucggcaaguacgagcaguacaucaaguggccgugguacaucuggcugggcuucaucgccgggcugaucgcgaucgugauggugaccaucaugcucugcugcaugaccagcugcugcuccugccugaagggcugcugcagcugcggguccugcugcaaguucgacgaggacgacagcgagcccguccugaagggcgugaagcuccacuacacgugaugacucgagcugguacugcaugcacgcaaugcuagcugccccuuucccguccuggguaccccgagucucccccgaccucgggucccagguaugcucccaccuccaccugccccacucaccaccucugcuaguuccagacaccucccaagcacgcagcaaugcagcucaaaacgcuuagccuagccacacccccacgggaaacagcagugauuaaccuuuagcaauaaacgaaaguuuaacuaagcuauacuaaccccaggguuggucaauuucgugccagccacacccuggagcuagcaaaaaaaaaaaaaaaaaaaaaaaaaaaaaagcauaugacuaaaaaaaaaaaaaaaaaaaaaaaaaaaaaaaaaaaaaaaaaaaaaaaaaaaaaaaaaaaaaaaaaaaaaa

SEQ ID NO: 26729 - RNA, 4283 nt, Artificial Sequence
  SARS-CoV-2/Wuhan/WIV05/2019__EPI_ISL_402128 spike protein mRNA gc (1-1273)(A222V_D614G)
agaauaaacuaguauucuucugguccccacagacucagagagaacccgccaccauguucguguuccugguccuccugccccuggugagcucccagugcgugaaccucaccacccgcacgcagcugccgcccgccuacaccaacagcuucacccggggcgucuacuaccccgacaagguguuccgcuccagcgugcugcacuccacccaggaccucuuccugcccuucuucagcaacgucacgugguuccacgccauccacguguccgggaccaacggcaccaagcgguucgacaacccggugcugcccuucaacgacggggucuacuucgcgagcaccgagaaguccaacaucauccgcggcuggaucuucgggacgacccucgacagcaagacccagucccugcugaucgugaacaacgccaccaacguggucaucaaggugugcgaguuccaguucugcaacgaccccuuccucggcguguacuaccacaagaacaacaagagcuggauggaguccgaguuccgggucuacagcuccgccaacaacugcacguucgaguacgugagccagcccuuccugauggaccuggagggcaagcaggggaacuucaagaaccuccgcgaguucguguucaagaacaucgacggcuacuucaagaucuacuccaagcacaccccgaucaaccugguccgggaccugccccagggguucagcgugcucgagccccugguggaccugcccaucggcaucaacaucacccgcuuccagacccuccuggcccugcaccgguccuaccucacgccgggggacagcagcuccggcuggaccgccggcgcggccgccuacuacgucggguaccugcagccccgcaccuuccugcucaaguacaacgagaacggcaccaucacggacgccguggacugcgcgcuggacccccugagcgagaccaagugcacccucaaguccuucaccguggagaaggggaucuaccagacgagcaacuuccggguccagcccaccgaguccaucgugcgcuucccgaacaucaccaaccugugccccuucggcgaggucuucaacgccacccgguucgccagcguguacgccuggaaccgcaagcggaucuccaacugcguggccgacuacagcguccuguacaacuccgcgagcuucuccacguucaagugcuacggcgugagccccaccaagcucaacgaccugugcuucaccaacguguacgccgacuccuucgucauccgcggggacgaggugcggcagaucgcccccggccagaccgggaagaucgccgacuacaacuacaagcugccggacgacuucacgggcugcgugaucgccuggaacagcaacaaccucgacuccaaggucgggggcaacuacaacuaccuguaccgccuguuccgcaagagcaaccucaagcccuucgagcgggacaucuccaccgagaucuaccaggcgggcagcacccccugcaacgggguggagggcuucaacugcuacuucccccugcaguccuacggguuccagccgaccaacggcgugggguaccagcccuaccgggucguggugcugagcuucgagcuccugcacgcccccgccacggucugcggccccaagaaguccaccaaccuggugaagaacaagugcgugaacuucaacuucaacggccucaccgggaccggcguccugaccgagagcaacaagaaguuccugccguuccagcaguucgggcgcgacaucgccgacacgaccgacgccgugcgcgacccccagacccuggagauccucgacaucacccccugcagcuucggcgggguguccgucaucacgccgggcaccaacaccagcaaccagguggcggugcuguaccagggcgucaacugcaccgaggugcccguggccauccacgccgaccagcugacgcccaccuggcgggucuacuccaccgggagcaacguguuccagacccgcgccggcugccucaucggggccgagcacgugaacaacuccuacgagugcgacauccccaucggcgcgggcaucugcgccagcuaccagacgcagaccaacuccccgcggcgcgcccggagcgucgccucccagagcaucaucgcguacaccaugucccugggggccgagaacagcguggccuacuccaacaacagcaucgccauccccaccaacuucacgaucuccgugaccaccgagauccugcccgucagcaugaccaagacgagcguggacugcaccauguacaucugcggcgacuccaccgagugcagcaaccuccugcugcaguacggguccuucugcacccagcucaaccgcgcccugacgggcaucgcgguggagcaggacaagaacacccaggaggucuucgcccaggugaagcagaucuacaagacgcccccgaucaaggacuucgggggcuucaacuucagccagauccugcccgaccccuccaagcccagcaagcgguccuucaucgaggaccuccuguucaacaaggugacccuggccgacgccggcuucaucaagcaguacggggacugccucggcgacaucgccgcgcgcgaccugaucugcgcccagaaguucaacgggcugaccguccucccgccccugcugaccgacgagaugaucgcccaguacaccagcgcccuccuggccggcaccaucacguccggguggaccuucggcgcgggcgccgcccugcagauccccuucgccaugcagauggcguaccgguucaacgggaucggcgugacccagaacgugcucuacgagaaccagaagcugaucgccaaccaguucaacagcgccaucgggaagauccaggacucccugagcuccaccgccagcgcccucggcaagcugcaggacgucgugaaccagaacgcgcaggcccugaacacgcucgugaagcagcuguccagcaacuucggggccaucuccagcguccugaacgacauccucucccgccuggacaagguggaggccgaggugcagaucgaccggcugaucaccggccgccuccagagccugcagaccuacgucacccagcagcugauccgggccgcggagauccgcgccagcgccaaccucgccgccaccaagauguccgagugcgugcugggccagagcaagcggguggacuucugcgggaagggcuaccaccugauguccuucccccagagcgcgccgcacggggucguguuccuccacgucacguacgugcccgcccaggagaagaacuucaccaccgcccccgccaucugccacgacggcaaggcgcacuucccccgcgaggggguguucgucuccaacggcacccacugguucgugacgcagcggaacuucuacgagccgcagaucaucaccaccgacaacaccuucgugagcggcaacugcgacgucgugaucgggaucgugaacaacacggucuacgacccccugcagcccgagcuggacuccuucaaggaggagcucgacaaguacuucaagaaccacaccagccccgacguggaccugggcgacaucuccgggaucaacgccagcguggucaacauccagaaggagaucgaccgccugaacgagguggccaagaaccucaacgagucccugaucgaccugcaggagcucggcaaguacgagcaguacaucaaguggccgugguacaucuggcugggcuucaucgccgggcugaucgccaucgugauggucaccaucaugcucugcugcaugaccagcugcugcuccugccugaagggcugcugcagcugcggguccugcugcaaguucgacgaggacgacagcgagcccgugcugaagggcgugaagcuccacuacacgugaugacucgagcugguacugcaugcacgcaaugcuagcugccccuuucccguccuggguaccccgagucucccccgaccucgggucccagguaugcucccaccuccaccugccccacucaccaccucugcuaguuccagacaccucccaagcacgcagcaaugcagcucaaaacgcuuagccuagccacacccccacgggaaacagcagugauuaaccuuuagcaauaaacgaaaguuuaacuaagcuauacuaaccccaggguuggucaauuucgugccagccacacccuggagcuagcaaaaaaaaaaaaaaaaaaaaaaaaaaaaaagcauaugacuaaaaaaaaaaaaaaaaaaaaaaaaaaaaaaaaaaaaaaaaaaaaaaaaaaaaaaaaaaaaaaaaaaaaaa

SEQ ID NO: 26730 - RNA, 4283 nt, Artificial Sequence
  SARS-CoV-2/Wuhan/WIV05/2019__EPI_ISL_402128 spike protein mRNA gc (1-1273)(N439K_D614G)
agaauaaacuaguauucuucugguccccacagacucagagagaacccgccaccauguucguguuccugguccuccugccccuggugagcucccagugcgugaaccucaccacccgcacgcagcugccgcccgccuacaccaacagcuucacccggggcgucuacuaccccgacaagguguuccgcuccagcgugcugcacuccacccaggaccucuuccugcccuucuucagcaacgucacgugguuccacgccauccacguguccgggaccaacggcaccaagcgguucgacaacccggugcugcccuucaacgacggggucuacuucgcgagcaccgagaaguccaacaucauccgcggcuggaucuucgggacgacccucgacagcaagacccagucccugcugaucgugaacaacgccaccaacguggucaucaaggugugcgaguuccaguucugcaacgaccccuuccucggcguguacuaccacaagaacaacaagagcuggauggaguccgaguuccgggucuacagcuccgccaacaacugcacguucgaguacgugagccagcccuuccugauggaccuggagggcaagcaggggaacuucaagaaccuccgcgaguucguguucaagaacaucgacggcuacuucaagaucuacuccaagcacaccccgaucaaccugguccgggaccugccccagggguucagcgcccucgagccccugguggaccugcccaucggcaucaacaucacccgcuuccagacccuccuggcccugcaccgguccuaccucacgccgggggacagcagcuccggcuggaccgcgggcgccgccgccuacuacgugggguaccugcagccccgcaccuuccugcucaaguacaacgagaacggcaccaucacggacgcggucgacugcgcccuggacccccugagcgagaccaagugcacccucaaguccuucaccguggagaaggggaucuaccagacgagcaacuuccgggugcagcccaccgaguccaucguccgcuucccgaacaucaccaaccugugccccuucggcgagguguucaacgccacccgguucgccagcgucuacgccuggaaccgcaagcggaucuccaacugcguggcggacuacagcgugcuguacaacuccgccagcuucuccacguucaagugcuacggcgucagccccaccaagcucaacgaccugugcuucaccaacguguacgccgacuccuucgugauccgcggggacgagguccggcagaucgcccccggccagaccgggaagaucgccgacuacaacuacaagcugccggacgacuucacgggcugcgugaucgcguggaacagcaagaaccucgacuccaaggucgggggcaacuacaacuaccuguaccgccuguuccgcaagagcaaccucaagcccuucgagcgggacaucuccaccgagaucuaccaggccggcagcacccccugcaacgggguggagggcuucaacugcuacuucccccugcaguccuacggguuccagccgaccaacggcgugggguaccagcccuaccggguggucgugcugagcuucgagcuccugcacgcccccgccacggugugcggccccaagaaguccaccaaccuggucaagaacaagugcgugaacuucaacuucaacggccucaccgggaccggcgugcugaccgagagcaacaagaaguuccugccguuccagcaguucgggcgcgacaucgccgacacgaccgacgcgguccgcgacccccagacccuggagauccucgacaucacccccugcagcuucggcgggguguccgugaucacgccgggcaccaacaccagcaaccaggucgccgugcuguaccagggcgugaacugcaccgagguccccguggccauccacgccgaccagcugacgcccaccuggcggguguacuccaccgggagcaacgucuuccagacccgcgccggcugccucaucggggcggagcacgugaacaacuccuacgagugcgacauccccaucggcgccggcaucugcgccagcuaccagacgcagaccaacuccccgcggcgcgcccggagcguggcgucccagagcaucaucgccuacaccaugucccugggggccgagaacagcgucgccuacuccaacaacagcaucgccauccccaccaacuucacgaucuccgugaccaccgagauccugcccgugagcaugaccaagacgagcgucgacugcaccauguacaucugcggcgacuccaccgagugcagcaaccuccugcugcaguacggguccuucugcacccagcucaaccgcgcgcugacgggcaucgccguggagcaggacaagaacacccaggagguguucgcccaggucaagcagaucuacaagacgcccccgaucaaggacuucgggggcuucaacuucagccagauccugcccgaccccuccaagcccagcaagcgguccuucaucgaggaccuccuguucaacaaggugacccuggccgacgccggcuucaucaagcaguacggggacugccucggcgacaucgcggcccgcgaccugaucugcgcccagaaguucaacgggcugaccgugcucccgccccugcugaccgacgagaugaucgcccaguacaccagcgcccuccuggcgggcaccaucacguccggguggaccuucggcgccggcgccgcccugcagauccccuucgcgaugcagauggccuaccgguucaacgggaucggcgucacccagaacgugcucuacgagaaccagaagcugaucgccaaccaguucaacagcgccaucgggaagauccaggacucccugagcuccaccgccagcgcgcucggcaagcugcaggacguggucaaccagaacgcccaggcccugaacacgcucgugaagcagcuguccagcaacuucggggccaucuccagcgugcugaacgacauccucucccgccuggacaaggucgaggccgaggugcagaucgaccggcugaucaccggccgccuccagagccugcagaccuacgugacccagcagcugauccgggcggccgagauccgcgccagcgccaaccucgccgcgaccaagauguccgagugcguccugggccagagcaagcggguggacuucugcgggaagggcuaccaccugauguccuucccccagagcgccccgcacgggguggucuuccuccacgugacguacguccccgcccaggagaagaacuucaccaccgcccccgcgaucugccacgacggcaaggcccacuucccccgcgaggggguguucguguccaacggcacccacugguucgucacgcagcggaacuucuacgagccgcagaucaucaccaccgacaacaccuucgugagcggcaacugcgacguggucaucgggaucgugaacaacacgguguacgacccccugcagcccgagcuggacuccuucaaggaggagcucgacaaguacuucaagaaccacaccagccccgacgucgaccugggcgacaucuccgggaucaacgccagcguggugaacauccagaaggagaucgaccgccugaacgaggucgccaagaaccucaacgagucccugaucgaccugcaggagcucggcaaguacgagcaguacaucaaguggccgugguacaucuggcugggcuucaucgccgggcugaucgcgaucgugauggugaccaucaugcucugcugcaugaccagcugcugcuccugccugaagggcugcugcagcugcggguccugcugcaaguucgacgaggacgacagcgagcccguccugaagggcgugaagcuccacuacacgugaugacucgagcugguacugcaugcacgcaaugcuagcugccccuuucccguccuggguaccccgagucucccccgaccucgggucccagguaugcucccaccuccaccugccccacucaccaccucugcuaguuccagacaccucccaagcacgcagcaaugcagcucaaaacgcuuagccuagccacacccccacgggaaacagcagugauuaaccuuuagcaauaaacgaaaguuuaacuaagcuauacuaaccccaggguuggucaauuucgugccagccacacccuggagcuagcaaaaaaaaaaaaaaaaaaaaaaaaaaaaaagcauaugacuaaaaaaaaaaaaaaaaaaaaaaaaaaaaaaaaaaaaaaaaaaaaaaaaaaaaaaaaaaaaaaaaaaaaaa

SEQ ID NO: 26731 - RNA, 4283 nt, Artificial Sequence
  SARS-CoV-2/Wuhan/WIV05/2019__EPI_ISL_402128 spike protein mRNA gc (1-1273)(S477N_D614G)
agaauaaacuaguauucuucugguccccacagacucagagagaacccgccaccauguucguguuccugguccuccugccccuggugagcucccagugcgugaaccucaccacccgcacgcagcugccgcccgccuacaccaacagcuucacccggggcgucuacuaccccgacaagguguuccgcuccagcgugcugcacuccacccaggaccucuuccugcccuucuucagcaacgucacgugguuccacgccauccacguguccgggaccaacggcaccaagcgguucgacaacccggugcugcccuucaacgacggggucuacuucgcgagcaccgagaaguccaacaucauccgcggcuggaucuucgggacgacccucgacagcaagacccagucccugcugaucgugaacaacgccaccaacguggucaucaaggugugcgaguuccaguucugcaacgaccccuuccucggcguguacuaccacaagaacaacaagagcuggauggaguccgaguuccgggucuacagcuccgccaacaacugcacguucgaguacgugagccagcccuuccugauggaccuggagggcaagcaggggaacuucaagaaccuccgcgaguucguguucaagaacaucgacggcuacuucaagaucuacuccaagcacaccccgaucaaccugguccgggaccugccccagggguucagcgcccucgagccccugguggaccugcccaucggcaucaacaucacccgcuuccagacccuccuggcccugcaccgguccuaccucacgccgggggacagcagcuccggcuggaccgcgggcgccgccgccuacuacgugggguaccugcagccccgcaccuuccugcucaaguacaacgagaacggcaccaucacggacgcggucgacugcgcccuggacccccugagcgagaccaagugcacccucaaguccuucaccguggagaaggggaucuaccagacgagcaacuuccgggugcagcccaccgaguccaucguccgcuucccgaacaucaccaaccugugccccuucggcgagguguucaacgccacccgguucgccagcgucuacgccuggaaccgcaagcggaucuccaacugcguggcggacuacagcgugcuguacaacuccgccagcuucuccacguucaagugcuacggcgucagccccaccaagcucaacgaccugugcuucaccaacguguacgccgacuccuucgugauccgcggggacgagguccggcagaucgcccccggccagaccgggaagaucgccgacuacaacuacaagcugccggacgacuucacgggcugcgugaucgcguggaacagcaacaaccucgacuccaaggucgggggcaacuacaacuaccuguaccgccuguuccgcaagagcaaccucaagcccuucgagcgggacaucuccaccgagaucuaccaggccggcaacacccccugcaacgggguggagggcuucaacugcuacuucccccugcagagcuacggguuccagccgaccaacggcgugggguaccagcccuaccggguggucgugcuguccuucgagcuccugcacgcccccgccacggugugcggccccaagaaguccaccaaccuggucaagaacaagugcgugaacuucaacuucaacggccucaccgggaccggcgugcugaccgagagcaacaagaaguuccugccguuccagcaguucgggcgcgacaucgccgacacgaccgacgcgguccgcgacccccagacccuggagauccucgacaucacccccugcagcuucggcggggugagcgugaucacgccgggcaccaacaccuccaaccaggucgccgugcuguaccagggcgugaacugcaccgagguccccguggccauccacgccgaccagcugacgcccaccuggcggguguacagcaccggguccaacgucuuccagacccgcgccggcugccucaucggggcggagcacgugaacaacagcuacgagugcgacauccccaucggcgccggcaucugcgccuccuaccagacgcagaccaacagcccgcggcgcgcccgguccguggcgagccaguccaucaucgccuacaccaugagccugggggccgagaacuccgucgccuacagcaacaacuccaucgccauccccaccaacuucacgaucagcgugaccaccgagauccugcccguguccaugaccaagacgagcgucgacugcaccauguacaucugcggcgacagcaccgagugcuccaaccuccugcugcaguacgggagcuucugcacccagcucaaccgcgcgcugacgggcaucgccguggagcaggacaagaacacccaggagguguucgcccaggucaagcagaucuacaagacgcccccgaucaaggacuucgggggcuucaacuucucccagauccugcccgaccccagcaagcccuccaagcggagcuucaucgaggaccuccuguucaacaaggugacccuggccgacgccggcuucaucaagcaguacggggacugccucggcgacaucgcggcccgcgaccugaucugcgcccagaaguucaacgggcugaccgugcucccgccccugcugaccgacgagaugaucgcccaguacaccuccgcccuccuggcgggcaccaucacgagcggguggaccuucggcgccggcgccgcccugcagauccccuucgcgaugcagauggccuaccgguucaacgggaucggcgucacccagaacgugcucuacgagaaccagaagcugaucgccaaccaguucaacuccgccaucgggaagauccaggacagccuguccagcaccgccuccgcgcucggcaagcugcaggacguggucaaccagaacgcccaggcccugaacacgcucgugaagcagcugagcuccaacuucggggccaucagcuccgugcugaacgacauccucagccgccuggacaaggucgaggccgaggugcagaucgaccggcugaucaccggccgccuccagucccugcagaccuacgugacccagcagcugauccgggcggccgagauccgcgccagcgccaaccucgccgcgaccaagaugagcgagugcguccugggccaguccaagcggguggacuucugcgggaagggcuaccaccugaugagcuucccccaguccgccccgcacgggguggucuuccuccacgugacguacguccccgcccaggagaagaacuucaccaccgcccccgcgaucugccacgacggcaaggcccacuucccccgcgaggggguguucgugagcaacggcacccacugguucgucacgcagcggaacuucuacgagccgcagaucaucaccaccgacaacaccuucguguccggcaacugcgacguggucaucgggaucgugaacaacacgguguacgacccccugcagcccgagcuggacagcuucaaggaggagcucgacaaguacuucaagaaccacaccucccccgacgucgaccugggcgacaucagcgggaucaacgccuccguggugaacauccagaaggagaucgaccgccugaacgaggucgccaagaaccucaacgagagccugaucgaccugcaggagcucggcaaguacgagcaguacaucaaguggccgugguacaucuggcugggcuucaucgccgggcugaucgcgaucgugauggugaccaucaugcucugcugcaugaccuccugcugcagcugccugaagggcugcugcuccugcgggagcugcugcaaguucgacgaggacgacuccgagcccguccugaagggcgugaagcuccacuacacgugaugacucgagcugguacugcaugcacgcaaugcuagcugccccuuucccguccuggguaccccgagucucccccgaccucgggucccagguaugcucccaccuccaccugccccacucaccaccucugcuaguuccagacaccucccaagcacgcagcaaugcagcucaaaacgcuuagccuagccacacccccacgggaaacagcagugauuaaccuuuagcaauaaacgaaaguuuaacuaagcuauacuaaccccaggguuggucaauuucgugccagccacacccuggagcuagcaaaaaaaaaaaaaaaaaaaaaaaaaaaaaagcauaugacuaaaaaaaaaaaaaaaaaaaaaaaaaaaaaaaaaaaaaaaaaaaaaaaaaaaaaaaaaaaaaaaaaaaaaa

SEQ ID NO: 26732 - RNA, 4283 nt, Artificial Sequence
  SARS-CoV-2/Wuhan/WIV05/2019__EPI_ISL_402128 spike protein mRNA gc (1-1273)(N501Y_D614G)
agaauaaacuaguauucuucugguccccacagacucagagagaacccgccaccauguucguguuccugguccuccugccccuggugagcucccagugcgugaaccucaccacccgcacgcagcugccgcccgccuacaccaacagcuucacccggggcgucuacuaccccgacaagguguuccgcuccagcgugcugcacuccacccaggaccucuuccugcccuucuucagcaacgucacgugguuccacgccauccacguguccgggaccaacggcaccaagcgguucgacaacccggugcugcccuucaacgacggggucuacuucgcgagcaccgagaaguccaacaucauccgcggcuggaucuucgggacgacccucgacagcaagacccagucccugcugaucgugaacaacgccaccaacguggucaucaaggugugcgaguuccaguucugcaacgaccccuuccucggcguguacuaccacaagaacaacaagagcuggauggaguccgaguuccgggucuacagcuccgccaacaacugcacguucgaguacgugagccagcccuuccugauggaccuggagggcaagcaggggaacuucaagaaccuccgcgaguucguguucaagaacaucgacggcuacuucaagaucuacuccaagcacaccccgaucaaccugguccgggaccugccccagggguucagcgcccucgagccccugguggaccugcccaucggcaucaacaucacccgcuuccagacccuccuggcccugcaccgguccuaccucacgccgggggacagcagcuccggcuggaccgcgggcgccgccgccuacuacgugggguaccugcagccccgcaccuuccugcucaaguacaacgagaacggcaccaucacggacgcggucgacugcgcccuggacccccugagcgagaccaagugcacccucaaguccuucaccguggagaaggggaucuaccagacgagcaacuuccgggugcagcccaccgaguccaucguccgcuucccgaacaucaccaaccugugccccuucggcgagguguucaacgccacccgguucgccagcgucuacgccuggaaccgcaagcggaucuccaacugcguggcggacuacagcgugcuguacaacuccgccagcuucuccacguucaagugcuacggcgucagccccaccaagcucaacgaccugugcuucaccaacguguacgccgacuccuucgugauccgcggggacgagguccggcagaucgcccccggccagaccgggaagaucgccgacuacaacuacaagcugccggacgacuucacgggcugcgugaucgcguggaacagcaacaaccucgacuccaaggucgggggcaacuacaacuaccuguaccgccuguuccgcaagagcaaccucaagcccuucgagcgggacaucuccaccgagaucuaccaggccggcagcacccccugcaacgggguggagggcuucaacugcuacuucccccugcaguccuacggguuccagccgaccuacggcgugggguaccagcccuaccggguggucgugcugagcuucgagcuccugcacgcccccgccacggugugcggccccaagaaguccaccaaccuggucaagaacaagugcgugaacuucaacuucaacggccucaccgggaccggcgugcugaccgagagcaacaagaaguuccugccguuccagcaguucgggcgcgacaucgccgacacgaccgacgcgguccgcgacccccagacccuggagauccucgacaucacccccugcagcuucggcgggguguccgugaucacgccgggcaccaacaccagcaaccaggucgccgugcuguaccagggcgugaacugcaccgagguccccguggccauccacgccgaccagcugacgcccaccuggcggguguacuccaccgggagcaacgucuuccagacccgcgccggcugccucaucggggcggagcacgugaacaacuccuacgagugcgacauccccaucggcgccggcaucugcgccagcuaccagacgcagaccaacuccccgcggcgcgcccggagcguggcgucccagagcaucaucgccuacaccaugucccugggggccgagaacagcgucgccuacuccaacaacagcaucgccauccccaccaacuucacgaucuccgugaccaccgagauccugcccgugagcaugaccaagacgagcgucgacugcaccauguacaucugcggcgacuccaccgagugcagcaaccuccugcugcaguacggguccuucugcacccagcucaaccgcgcgcugacgggcaucgccguggagcaggacaagaacacccaggagguguucgcccaggucaagcagaucuacaagacgcccccgaucaaggacuucgggggcuucaacuucagccagauccugcccgaccccuccaagcccagcaagcgguccuucaucgaggaccuccuguucaacaaggugacccuggccgacgccggcuucaucaagcaguacggggacugccucggcgacaucgcggcccgcgaccugaucugcgcccagaaguucaacgggcugaccgugcucccgccccugcugaccgacgagaugaucgcccaguacaccagcgcccuccuggcgggcaccaucacguccggguggaccuucggcgccggcgccgcccugcagauccccuucgcgaugcagauggccuaccgguucaacgggaucggcgucacccagaacgugcucuacgagaaccagaagcugaucgccaaccaguucaacagcgccaucgggaagauccaggacucccugagcuccaccgccagcgcgcucggcaagcugcaggacguggucaaccagaacgcccaggcccugaacacgcucgugaagcagcuguccagcaacuucggggccaucuccagcgugcugaacgacauccucucccgccuggacaaggucgaggccgaggugcagaucgaccggcugaucaccggccgccuccagagccugcagaccuacgugacccagcagcugauccgggcggccgagauccgcgccagcgccaaccucgccgcgaccaagauguccgagugcguccugggccagagcaagcggguggacuucugcgggaagggcuaccaccugauguccuucccccagagcgccccgcacgggguggucuuccuccacgugacguacguccccgcccaggagaagaacuucaccaccgcccccgcgaucugccacgacggcaaggcccacuucccccgcgaggggguguucguguccaacggcacccacugguucgucacgcagcggaacuucuacgagccgcagaucaucaccaccgacaacaccuucgugagcggcaacugcgacguggucaucgggaucgugaacaacacgguguacgacccccugcagcccgagcuggacuccuucaaggaggagcucgacaaguacuucaagaaccacaccagccccgacgucgaccugggcgacaucuccgggaucaacgccagcguggugaacauccagaaggagaucgaccgccugaacgaggucgccaagaaccucaacgagucccugaucgaccugcaggagcucggcaaguacgagcaguacaucaaguggccgugguacaucuggcugggcuucaucgccgggcugaucgcgaucgugauggugaccaucaugcucugcugcaugaccagcugcugcuccugccugaagggcugcugcagcugcggguccugcugcaaguucgacgaggacgacagcgagcccguccugaagggcgugaagcuccacuacacgugaugacucgagcugguacugcaugcacgcaaugcuagcugccccuuucccguccuggguaccccgagucucccccgaccucgggucccagguaugcucccaccuccaccugccccacucaccaccucugcuaguuccagacaccucccaagcacgcagcaaugcagcucaaaacgcuuagccuagccacacccccacgggaaacagcagugauuaaccuuuagcaauaaacgaaaguuuaacuaagcuauacuaaccccaggguuggucaauuucgugccagccacacccuggagcuagcaaaaaaaaaaaaaaaaaaaaaaaaaaaaaagcauaugacuaaaaaaaaaaaaaaaaaaaaaaaaaaaaaaaaaaaaaaaaaaaaaaaaaaaaaaaaaaaaaaaaaaaaaa

SEQ ID NO: 26733 - RNA, 4277 nt, Artificial Sequence
  SARS-CoV-2/Wuhan/WIV05/2019__EPI_ISL_402128 spike protein mRNA gc (1-1273)(H69del_V70del_D614G)
agaauaaacuaguauucuucugguccccacagacucagagagaacccgccaccauguucguguuccugguccuccugccccuggugagcucccagugcgugaaccucaccacccgcacgcagcugccgcccgccuacaccaacagcuucacccggggcgucuacuaccccgacaagguguuccgcuccagcgugcugcacuccacccaggaccucuuccugcccuucuucagcaacgucacgugguuccacgccaucuccgggaccaacggcaccaagcgguucgacaacccggugcugcccuucaacgacgggguguacuucgcgagcaccgagaaguccaacaucauccgcggcuggaucuucgggacgacccucgacagcaagacccagucccugcugaucgucaacaacgccaccaacguggugaucaaggucugcgaguuccaguucugcaacgaccccuuccucggcguguacuaccacaagaacaacaagagcuggauggaguccgaguuccggguguacagcuccgccaacaacugcacguucgaguacgucagccagcccuuccugauggaccuggagggcaagcaggggaacuucaagaaccuccgcgaguucguguucaagaacaucgacggcuacuucaagaucuacuccaagcacaccccgaucaaccuggugcgggaccugccccagggguucagcgcccucgagccccuggucgaccugcccaucggcaucaacaucacccgcuuccagacccuccuggcccugcaccgguccuaccucacgccgggggacagcagcuccggcuggaccgcgggcgccgccgccuacuacgugggguaccugcagccccgcaccuuccugcucaaguacaacgagaacggcaccaucacggacgcgguggacugcgcccuggacccccugagcgagaccaagugcacccucaaguccuucaccgucgagaaggggaucuaccagacgagcaacuuccgggugcagcccaccgaguccaucgugcgcuucccgaacaucaccaaccugugccccuucggcgaggucuucaacgccacccgguucgccagcguguacgccuggaaccgcaagcggaucuccaacugcgucgcggacuacagcgugcuguacaacuccgccagcuucuccacguucaagugcuacggcgugagccccaccaagcucaacgaccugugcuucaccaacgucuacgccgacuccuucgugauccgcggggacgaggugcggcagaucgcccccggccagaccgggaagaucgccgacuacaacuacaagcugccggacgacuucacgggcugcgucaucgcguggaacagcaacaaccucgacuccaaggucgggggcaacuacaacuaccuguaccgccuguuccgcaagagcaaccucaagcccuucgagcgggacaucuccaccgagaucuaccaggccggcagcacccccugcaacgggguggagggcuucaacugcuacuucccccugcaguccuacggguuccagccgaccaacggcgugggguaccagcccuaccggguggugguccugagcuucgagcuccugcacgcccccgccacggugugcggccccaagaaguccaccaaccuggugaagaacaagugcgucaacuucaacuucaacggccucaccgggaccggcgugcugaccgagagcaacaagaaguuccugccguuccagcaguucgggcgcgacaucgccgacacgaccgacgcggugcgcgacccccagacccuggagauccucgacaucacccccugcagcuucggcggggucuccgugaucacgccgggcaccaacaccagcaaccagguggccguccuguaccagggcgugaacugcaccgaggugcccgucgccauccacgccgaccagcugacgcccaccuggcggguguacuccaccgggagcaacguguuccagacccgcgccggcugccucaucggggcggagcacgucaacaacuccuacgagugcgacauccccaucggcgccggcaucugcgccagcuaccagacgcagaccaacuccccgcggcgcgcccggagcguggcgucccagagcaucaucgccuacaccaugucccugggggccgagaacagcguggccuacuccaacaacagcaucgccauccccaccaacuucacgaucuccgucaccaccgagauccugcccgugagcaugaccaagacgagcguggacugcaccauguacaucugcggcgacuccaccgagugcagcaaccuccugcugcaguacggguccuucugcacccagcucaaccgcgcgcugacgggcaucgccgucgagcaggacaagaacacccaggagguguucgcccaggugaagcagaucuacaagacgcccccgaucaaggacuucgggggcuucaacuucagccagauccugcccgaccccuccaagcccagcaagcgguccuucaucgaggaccuccuguucaacaaggucacccuggccgacgccggcuucaucaagcaguacggggacugccucggcgacaucgcggcccgcgaccugaucugcgcccagaaguucaacgggcugaccgugcucccgccccugcugaccgacgagaugaucgcccaguacaccagcgcccuccuggcgggcaccaucacguccggguggaccuucggcgccggcgccgcccugcagauccccuucgcgaugcagauggccuaccgguucaacgggaucggcgugacccagaacguccucuacgagaaccagaagcugaucgccaaccaguucaacagcgccaucgggaagauccaggacucccugagcuccaccgccagcgcgcucggcaagcugcaggacguggugaaccagaacgcccaggcccugaacacgcucgucaagcagcuguccagcaacuucggggccaucuccagcgugcugaacgacauccucucccgccuggacaagguggaggccgagguccagaucgaccggcugaucaccggccgccuccagagccugcagaccuacgugacccagcagcugauccgggcggccgagauccgcgccagcgccaaccucgccgcgaccaagauguccgagugcgugcugggccagagcaagcgggucgacuucugcgggaagggcuaccaccugauguccuucccccagagcgccccgcacggggugguguuccuccacgucacguacgugcccgcccaggagaagaacuucaccaccgcccccgcgaucugccacgacggcaaggcccacuucccccgcgagggggucuucguguccaacggcacccacugguucgugacgcagcggaacuucuacgagccgcagaucaucaccaccgacaacaccuucgucagcggcaacugcgacguggugaucgggaucgucaacaacacgguguacgacccccugcagcccgagcuggacuccuucaaggaggagcucgacaaguacuucaagaaccacaccagccccgacguggaccugggcgacaucuccgggaucaacgccagcgucgugaacauccagaaggagaucgaccgccugaacgagguggccaagaaccucaacgagucccugaucgaccugcaggagcucggcaaguacgagcaguacaucaaguggccgugguacaucuggcugggcuucaucgccgggcugaucgcgaucgucauggugaccaucaugcucugcugcaugaccagcugcugcuccugccugaagggcugcugcagcugcggguccugcugcaaguucgacgaggacgacagcgagcccgugcugaagggcgucaagcuccacuacacgugaugacucgagcugguacugcaugcacgcaaugcuagcugccccuuucccguccuggguaccccgagucucccccgaccucgggucccagguaugcucccaccuccaccugccccacucaccaccucugcuaguuccagacaccucccaagcacgcagcaaugcagcucaaaacgcuuagccuagccacacccccacgggaaacagcagugauuaaccuuuagcaauaaacgaaaguuuaacuaagcuauacuaaccccaggguuggucaauuucgugccagccacacccuggagcuagcaaaaaaaaaaaaaaaaaaaaaaaaaaaaaagcauaugacuaaaaaaaaaaaaaaaaaaaaaaaaaaaaaaaaaaaaaaaaaaaaaaaaaaaaaaaaaaaaaaaaaaaaaa

SEQ ID NO: 26734 - RNA, 4283 nt, Artificial Sequence
  SARS-CoV-2/Wuhan/WIV05/2019__EPI_ISL_402128 spike protein mRNA gc (1-1273)(Y453F_D614G)
agaauaaacuaguauucuucugguccccacagacucagagagaacccgccaccauguucguguuccugguccuccugccccuggugagcucccagugcgugaaccucaccacccgcacgcagcugccgcccgccuacaccaacagcuucacccggggcgucuacuaccccgacaagguguuccgcuccagcgugcugcacuccacccaggaccucuuccugcccuucuucagcaacgucacgugguuccacgccauccacguguccgggaccaacggcaccaagcgguucgacaacccggugcugcccuucaacgacggggucuacuucgcgagcaccgagaaguccaacaucauccgcggcuggaucuucgggacgacccucgacagcaagacccagucccugcugaucgugaacaacgccaccaacguggucaucaaggugugcgaguuccaguucugcaacgaccccuuccucggcguguacuaccacaagaacaacaagagcuggauggaguccgaguuccgggucuacagcuccgccaacaacugcacguucgaguacgugagccagcccuuccugauggaccuggagggcaagcaggggaacuucaagaaccuccgcgaguucguguucaagaacaucgacggcuacuucaagaucuacuccaagcacaccccgaucaaccugguccgggaccugccccagggguucagcgcccucgagccccugguggaccugcccaucggcaucaacaucacccgcuuccagacccuccuggcccugcaccgguccuaccucacgccgggggacagcagcuccggcuggaccgcgggcgccgccgccuacuacgugggguaccugcagccccgcaccuuccugcucaaguacaacgagaacggcaccaucacggacgcggucgacugcgcccuggacccccugagcgagaccaagugcacccucaaguccuucaccguggagaaggggaucuaccagacgagcaacuuccgggugcagcccaccgaguccaucguccgcuucccgaacaucaccaaccugugccccuucggcgagguguucaacgccacccgguucgccagcgucuacgccuggaaccgcaagcggaucuccaacugcguggcggacuacagcgugcuguacaacuccgccagcuucuccacguucaagugcuacggcgucagccccaccaagcucaacgaccugugcuucaccaacguguacgccgacuccuucgugauccgcggggacgagguccggcagaucgcccccggccagaccgggaagaucgccgacuacaacuacaagcugccggacgacuucacgggcugcgugaucgcguggaacagcaacaaccucgacuccaaggucgggggcaacuacaacuaccuguuccgccuguuccgcaagagcaaccucaagcccuucgagcgggacaucuccaccgagaucuaccaggccggcagcacccccugcaacgggguggagggcuucaacugcuacuucccccugcaguccuacggguuccagccgaccaacggcgugggguaccagcccuaccggguggucgugcugagcuucgagcuccugcacgcccccgccacggugugcggccccaagaaguccaccaaccuggucaagaacaagugcgugaacuucaacuucaacggccucaccgggaccggcgugcugaccgagagcaacaagaaguuccugccguuccagcaguucgggcgcgacaucgccgacacgaccgacgcgguccgcgacccccagacccuggagauccucgacaucacccccugcagcuucggcgggguguccgugaucacgccgggcaccaacaccagcaaccaggucgccgugcuguaccagggcgugaacugcaccgagguccccguggccauccacgccgaccagcugacgcccaccuggcggguguacuccaccgggagcaacgucuuccagacccgcgccggcugccucaucggggcggagcacgugaacaacuccuacgagugcgacauccccaucggcgccggcaucugcgccagcuaccagacgcagaccaacuccccgcggcgcgcccggagcguggcgucccagagcaucaucgccuacaccaugucccugggggccgagaacagcgucgccuacuccaacaacagcaucgccauccccaccaacuucacgaucuccgugaccaccgagauccugcccgugagcaugaccaagacgagcgucgacugcaccauguacaucugcggcgacuccaccgagugcagcaaccuccugcugcaguacggguccuucugcacccagcucaaccgcgcgcugacgggcaucgccguggagcaggacaagaacacccaggagguguucgcccaggucaagcagaucuacaagacgcccccgaucaaggacuucgggggcuucaacuucagccagauccugcccgaccccuccaagcccagcaagcgguccuucaucgaggaccuccuguucaacaaggugacccuggccgacgccggcuucaucaagcaguacggggacugccucggcgacaucgcggcccgcgaccugaucugcgcccagaaguucaacgggcugaccgugcucccgccccugcugaccgacgagaugaucgcccaguacaccagcgcccuccuggcgggcaccaucacguccggguggaccuucggcgccggcgccgcccugcagauccccuucgcgaugcagauggccuaccgguucaacgggaucggcgucacccagaacgugcucuacgagaaccagaagcugaucgccaaccaguucaacagcgccaucgggaagauccaggacucccugagcuccaccgccagcgcgcucggcaagcugcaggacguggucaaccagaacgcccaggcccugaacacgcucgugaagcagcuguccagcaacuucggggccaucuccagcgugcugaacgacauccucucccgccuggacaaggucgaggccgaggugcagaucgaccggcugaucaccggccgccuccagagccugcagaccuacgugacccagcagcugauccgggcggccgagauccgcgccagcgccaaccucgccgcgaccaagauguccgagugcguccugggccagagcaagcggguggacuucugcgggaagggcuaccaccugauguccuucccccagagcgccccgcacgggguggucuuccuccacgugacguacguccccgcccaggagaagaacuucaccaccgcccccgcgaucugccacgacggcaaggcccacuucccccgcgaggggguguucguguccaacggcacccacugguucgucacgcagcggaacuucuacgagccgcagaucaucaccaccgacaacaccuucgugagcggcaacugcgacguggucaucgggaucgugaacaacacgguguacgacccccugcagcccgagcuggacuccuucaaggaggagcucgacaaguacuucaagaaccacaccagccccgacgucgaccugggcgacaucuccgggaucaacgccagcguggugaacauccagaaggagaucgaccgccugaacgaggucgccaagaaccucaacgagucccugaucgaccugcaggagcucggcaaguacgagcaguacaucaaguggccgugguacaucuggcugggcuucaucgccgggcugaucgcgaucgugauggugaccaucaugcucugcugcaugaccagcugcugcuccugccugaagggcugcugcagcugcggguccugcugcaaguucgacgaggacgacagcgagcccguccugaagggcgugaagcuccacuacacgugaugacucgagcugguacugcaugcacgcaaugcuagcugccccuuucccguccuggguaccccgagucucccccgaccucgggucccagguaugcucccaccuccaccugccccacucaccaccucugcuaguuccagacaccucccaagcacgcagcaaugcagcucaaaacgcuuagccuagccacacccccacgggaaacagcagugauuaaccuuuagcaauaaacgaaaguuuaacuaagcuauacuaaccccaggguuggucaauuucgugccagccacacccuggagcuagcaaaaaaaaaaaaaaaaaaaaaaaaaaaaaagcauaugacuaaaaaaaaaaaaaaaaaaaaaaaaaaaaaaaaaaaaaaaaaaaaaaaaaaaaaaaaaaaaaaaaaaaaaa

SEQ ID NO: 26735 - RNA, 4283 nt, Artificial Sequence
  SARS-CoV-2/Wuhan/WIV05/2019__EPI_ISL_402128 spike protein mRNA gc (1-1273)(D614G_I692V)
agaauaaacuaguauucuucugguccccacagacucagagagaacccgccaccauguucguguuccugguccuccugccccuggugagcucccagugcgugaaccucaccacccgcacgcagcugccgcccgccuacaccaacagcuucacccggggcgucuacuaccccgacaagguguuccgcuccagcgugcugcacuccacccaggaccucuuccugcccuucuucagcaacgucacgugguuccacgccauccacguguccgggaccaacggcaccaagcgguucgacaacccggugcugcccuucaacgacggggucuacuucgcgagcaccgagaaguccaacaucauccgcggcuggaucuucgggacgacccucgacagcaagacccagucccugcugaucgugaacaacgccaccaacguggucaucaaggugugcgaguuccaguucugcaacgaccccuuccucggcguguacuaccacaagaacaacaagagcuggauggaguccgaguuccgggucuacagcuccgccaacaacugcacguucgaguacgugagccagcccuuccugauggaccuggagggcaagcaggggaacuucaagaaccuccgcgaguucguguucaagaacaucgacggcuacuucaagaucuacuccaagcacaccccgaucaaccugguccgggaccugccccagggguucagcgcccucgagccccugguggaccugcccaucggcaucaacaucacccgcuuccagacccuccuggcccugcaccgguccuaccucacgccgggggacagcagcuccggcuggaccgcgggcgccgccgccuacuacgugggguaccugcagccccgcaccuuccugcucaaguacaacgagaacggcaccaucacggacgcggucgacugcgcccuggacccccugagcgagaccaagugcacccucaaguccuucaccguggagaaggggaucuaccagacgagcaacuuccgggugcagcccaccgaguccaucguccgcuucccgaacaucaccaaccugugccccuucggcgagguguucaacgccacccgguucgccagcgucuacgccuggaaccgcaagcggaucuccaacugcguggcggacuacagcgugcuguacaacuccgccagcuucuccacguucaagugcuacggcgucagccccaccaagcucaacgaccugugcuucaccaacguguacgccgacuccuucgugauccgcggggacgagguccggcagaucgcccccggccagaccgggaagaucgccgacuacaacuacaagcugccggacgacuucacgggcugcgugaucgcguggaacagcaacaaccucgacuccaaggucgggggcaacuacaacuaccuguaccgccuguuccgcaagagcaaccucaagcccuucgagcgggacaucuccaccgagaucuaccaggccggcagcacccccugcaacgggguggagggcuucaacugcuacuucccccugcaguccuacggguuccagccgaccaacggcgugggguaccagcccuaccggguggucgugcugagcuucgagcuccugcacgcccccgccacggugugcggccccaagaaguccaccaaccuggucaagaacaagugcgugaacuucaacuucaacggccucaccgggaccggcgugcugaccgagagcaacaagaaguuccugccguuccagcaguucgggcgcgacaucgccgacacgaccgacgcgguccgcgacccccagacccuggagauccucgacaucacccccugcagcuucggcgggguguccgugaucacgccgggcaccaacaccagcaaccaggucgccgugcuguaccagggcgugaacugcaccgagguccccguggccauccacgccgaccagcugacgcccaccuggcggguguacuccaccgggagcaacgucuuccagacccgcgccggcugccucaucggggcggagcacgugaacaacuccuacgagugcgacauccccaucggcgccggcaucugcgccagcuaccagacgcagaccaacuccccgcggcgcgcccggagcguggcgucccagagcgucaucgccuacaccaugucccugggggccgagaacagcguggccuacuccaacaacagcaucgccauccccaccaacuucacgaucuccgugaccaccgagauccugcccgucagcaugaccaagacgagcguggacugcaccauguacaucugcggcgacuccaccgagugcagcaaccuccugcugcaguacggguccuucugcacccagcucaaccgcgcgcugacgggcaucgccguggagcaggacaagaacacccaggaggucuucgcccaggugaagcagaucuacaagacgcccccgaucaaggacuucgggggcuucaacuucagccagauccugcccgaccccuccaagcccagcaagcgguccuucaucgaggaccuccuguucaacaaggugacccuggccgacgccggcuucaucaagcaguacggggacugccucggcgacaucgcggcccgcgaccugaucugcgcccagaaguucaacgggcugaccguccucccgccccugcugaccgacgagaugaucgcccaguacaccagcgcccuccuggcgggcaccaucacguccggguggaccuucggcgccggcgccgcccugcagauccccuucgcgaugcagauggccuaccgguucaacgggaucggcgugacccagaacgugcucuacgagaaccagaagcugaucgccaaccaguucaacagcgccaucgggaagauccaggacucccugagcuccaccgccagcgcgcucggcaagcugcaggacgucgugaaccagaacgcccaggcccugaacacgcucgugaagcagcuguccagcaacuucggggccaucuccagcguccugaacgacauccucucccgccuggacaagguggaggccgaggugcagaucgaccggcugaucaccggccgccuccagagccugcagaccuacgucacccagcagcugauccgggcggccgagauccgcgccagcgccaaccucgccgcgaccaagauguccgagugcgugcugggccagagcaagcggguggacuucugcgggaagggcuaccaccugauguccuucccccagagcgccccgcacggggucguguuccuccacgucacguacgugcccgcccaggagaagaacuucaccaccgcccccgcgaucugccacgacggcaaggcccacuucccccgcgaggggguguucgucuccaacggcacccacugguucgugacgcagcggaacuucuacgagccgcagaucaucaccaccgacaacaccuucgugagcggcaacugcgacgucgugaucgggaucgugaacaacacggucuacgacccccugcagcccgagcuggacuccuucaaggaggagcucgacaaguacuucaagaaccacaccagccccgacguggaccugggcgacaucuccgggaucaacgccagcguggucaacauccagaaggagaucgaccgccugaacgagguggccaagaaccucaacgagucccugaucgaccugcaggagcucggcaaguacgagcaguacaucaaguggccgugguacaucuggcugggcuucaucgccgggcugaucgcgaucgugauggucaccaucaugcucugcugcaugaccagcugcugcuccugccugaagggcugcugcagcugcggguccugcugcaaguucgacgaggacgacagcgagcccgugcugaagggcgugaagcuccacuacacgugaugacucgagcugguacugcaugcacgcaaugcuagcugccccuuucccguccuggguaccccgagucucccccgaccucgggucccagguaugcucccaccuccaccugccccacucaccaccucugcuaguuccagacaccucccaagcacgcagcaaugcagcucaaaacgcuuagccuagccacacccccacgggaaacagcagugauuaaccuuuagcaauaaacgaaaguuuaacuaagcuauacuaaccccaggguuggucaauuucgugccagccacacccuggagcuagcaaaaaaaaaaaaaaaaaaaaaaaaaaaaaagcauaugacuaaaaaaaaaaaaaaaaaaaaaaaaaaaaaaaaaaaaaaaaaaaaaaaaaaaaaaaaaaaaaaaaaaaaaa

SEQ ID NO: 26736 - RNA, 4283 nt, Artificial Sequence
  SARS-CoV-2/Wuhan/WIV05/2019__EPI_ISL_402128 spike protein mRNA gc (1-1273)(D614G_M1229I)
agaauaaacuaguauucuucugguccccacagacucagagagaacccgccaccauguucguguuccugguccuccugccccuggugagcucccagugcgugaaccucaccacccgcacgcagcugccgcccgccuacaccaacagcuucacccggggcgucuacuaccccgacaagguguuccgcuccagcgugcugcacuccacccaggaccucuuccugcccuucuucagcaacgucacgugguuccacgccauccacguguccgggaccaacggcaccaagcgguucgacaacccggugcugcccuucaacgacggggucuacuucgcgagcaccgagaaguccaacaucauccgcggcuggaucuucgggacgacccucgacagcaagacccagucccugcugaucgugaacaacgccaccaacguggucaucaaggugugcgaguuccaguucugcaacgaccccuuccucggcguguacuaccacaagaacaacaagagcuggauggaguccgaguuccgggucuacagcuccgccaacaacugcacguucgaguacgugagccagcccuuccugauggaccuggagggcaagcaggggaacuucaagaaccuccgcgaguucguguucaagaacaucgacggcuacuucaagaucuacuccaagcacaccccgaucaaccugguccgggaccugccccagggguucagcgcccucgagccccugguggaccugcccaucggcaucaacaucacccgcuuccagacccuccuggcccugcaccgguccuaccucacgccgggggacagcagcuccggcuggaccgcgggcgccgccgccuacuacgugggguaccugcagccccgcaccuuccugcucaaguacaacgagaacggcaccaucacggacgcggucgacugcgcccuggacccccugagcgagaccaagugcacccucaaguccuucaccguggagaaggggaucuaccagacgagcaacuuccgggugcagcccaccgaguccaucguccgcuucccgaacaucaccaaccugugccccuucggcgagguguucaacgccacccgguucgccagcgucuacgccuggaaccgcaagcggaucuccaacugcguggcggacuacagcgugcuguacaacuccgccagcuucuccacguucaagugcuacggcgucagccccaccaagcucaacgaccugugcuucaccaacguguacgccgacuccuucgugauccgcggggacgagguccggcagaucgcccccggccagaccgggaagaucgccgacuacaacuacaagcugccggacgacuucacgggcugcgugaucgcguggaacagcaacaaccucgacuccaaggucgggggcaacuacaacuaccuguaccgccuguuccgcaagagcaaccucaagcccuucgagcgggacaucuccaccgagaucuaccaggccggcagcacccccugcaacgggguggagggcuucaacugcuacuucccccugcaguccuacggguuccagccgaccaacggcgugggguaccagcccuaccggguggucgugcugagcuucgagcuccugcacgcccccgccacggugugcggccccaagaaguccaccaaccuggucaagaacaagugcgugaacuucaacuucaacggccucaccgggaccggcgugcugaccgagagcaacaagaaguuccugccguuccagcaguucgggcgcgacaucgccgacacgaccgacgcgguccgcgacccccagacccuggagauccucgacaucacccccugcagcuucggcgggguguccgugaucacgccgggcaccaacaccagcaaccaggucgccgugcuguaccagggcgugaacugcaccgagguccccguggccauccacgccgaccagcugacgcccaccuggcggguguacuccaccgggagcaacgucuuccagacccgcgccggcugccucaucggggcggagcacgugaacaacuccuacgagugcgacauccccaucggcgccggcaucugcgccagcuaccagacgcagaccaacuccccgcggcgcgcccggagcguggcgucccagagcaucaucgccuacaccaugucccugggggccgagaacagcgucgccuacuccaacaacagcaucgccauccccaccaacuucacgaucuccgugaccaccgagauccugcccgugagcaugaccaagacgagcgucgacugcaccauguacaucugcggcgacuccaccgagugcagcaaccuccugcugcaguacggguccuucugcacccagcucaaccgcgcgcugacgggcaucgccguggagcaggacaagaacacccaggagguguucgcccaggucaagcagaucuacaagacgcccccgaucaaggacuucgggggcuucaacuucagccagauccugcccgaccccuccaagcccagcaagcgguccuucaucgaggaccuccuguucaacaaggugacccuggccgacgccggcuucaucaagcaguacggggacugccucggcgacaucgcggcccgcgaccugaucugcgcccagaaguucaacgggcugaccgugcucccgccccugcugaccgacgagaugaucgcccaguacaccagcgcccuccuggcgggcaccaucacguccggguggaccuucggcgccggcgccgcccugcagauccccuucgcgaugcagauggccuaccgguucaacgggaucggcgucacccagaacgugcucuacgagaaccagaagcugaucgccaaccaguucaacagcgccaucgggaagauccaggacucccugagcuccaccgccagcgcgcucggcaagcugcaggacguggucaaccagaacgcccaggcccugaacacgcucgugaagcagcuguccagcaacuucggggccaucuccagcgugcugaacgacauccucucccgccuggacaaggucgaggccgaggugcagaucgaccggcugaucaccggccgccuccagagccugcagaccuacgugacccagcagcugauccgggcggccgagauccgcgccagcgccaaccucgccgcgaccaagauguccgagugcguccugggccagagcaagcggguggacuucugcgggaagggcuaccaccugauguccuucccccagagcgccccgcacgggguggucuuccuccacgugacguacguccccgcccaggagaagaacuucaccaccgcccccgcgaucugccacgacggcaaggcccacuucccccgcgaggggguguucguguccaacggcacccacugguucgucacgcagcggaacuucuacgagccgcagaucaucaccaccgacaacaccuucgugagcggcaacugcgacguggucaucgggaucgugaacaacacgguguacgacccccugcagcccgagcuggacuccuucaaggaggagcucgacaaguacuucaagaaccacaccagccccgacgucgaccugggcgacaucuccgggaucaacgccagcguggugaacauccagaaggagaucgaccgccugaacgaggucgccaagaaccucaacgagucccugaucgaccugcaggagcucggcaaguacgagcaguacaucaaguggccgugguacaucuggcugggcuucaucgccgggcugaucgcgaucgugaucgugaccaucaugcucugcugcaugaccagcugcugcuccugccugaagggcugcugcagcugcggguccugcugcaaguucgacgaggacgacagcgagcccguccugaagggcgugaagcuccacuacacgugaugacucgagcugguacugcaugcacgcaaugcuagcugccccuuucccguccuggguaccccgagucucccccgaccucgggucccagguaugcucccaccuccaccugccccacucaccaccucugcuaguuccagacaccucccaagcacgcagcaaugcagcucaaaacgcuuagccuagccacacccccacgggaaacagcagugauuaaccuuuagcaauaaacgaaaguuuaacuaagcuauacuaaccccaggguuggucaauuucgugccagccacacccuggagcuagcaaaaaaaaaaaaaaaaaaaaaaaaaaaaaagcauaugacuaaaaaaaaaaaaaaaaaaaaaaaaaaaaaaaaaaaaaaaaaaaaaaaaaaaaaaaaaaaaaaaaaaaaaa

SEQ ID NO: 26737 - RNA, 4277 nt, Artificial Sequence
  SARS-CoV-2/Wuhan/WIV05/2019__EPI_ISL_402128 spike protein mRNA gc (1-1273)(H69del_V70del_A222V_Y453F_S477N_D614G_I692V)
agaauaaacuaguauucuucugguccccacagacucagagagaacccgccaccauguucguguuccugguccuccugccccuggugagcucccagugcgugaaccucaccacccgcacgcagcugccgcccgccuacaccaacagcuucacccggggcgucuacuaccccgacaagguguuccgcuccagcgugcugcacuccacccaggaccucuuccugcccuucuucagcaacgucacgugguuccacgccaucuccgggaccaacggcaccaagcgguucgacaacccggugcugcccuucaacgacgggguguacuucgcgagcaccgagaaguccaacaucauccgcggcuggaucuucgggacgacccucgacagcaagacccagucccugcugaucgucaacaacgccaccaacguggugaucaaggucugcgaguuccaguucugcaacgaccccuuccucggcguguacuaccacaagaacaacaagagcuggauggaguccgaguuccggguguacagcuccgccaacaacugcacguucgaguacgucagccagcccuuccugauggaccuggagggcaagcaggggaacuucaagaaccuccgcgaguucguguucaagaacaucgacggcuacuucaagaucuacuccaagcacaccccgaucaaccuggugcgggaccugccccagggguucagcguccucgagccccugguggaccugcccaucggcaucaacaucacccgcuuccagacccuccuggcccugcaccgguccuaccucacgccgggggacagcagcuccggcuggaccgccggcgcggccgccuacuacgugggguaccugcagccccgcaccuuccugcucaaguacaacgagaacggcaccaucacggacgccgucgacugcgcgcuggacccccugagcgagaccaagugcacccucaaguccuucaccguggagaaggggaucuaccagacgagcaacuuccgggugcagcccaccgaguccaucguccgcuucccgaacaucaccaaccugugccccuucggcgagguguucaacgccacccgguucgccagcgucuacgccuggaaccgcaagcggaucuccaacugcguggccgacuacagcgugcuguacaacuccgcgagcuucuccacguucaagugcuacggcgucagccccaccaagcucaacgaccugugcuucaccaacguguacgccgacuccuucgugauccgcggggacgagguccggcagaucgcccccggccagaccgggaagaucgccgacuacaacuacaagcugccggacgacuucacgggcugcgugaucgccuggaacagcaacaaccucgacuccaaggucgggggcaacuacaacuaccuguuccgccuguuccgcaagagcaaccucaagcccuucgagcgggacaucuccaccgagaucuaccaggcgggcaacacccccugcaacgggguggagggcuucaacugcuacuucccccugcagagcuacggguuccagccgaccaacggcgugggguaccagcccuaccggguggucgugcuguccuucgagcuccugcacgcccccgccacggugugcggccccaagaaguccaccaaccuggucaagaacaagugcgugaacuucaacuucaacggccucaccgggaccggcgugcugaccgagagcaacaagaaguuccugccguuccagcaguucgggcgcgacaucgccgacacgaccgacgccguccgcgacccccagacccuggagauccucgacaucacccccugcagcuucggcggggugagcgugaucacgccgggcaccaacaccuccaaccaggucgcggugcuguaccagggcgugaacugcaccgagguccccguggccauccacgccgaccagcugacgcccaccuggcggguguacagcaccggguccaacgucuuccagacccgcgccggcugccucaucggggccgagcacgugaacaacagcuacgagugcgacauccccaucggcgcgggcaucugcgccuccuaccagacgcagaccaacagcccgcggcgcgcccgguccguggccagccaguccgucaucgcguacaccaugagccugggggccgagaacuccguggccuacagcaacaacuccaucgccauccccaccaacuucacgaucagcgugaccaccgagauccugcccgucuccaugaccaagacgagcguggacugcaccauguacaucugcggcgacagcaccgagugcuccaaccuccugcugcaguacgggagcuucugcacccagcucaaccgcgcccugacgggcaucgcgguggagcaggacaagaacacccaggaggucuucgcccaggugaagcagaucuacaagacgcccccgaucaaggacuucgggggcuucaacuucucccagauccugcccgaccccagcaagcccuccaagcggagcuucaucgaggaccuccuguucaacaaggugacccuggccgacgccggcuucaucaagcaguacggggacugccucggcgacaucgccgcgcgcgaccugaucugcgcccagaaguucaacgggcugaccguccucccgccccugcugaccgacgagaugaucgcccaguacaccuccgcccuccuggccggcaccaucacgagcggguggaccuucggcgcgggcgccgcccugcagauccccuucgccaugcagauggcguaccgguucaacgggaucggcgugacccagaacgugcucuacgagaaccagaagcugaucgccaaccaguucaacuccgccaucgggaagauccaggacagccuguccagcaccgccuccgcccucggcaagcugcaggacgucgugaaccagaacgcgcaggcccugaacacgcucgugaagcagcugagcuccaacuucggggccaucagcuccguccugaacgacauccucagccgccuggacaagguggaggccgaggugcagaucgaccggcugaucaccggccgccuccagucccugcagaccuacgucacccagcagcugauccgggccgcggagauccgcgccagcgccaaccucgccgccaccaagaugagcgagugcgugcugggccaguccaagcggguggacuucugcgggaagggcuaccaccugaugagcuucccccaguccgcgccgcacggggucguguuccuccacgucacguacgugcccgcccaggagaagaacuucaccaccgcccccgccaucugccacgacggcaaggcgcacuucccccgcgaggggguguucgucagcaacggcacccacugguucgugacgcagcggaacuucuacgagccgcagaucaucaccaccgacaacaccuucguguccggcaacugcgacgucgugaucgggaucgugaacaacacggucuacgacccccugcagcccgagcuggacagcuucaaggaggagcucgacaaguacuucaagaaccacaccucccccgacguggaccugggcgacaucagcgggaucaacgccuccguggucaacauccagaaggagaucgaccgccugaacgagguggccaagaaccucaacgagagccugaucgaccugcaggagcucggcaaguacgagcaguacaucaaguggccgugguacaucuggcugggcuucaucgccgggcugaucgccaucgugauggucaccaucaugcucugcugcaugaccuccugcugcagcugccugaagggcugcugcuccugcgggagcugcugcaaguucgacgaggacgacuccgagcccgugcugaagggcgugaagcuccacuacacgugaugacucgagcugguacugcaugcacgcaaugcuagcugccccuuucccguccuggguaccccgagucucccccgaccucgggucccagguaugcucccaccuccaccugccccacucaccaccucugcuaguuccagacaccucccaagcacgcagcaaugcagcucaaaacgcuuagccuagccacacccccacgggaaacagcagugauuaaccuuuagcaauaaacgaaaguuuaacuaagcuauacuaaccccaggguuggucaauuucgugccagccacacccuggagcuagcaaaaaaaaaaaaaaaaaaaaaaaaaaaaaagcauaugacuaaaaaaaaaaaaaaaaaaaaaaaaaaaaaaaaaaaaaaaaaaaaaaaaaaaaaaaaaaaaaaaaaaaaaa

SEQ ID NO: 26738 - RNA, 4277 nt, Artificial Sequence
  SARS-CoV-2/Wuhan/WIV05/2019__EPI_ISL_402128 spike protein mRNA gc (1-1273)(H69del_V70del_Y453F_D614G_I692V_M1229I)
agaauaaacuaguauucuucugguccccacagacucagagagaacccgccaccauguucguguuccugguccuccugccccuggugagcucccagugcgugaaccucaccacccgcacgcagcugccgcccgccuacaccaacagcuucacccggggcgucuacuaccccgacaagguguuccgcuccagcgugcugcacuccacccaggaccucuuccugcccuucuucagcaacgucacgugguuccacgccaucuccgggaccaacggcaccaagcgguucgacaacccggugcugcccuucaacgacgggguguacuucgcgagcaccgagaaguccaacaucauccgcggcuggaucuucgggacgacccucgacagcaagacccagucccugcugaucgucaacaacgccaccaacguggugaucaaggucugcgaguuccaguucugcaacgaccccuuccucggcguguacuaccacaagaacaacaagagcuggauggaguccgaguuccggguguacagcuccgccaacaacugcacguucgaguacgucagccagcccuuccugauggaccuggagggcaagcaggggaacuucaagaaccuccgcgaguucguguucaagaacaucgacggcuacuucaagaucuacuccaagcacaccccgaucaaccuggugcgggaccugccccagggguucagcgcccucgagccccuggucgaccugcccaucggcaucaacaucacccgcuuccagacccuccuggcccugcaccgguccuaccucacgccgggggacagcagcuccggcuggaccgcgggcgccgccgccuacuacgugggguaccugcagccccgcaccuuccugcucaaguacaacgagaacggcaccaucacggacgcgguggacugcgcccuggacccccugagcgagaccaagugcacccucaaguccuucaccgucgagaaggggaucuaccagacgagcaacuuccgggugcagcccaccgaguccaucgugcgcuucccgaacaucaccaaccugugccccuucggcgaggucuucaacgccacccgguucgccagcguguacgccuggaaccgcaagcggaucuccaacugcgucgcggacuacagcgugcuguacaacuccgccagcuucuccacguucaagugcuacggcgugagccccaccaagcucaacgaccugugcuucaccaacgucuacgccgacuccuucgugauccgcggggacgaggugcggcagaucgcccccggccagaccgggaagaucgccgacuacaacuacaagcugccggacgacuucacgggcugcgucaucgcguggaacagcaacaaccucgacuccaaggucgggggcaacuacaacuaccuguuccgccuguuccgcaagagcaaccucaagcccuucgagcgggacaucuccaccgagaucuaccaggccggcagcacccccugcaacgggguggagggcuucaacugcuacuucccccugcaguccuacggguuccagccgaccaacggcgugggguaccagcccuaccggguggugguccugagcuucgagcuccugcacgcccccgccacggugugcggccccaagaaguccaccaaccuggugaagaacaagugcgucaacuucaacuucaacggccucaccgggaccggcgugcugaccgagagcaacaagaaguuccugccguuccagcaguucgggcgcgacaucgccgacacgaccgacgcggugcgcgacccccagacccuggagauccucgacaucacccccugcagcuucggcggggucuccgugaucacgccgggcaccaacaccagcaaccagguggccguccuguaccagggcgugaacugcaccgaggugcccgucgccauccacgccgaccagcugacgcccaccuggcggguguacuccaccgggagcaacguguuccagacccgcgccggcugccucaucggggcggagcacgucaacaacuccuacgagugcgacauccccaucggcgccggcaucugcgccagcuaccagacgcagaccaacuccccgcggcgcgcccggagcguggcgucccagagcgugaucgccuacaccaugucccugggggccgagaacagcgucgccuacuccaacaacagcaucgccauccccaccaacuucacgaucuccgugaccaccgagauccugcccgugagcaugaccaagacgagcgucgacugcaccauguacaucugcggcgacuccaccgagugcagcaaccuccugcugcaguacggguccuucugcacccagcucaaccgcgcgcugacgggcaucgccguggagcaggacaagaacacccaggagguguucgcccaggucaagcagaucuacaagacgcccccgaucaaggacuucgggggcuucaacuucagccagauccugcccgaccccuccaagcccagcaagcgguccuucaucgaggaccuccuguucaacaaggugacccuggccgacgccggcuucaucaagcaguacggggacugccucggcgacaucgcggcccgcgaccugaucugcgcccagaaguucaacgggcugaccgugcucccgccccugcugaccgacgagaugaucgcccaguacaccagcgcccuccuggcgggcaccaucacguccggguggaccuucggcgccggcgccgcccugcagauccccuucgcgaugcagauggccuaccgguucaacgggaucggcgucacccagaacgugcucuacgagaaccagaagcugaucgccaaccaguucaacagcgccaucgggaagauccaggacucccugagcuccaccgccagcgcgcucggcaagcugcaggacguggucaaccagaacgcccaggcccugaacacgcucgugaagcagcuguccagcaacuucggggccaucuccagcgugcugaacgacauccucucccgccuggacaaggucgaggccgaggugcagaucgaccggcugaucaccggccgccuccagagccugcagaccuacgugacccagcagcugauccgggcggccgagauccgcgccagcgccaaccucgccgcgaccaagauguccgagugcguccugggccagagcaagcggguggacuucugcgggaagggcuaccaccugauguccuucccccagagcgccccgcacgggguggucuuccuccacgugacguacguccccgcccaggagaagaacuucaccaccgcccccgcgaucugccacgacggcaaggcccacuucccccgcgaggggguguucguguccaacggcacccacugguucgucacgcagcggaacuucuacgagccgcagaucaucaccaccgacaacaccuucgugagcggcaacugcgacguggucaucgggaucgugaacaacacgguguacgacccccugcagcccgagcuggacuccuucaaggaggagcucgacaaguacuucaagaaccacaccagccccgacgucgaccugggcgacaucuccgggaucaacgccagcguggugaacauccagaaggagaucgaccgccugaacgaggucgccaagaaccucaacgagucccugaucgaccugcaggagcucggcaaguacgagcaguacaucaaguggccgugguacaucuggcugggcuucaucgccgggcugaucgcgaucgugaucgugaccaucaugcucugcugcaugaccagcugcugcuccugccugaagggcugcugcagcugcggguccugcugcaaguucgacgaggacgacagcgagcccguccugaagggcgugaagcuccacuacacgugaugacucgagcugguacugcaugcacgcaaugcuagcugccccuuucccguccuggguaccccgagucucccccgaccucgggucccagguaugcucccaccuccaccugccccacucaccaccucugcuaguuccagacaccucccaagcacgcagcaaugcagcucaaaacgcuuagccuagccacacccccacgggaaacagcagugauuaaccuuuagcaauaaacgaaaguuuaacuaagcuauacuaaccccaggguuggucaauuucgugccagccacacccuggagcuagcaaaaaaaaaaaaaaaaaaaaaaaaaaaaaagcauaugacuaaaaaaaaaaaaaaaaaaaaaaaaaaaaaaaaaaaaaaaaaaaaaaaaaaaaaaaaaaaaaaaaaaaaaa

SEQ ID NO: 26739 - RNA, 4274 nt, Artificial Sequence
  SARS-CoV-2/Wuhan/WIV05/2019__EPI_ISL_402128 spike protein mRNA gc (1-1273)(H69del_V70del_Y144del_N501Y_A570D_D614G_P681H_T716I_S982 A_D1118H)
agaauaaacuaguauucuucugguccccacagacucagagagaacccgccaccauguucguguuccugguccuccugccccuggugagcucccagugcgugaaccucaccacccgcacgcagcugccgcccgccuacaccaacagcuucacccggggcgucuacuaccccgacaagguguuccgcuccagcgugcugcacuccacccaggaccucuuccugcccuucuucagcaacgucacgugguuccacgccaucuccgggaccaacggcaccaagcgguucgacaacccggugcugcccuucaacgacgggguguacuucgcgagcaccgagaaguccaacaucauccgcggcuggaucuucgggacgacccucgacagcaagacccagucccugcugaucgucaacaacgccaccaacguggugaucaaggucugcgaguuccaguucugcaacgaccccuuccucggcguguaccacaagaacaacaagagcuggauggaguccgaguuccggguguacagcuccgccaacaacugcacguucgaguacgucagccagcccuuccugauggaccuggagggcaagcaggggaacuucaagaaccuccgcgaguucguguucaagaacaucgacggcuacuucaagaucuacuccaagcacaccccgaucaaccuggugcgggaccugccccagggguucagcgcccucgagccccuggucgaccugcccaucggcaucaacaucacccgcuuccagacccuccuggcccugcaccgguccuaccucacgccgggggacagcagcuccggcuggaccgcgggcgccgccgccuacuacgugggguaccugcagccccgcaccuuccugcucaaguacaacgagaacggcaccaucacggacgcgguggacugcgcccuggacccccugagcgagaccaagugcacccucaaguccuucaccgucgagaaggggaucuaccagacgagcaacuuccgggugcagcccaccgaguccaucgugcgcuucccgaacaucaccaaccugugccccuucggcgaggucuucaacgccacccgguucgccagcguguacgccuggaaccgcaagcggaucuccaacugcgucgcggacuacagcgugcuguacaacuccgccagcuucuccacguucaagugcuacggcgugagccccaccaagcucaacgaccugugcuucaccaacgucuacgccgacuccuucgugauccgcggggacgaggugcggcagaucgcccccggccagaccgggaagaucgccgacuacaacuacaagcugccggacgacuucacgggcugcgucaucgcguggaacagcaacaaccucgacuccaaggucgggggcaacuacaacuaccuguaccgccuguuccgcaagagcaaccucaagcccuucgagcgggacaucuccaccgagaucuaccaggccggcagcacccccugcaacgggguggagggcuucaacugcuacuucccccugcaguccuacggguuccagccgaccuacggcgugggguaccagcccuaccggguggugguccugagcuucgagcuccugcacgcccccgccacggugugcggccccaagaaguccaccaaccuggugaagaacaagugcgucaacuucaacuucaacggccucaccgggaccggcgugcugaccgagagcaacaagaaguuccugccguuccagcaguucgggcgcgacaucgacgacacgaccgacgccgugcgcgacccccagacccuggagauccucgacaucacccccugcagcuucggcggggucuccgugaucacgccgggcaccaacaccagcaaccagguggcgguccuguaccagggcgugaacugcaccgaggugcccgucgccauccacgccgaccagcugacgcccaccuggcggguguacuccaccgggagcaacguguuccagacccgcgccggcugccucaucggggccgagcacgucaacaacuccuacgagugcgacauccccaucggcgcgggcaucugcgccagcuaccagacgcagaccaacucccaccggcgcgcccggagcguggccucccagagcaucaucgcguacaccaugucccugggggccgagaacagcguggccuacuccaacaacagcaucgccaucccgaucaacuucaccaucuccgucacgaccgagauccugcccgugagcaugaccaagaccagcguggacugcacgauguacaucugcggcgacuccaccgagugcagcaaccuccugcugcaguacggguccuucugcacccagcucaaccgcgcccugaccggcaucgcggucgagcaggacaagaacacgcaggagguguucgcccaggugaagcagaucuacaagaccccgcccaucaaggacuucgggggcuucaacuucagccagauccugcccgaccccuccaagcccagcaagcgguccuucaucgaggaccuccuguucaacaaggucacccuggccgacgccggcuucaucaagcaguacggggacugccucggcgacaucgccgcgcgcgaccugaucugcgcccagaaguucaacgggcugaccgugcugcccccgcuccugacggacgagaugaucgcccaguacaccagcgcccuccuggccggcaccaucaccuccggguggacguucggcgcgggcgccgcccugcagauccccuucgccaugcagauggcguaccgguucaacgggaucggcgugacccagaacguccucuacgagaaccagaagcugaucgccaaccaguucaacagcgccaucgggaagauccaggacucccugagcuccaccgccagcgcccucggcaagcugcaggacguggugaaccagaacgcgcaggcccugaacacccucgucaagcagcuguccagcaacuucggggccaucuccagcgugcugaacgacauccucgcccgccuggacaagguggaggccgagguccagaucgaccggcugaucacgggccgccuccagucccugcagaccuacgugacccagcagcugauccgggcggccgagauccgcgccagcgccaaccucgccgcgaccaagaugagcgagugcgugcugggccaguccaagcgggucgacuucugcgggaagggcuaccaccugaugagcuucccccaguccgcgccccacggggugguguuccuccacgucaccuacgugccggcccaggagaagaacuucacgaccgcccccgccaucugccacgacggcaaggcccacuucccccgcgagggggucuucgugagcaacggcacccacugguucgugacccagcggaacuucuacgagccccagaucaucacgacccacaacaccuucgucuccggcaacugcgacguggugaucgggaucgucaacaacaccguguacgacccgcugcagcccgagcuggacagcuucaaggaggagcucgacaaguacuucaagaaccacacgucccccgacguggaccugggcgacaucagcgggaucaacgccuccgucgugaacauccagaaggagaucgaccgccugaacgagguggccaagaaccucaacgagagccugaucgaccugcaggagcucggcaaguacgagcaguacaucaaguggcccugguacaucuggcugggcuucaucgccgggcugaucgcgaucgucauggugaccaucaugcucugcugcaugaccuccugcugcagcugccugaagggcugcugcuccugcgggagcugcugcaaguucgacgaggacgacuccgagccggugcugaagggcgucaagcuccacuacaccugaugacucgagcugguacugcaugcacgcaaugcuagcugccccuuucccguccuggguaccccgagucucccccgaccucgggucccagguaugcucccaccuccaccugccccacucaccaccucugcuaguuccagacaccucccaagcacgcagcaaugcagcucaaaacgcuuagccuagccacacccccacgggaaacagcagugauuaaccuuuagcaauaaacgaaaguuuaacuaagcuauacuaaccccaggguuggucaauuucgugccagccacacccuggagcuagcaaaaaaaaaaaaaaaaaaaaaaaaaaaaaagcauaugacuaaaaaaaaaaaaaaaaaaaaaaaaaaaaaaaaaaaaaaaaaaaaaaaaaaaaaaaaaaaaaaaaaaaaaa

SEQ ID NO: 26740 - RNA, 4283 nt, Artificial Sequence
  SARS-CoV-2/Wuhan/WIV05/2019__EPI_ISL_402128 spike protein mRNA gc (1-1273)(K417N_E484K_N501Y_D614G)
agaauaaacuaguauucuucugguccccacagacucagagagaacccgccaccauguucguguuccugguccuccugccccuggugagcucccagugcgugaaccucaccacccgcacgcagcugccgcccgccuacaccaacagcuucacccggggcgucuacuaccccgacaagguguuccgcuccagcgugcugcacuccacccaggaccucuuccugcccuucuucagcaacgucacgugguuccacgccauccacguguccgggaccaacggcaccaagcgguucgacaacccggugcugcccuucaacgacggggucuacuucgcgagcaccgagaaguccaacaucauccgcggcuggaucuucgggacgacccucgacagcaagacccagucccugcugaucgugaacaacgccaccaacguggucaucaaggugugcgaguuccaguucugcaacgaccccuuccucggcguguacuaccacaagaacaacaagagcuggauggaguccgaguuccgggucuacagcuccgccaacaacugcacguucgaguacgugagccagcccuuccugauggaccuggagggcaagcaggggaacuucaagaaccuccgcgaguucguguucaagaacaucgacggcuacuucaagaucuacuccaagcacaccccgaucaaccugguccgggaccugccccagggguucagcgcccucgagccccugguggaccugcccaucggcaucaacaucacccgcuuccagacccuccuggcccugcaccgguccuaccucacgccgggggacagcagcuccggcuggaccgcgggcgccgccgccuacuacgugggguaccugcagccccgcaccuuccugcucaaguacaacgagaacggcaccaucacggacgcggucgacugcgcccuggacccccugagcgagaccaagugcacccucaaguccuucaccguggagaaggggaucuaccagacgagcaacuuccgggugcagcccaccgaguccaucguccgcuucccgaacaucaccaaccugugccccuucggcgagguguucaacgccacccgguucgccagcgucuacgccuggaaccgcaagcggaucuccaacugcguggcggacuacagcgugcuguacaacuccgccagcuucuccacguucaagugcuacggcgucagccccaccaagcucaacgaccugugcuucaccaacguguacgccgacuccuucgugauccgcggggacgagguccggcagaucgcccccggccagaccgggaacaucgccgacuacaacuacaagcugccggacgacuucacgggcugcgugaucgcguggaacagcaacaaccucgacuccaaggucgggggcaacuacaacuaccuguaccgccuguuccgcaagagcaaccucaagcccuucgagcgggacaucuccaccgagaucuaccaggccggcagcacccccugcaacggggugaagggcuucaacugcuacuucccccugcaguccuacggguuccagccgaccuacggcgugggguaccagcccuaccggguggucgugcugagcuucgagcuccugcacgcccccgccacggugugcggccccaagaaguccaccaaccuggucaagaacaagugcgugaacuucaacuucaacggccucaccgggaccggcgugcugaccgagagcaacaagaaguuccugccguuccagcaguucgggcgcgacaucgccgacacgaccgacgcgguccgcgacccccagacccuggagauccucgacaucacccccugcagcuucggcgggguguccgugaucacgccgggcaccaacaccagcaaccaggucgccgugcuguaccagggcgugaacugcaccgagguccccguggccauccacgccgaccagcugacgcccaccuggcggguguacuccaccgggagcaacgucuuccagacccgcgccggcugccucaucggggcggagcacgugaacaacuccuacgagugcgacauccccaucggcgccggcaucugcgccagcuaccagacgcagaccaacuccccgcggcgcgcccggagcguggcgucccagagcaucaucgccuacaccaugucccugggggccgagaacagcgucgccuacuccaacaacagcaucgccauccccaccaacuucacgaucuccgugaccaccgagauccugcccgugagcaugaccaagacgagcgucgacugcaccauguacaucugcggcgacuccaccgagugcagcaaccuccugcugcaguacggguccuucugcacccagcucaaccgcgcgcugacgggcaucgccguggagcaggacaagaacacccaggagguguucgcccaggucaagcagaucuacaagacgcccccgaucaaggacuucgggggcuucaacuucagccagauccugcccgaccccuccaagcccagcaagcgguccuucaucgaggaccuccuguucaacaaggugacccuggccgacgccggcuucaucaagcaguacggggacugccucggcgacaucgcggcccgcgaccugaucugcgcccagaaguucaacgggcugaccgugcucccgccccugcugaccgacgagaugaucgcccaguacaccagcgcccuccuggcgggcaccaucacguccggguggaccuucggcgccggcgccgcccugcagauccccuucgcgaugcagauggccuaccgguucaacgggaucggcgucacccagaacgugcucuacgagaaccagaagcugaucgccaaccaguucaacagcgccaucgggaagauccaggacucccugagcuccaccgccagcgcgcucggcaagcugcaggacguggucaaccagaacgcccaggcccugaacacgcucgugaagcagcuguccagcaacuucggggccaucuccagcgugcugaacgacauccucucccgccuggacaaggucgaggccgaggugcagaucgaccggcugaucaccggccgccuccagagccugcagaccuacgugacccagcagcugauccgggcggccgagauccgcgccagcgccaaccucgccgcgaccaagauguccgagugcguccugggccagagcaagcggguggacuucugcgggaagggcuaccaccugauguccuucccccagagcgccccgcacgggguggucuuccuccacgugacguacguccccgcccaggagaagaacuucaccaccgcccccgcgaucugccacgacggcaaggcccacuucccccgcgaggggguguucguguccaacggcacccacugguucgucacgcagcggaacuucuacgagccgcagaucaucaccaccgacaacaccuucgugagcggcaacugcgacguggucaucgggaucgugaacaacacgguguacgacccccugcagcccgagcuggacuccuucaaggaggagcucgacaaguacuucaagaaccacaccagccccgacgucgaccugggcgacaucuccgggaucaacgccagcguggugaacauccagaaggagaucgaccgccugaacgaggucgccaagaaccucaacgagucccugaucgaccugcaggagcucggcaaguacgagcaguacaucaaguggccgugguacaucuggcugggcuucaucgccgggcugaucgcgaucgugauggugaccaucaugcucugcugcaugaccagcugcugcuccugccugaagggcugcugcagcugcggguccugcugcaaguucgacgaggacgacagcgagcccguccugaagggcgugaagcuccacuacacgugaugacucgagcugguacugcaugcacgcaaugcuagcugccccuuucccguccuggguaccccgagucucccccgaccucgggucccagguaugcucccaccuccaccugccccacucaccaccucugcuaguuccagacaccucccaagcacgcagcaaugcagcucaaaacgcuuagccuagccacacccccacgggaaacagcagugauuaaccuuuagcaauaaacgaaaguuuaacuaagcuauacuaaccccaggguuggucaauuucgugccagccacacccuggagcuagcaaaaaaaaaaaaaaaaaaaaaaaaaaaaaagcauaugacuaaaaaaaaaaaaaaaaaaaaaaaaaaaaaaaaaaaaaaaaaaaaaaaaaaaaaaaaaaaaaaaaaaaaaa

SEQ ID NO: 26741 - RNA, 4274 nt, Artificial Sequence
  SARS-CoV-2/Wuhan/WIV05/2019__EPI_ISL_402128 spike protein mRNA gc (1-1273)(L18F_D80A_D215G_L242del_A243del_L244del_R246I_K417N_E484 K_N501Y_D614G_A701V)
agaauaaacuaguauucuucugguccccacagacucagagagaacccgccaccauguucguguuccugguccuccugccccuggugagcucccagugcgugaacuucaccacccgcacgcagcucccgcccgccuacaccaacagcuucacccggggcgucuacuaccccgacaagguguuccgcuccagcgugcugcacuccacccaggaccuguuccuccccuucuucagcaacgucacgugguuccacgccauccacguguccgggaccaacggcaccaagcgguucgcgaacccggugcugcccuucaacgacggggucuacuucgccagcaccgagaaguccaacaucauccgcggcuggaucuucgggacgacccuggacagcaagacccagucccuccugaucgugaacaacgccaccaacguggucaucaaggugugcgaguuccaguucugcaacgaccccuuccugggcguguacuaccacaagaacaacaagagcuggauggaguccgaguuccgggucuacagcuccgccaacaacugcacguucgaguacgugagccagcccuuccucauggaccuggagggcaagcaggggaacuucaagaaccugcgcgaguucguguucaagaacaucgacggcuacuucaagaucuacuccaagcacaccccgaucaaccucguccgggggcugccccagggcuucagcgcccuggagccccucguggaccugcccaucgggaucaacaucacccgcuuccagacccugcacaucuccuaccucacgccgggcgacagcagcuccggcuggaccgcgggggccgccgccuacuacgugggcuaccugcagccccggaccuuccugcucaaguacaacgagaacgggaccaucacggacgcggucgacugcgcccuggacccccugagcgagaccaagugcacccucaaguccuucaccguggagaagggcaucuaccagacgagcaacuuccgcgugcagcccaccgaguccaucguccgguucccgaacaucaccaaccugugccccuucggcgagguguucaacgccacccgcuucgccagcgucuacgccuggaaccggaagcgcaucuccaacugcguggcggacuacagcgugcuguacaacuccgccagcuucuccacguucaagugcuacggggucagccccaccaagcucaacgaccugugcuucaccaacguguacgccgacuccuucgugauccggggcgacgagguccgccagaucgcccccgggcagaccggcaacaucgccgacuacaacuacaagcugccggacgacuucacggggugcgugaucgcguggaacagcaacaaccucgacuccaaggugggcggcaacuacaacuaccuguaccggcuguuccgcaagagcaaccucaagcccuucgagcgggacaucuccaccgagaucuaccaggccgggagcacccccugcaacggcgucaagggguucaacugcuacuucccccugcaguccuacggcuuccagccgaccuacggggugggcuaccagcccuaccgcguggucgugcugagcuucgagcuccugcacgcccccgccacggugugcggccccaagaaguccaccaaccuggucaagaacaagugcgugaacuucaacuucaacgggcucaccggcaccggggugcugaccgagagcaacaagaaguuccugccguuccagcaguucggccgggacaucgccgacacgaccgacgcgguccgcgacccccagacccucgagauccuggacaucacccccugcagcuucgggggcguguccgugaucacgccgggcaccaacaccagcaaccaggucgccgugcuguaccagggggugaacugcaccgagguccccguggccauccacgccgaccagcugacgcccaccuggcgcguguacuccaccggcagcaacgucuuccagacccgggccgggugccucaucggcgcggagcacgugaacaacuccuacgagugcgacauccccaucggcgccgggaucugcgccagcuaccagacgcagaccaacuccccgcgccgggcccgcagcguggcgucccagagcaucaucgccuacaccaugucccugggcgucgagaacagcguggccuacuccaacaacagcaucgccauccccaccaacuucacgaucuccgugaccaccgagauccugcccgucagcaugaccaagacgagcguggacugcaccauguacaucugcggggacuccaccgagugcagcaaccuccugcugcaguacggcuccuucugcacccagcucaaccgggcccugacggggaucgcgguggagcaggacaagaacacccaggaggucuucgcccaggugaagcagaucuacaagacgcccccgaucaaggacuucggcggcuucaacuucagccagauccugcccgaccccuccaagcccagcaagcgcuccuucaucgaggaccuccuguucaacaaggugacccuggccgacgccggguucaucaagcaguacggcgacugccucggggacaucgccgcgcgggaccugaucugcgcccagaaguucaacggccugaccguccucccgccccugcugaccgacgagaugaucgcccaguacaccagcgcccuccuggccgggaccaucacguccggcuggaccuucggcgcgggggccgcccugcagauccccuucgccaugcagauggcguaccgcuucaacggcaucggggugacccagaacgugcucuacgagaaccagaagcugaucgccaaccaguucaacagcgccaucggcaagauccaggacucccugagcuccaccgccagcgcccucgggaagcugcaggacgucgugaaccagaacgcgcaggcccugaacacgcucgugaagcagcuguccagcaacuucggcgccaucuccagcguccugaacgacauccucucccggcuggacaagguggaggccgaggugcagaucgaccgccugaucaccggccggcuccagagccugcagaccuacgucacccagcagcugauccgcgccgcggagauccgggccagcgccaaccucgccgccaccaagauguccgagugcgugcuggggcagagcaagcgcguggacuucugcggcaagggguaccaccugauguccuucccccagagcgcgccgcacggcgucguguuccuccacgucacguacgugcccgcccaggagaagaacuucaccaccgcccccgccaucugccacgacgggaaggcgcacuucccccgggagggcguguucgucuccaacggcacccacugguucgugacgcagcgcaacuucuacgagccgcagaucaucaccaccgacaacaccuucgugagcgggaacugcgacgucgugaucggcaucgugaacaacacggucuacgacccccugcagcccgagcuggacuccuucaaggaggagcucgacaaguacuucaagaaccacaccagccccgacguggaccugggggacaucuccggcaucaacgccagcguggucaacauccagaaggagaucgaccggcugaacgagguggccaagaaccucaacgagucccugaucgaccugcaggagcucggcaaguacgagcaguacaucaaguggccgugguacaucuggcugggguucaucgccggccugaucgccaucgugauggucaccaucaugcucugcugcaugaccagcugcugcuccugccugaaggggugcugcagcugcggcuccugcugcaaguucgacgaggacgacagcgagcccgugcugaagggggugaagcuccacuacacgugaugacucgagcugguacugcaugcacgcaaugcuagcugccccuuucccguccuggguaccccgagucucccccgaccucgggucccagguaugcucccaccuccaccugccccacucaccaccucugcuaguuccagacaccucccaagcacgcagcaaugcagcucaaaacgcuuagccuagccacacccccacgggaaacagcagugauuaaccuuuagcaauaaacgaaaguuuaacuaagcuauacuaaccccaggguuggucaauuucgugccagccacacccuggagcuagcaaaaaaaaaaaaaaaaaaaaaaaaaaaaaagcauaugacuaaaaaaaaaaaaaaaaaaaaaaaaaaaaaaaaaaaaaaaaaaaaaaaaaaaaaaaaaaaaaaaaaaaaaa

SEQ ID NO: 26742 - RNA, 4283 nt, Artificial Sequence
  SARS-CoV-2/Wuhan/WIV05/2019__EPI_ISL_402128 spike protein mRNA gc (1-1273)(E484K_D614G)
agaauaaacuaguauucuucugguccccacagacucagagagaacccgccaccauguucguguuccugguccuccugccccuggugagcucccagugcgugaaccucaccacccgcacgcagcugccgcccgccuacaccaacagcuucacccggggcgucuacuaccccgacaagguguuccgcuccagcgugcugcacuccacccaggaccucuuccugcccuucuucagcaacgucacgugguuccacgccauccacguguccgggaccaacggcaccaagcgguucgacaacccggugcugcccuucaacgacggggucuacuucgcgagcaccgagaaguccaacaucauccgcggcuggaucuucgggacgacccucgacagcaagacccagucccugcugaucgugaacaacgccaccaacguggucaucaaggugugcgaguuccaguucugcaacgaccccuuccucggcguguacuaccacaagaacaacaagagcuggauggaguccgaguuccgggucuacagcuccgccaacaacugcacguucgaguacgugagccagcccuuccugauggaccuggagggcaagcaggggaacuucaagaaccuccgcgaguucguguucaagaacaucgacggcuacuucaagaucuacuccaagcacaccccgaucaaccugguccgggaccugccccagggguucagcgcccucgagccccugguggaccugcccaucggcaucaacaucacccgcuuccagacccuccuggcccugcaccgguccuaccucacgccgggggacagcagcuccggcuggaccgcgggcgccgccgccuacuacgugggguaccugcagccccgcaccuuccugcucaaguacaacgagaacggcaccaucacggacgcggucgacugcgcccuggacccccugagcgagaccaagugcacccucaaguccuucaccguggagaaggggaucuaccagacgagcaacuuccgggugcagcccaccgaguccaucguccgcuucccgaacaucaccaaccugugccccuucggcgagguguucaacgccacccgguucgccagcgucuacgccuggaaccgcaagcggaucuccaacugcguggcggacuacagcgugcuguacaacuccgccagcuucuccacguucaagugcuacggcgucagccccaccaagcucaacgaccugugcuucaccaacguguacgccgacuccuucgugauccgcggggacgagguccggcagaucgcccccggccagaccgggaagaucgccgacuacaacuacaagcugccggacgacuucacgggcugcgugaucgcguggaacagcaacaaccucgacuccaaggucgggggcaacuacaacuaccuguaccgccuguuccgcaagagcaaccucaagcccuucgagcgggacaucuccaccgagaucuaccaggccggcagcacccccugcaacggggugaagggcuucaacugcuacuucccccugcaguccuacggguuccagccgaccaacggcgugggguaccagcccuaccggguggucgugcugagcuucgagcuccugcacgcccccgccacggugugcggccccaagaaguccaccaaccuggucaagaacaagugcgugaacuucaacuucaacggccucaccgggaccggcgugcugaccgagagcaacaagaaguuccugccguuccagcaguucgggcgcgacaucgccgacacgaccgacgcgguccgcgacccccagacccuggagauccucgacaucacccccugcagcuucggcgggguguccgugaucacgccgggcaccaacaccagcaaccaggucgccgugcuguaccagggcgugaacugcaccgagguccccguggccauccacgccgaccagcugacgcccaccuggcggguguacuccaccgggagcaacgucuuccagacccgcgccggcugccucaucggggcggagcacgugaacaacuccuacgagugcgacauccccaucggcgccggcaucugcgccagcuaccagacgcagaccaacuccccgcggcgcgcccggagcguggcgucccagagcaucaucgccuacaccaugucccugggggccgagaacagcgucgccuacuccaacaacagcaucgccauccccaccaacuucacgaucuccgugaccaccgagauccugcccgugagcaugaccaagacgagcgucgacugcaccauguacaucugcggcgacuccaccgagugcagcaaccuccugcugcaguacggguccuucugcacccagcucaaccgcgcgcugacgggcaucgccguggagcaggacaagaacacccaggagguguucgcccaggucaagcagaucuacaagacgcccccgaucaaggacuucgggggcuucaacuucagccagauccugcccgaccccuccaagcccagcaagcgguccuucaucgaggaccuccuguucaacaaggugacccuggccgacgccggcuucaucaagcaguacggggacugccucggcgacaucgcggcccgcgaccugaucugcgcccagaaguucaacgggcugaccgugcucccgccccugcugaccgacgagaugaucgcccaguacaccagcgcccuccuggcgggcaccaucacguccggguggaccuucggcgccggcgccgcccugcagauccccuucgcgaugcagauggccuaccgguucaacgggaucggcgucacccagaacgugcucuacgagaaccagaagcugaucgccaaccaguucaacagcgccaucgggaagauccaggacucccugagcuccaccgccagcgcgcucggcaagcugcaggacguggucaaccagaacgcccaggcccugaacacgcucgugaagcagcuguccagcaacuucggggccaucuccagcgugcugaacgacauccucucccgccuggacaaggucgaggccgaggugcagaucgaccggcugaucaccggccgccuccagagccugcagaccuacgugacccagcagcugauccgggcggccgagauccgcgccagcgccaaccucgccgcgaccaagauguccgagugcguccugggccagagcaagcggguggacuucugcgggaagggcuaccaccugauguccuucccccagagcgccccgcacgggguggucuuccuccacgugacguacguccccgcccaggagaagaacuucaccaccgcccccgcgaucugccacgacggcaaggcccacuucccccgcgaggggguguucguguccaacggcacccacugguucgucacgcagcggaacuucuacgagccgcagaucaucaccaccgacaacaccuucgugagcggcaacugcgacguggucaucgggaucgugaacaacacgguguacgacccccugcagcccgagcuggacuccuucaaggaggagcucgacaaguacuucaagaaccacaccagccccgacgucgaccugggcgacaucuccgggaucaacgccagcguggugaacauccagaaggagaucgaccgccugaacgaggucgccaagaaccucaacgagucccugaucgaccugcaggagcucggcaaguacgagcaguacaucaaguggccgugguacaucuggcugggcuucaucgccgggcugaucgcgaucgugauggugaccaucaugcucugcugcaugaccagcugcugcuccugccugaagggcugcugcagcugcggguccugcugcaaguucgacgaggacgacagcgagcccguccugaagggcgugaagcuccacuacacgugaugacucgagcugguacugcaugcacgcaaugcuagcugccccuuucccguccuggguaccccgagucucccccgaccucgggucccagguaugcucccaccuccaccugccccacucaccaccucugcuaguuccagacaccucccaagcacgcagcaaugcagcucaaaacgcuuagccuagccacacccccacgggaaacagcagugauuaaccuuuagcaauaaacgaaaguuuaacuaagcuauacuaaccccaggguuggucaauuucgugccagccacacccuggagcuagcaaaaaaaaaaaaaaaaaaaaaaaaaaaaaagcauaugacuaaaaaaaaaaaaaaaaaaaaaaaaaaaaaaaaaaaaaaaaaaaaaaaaaaaaaaaaaaaaaaaaaaaaaa

SEQ ID NO: 26743 - RNA, 4283 nt, Artificial Sequence
  SARS-CoV-2/Wuhan/WIV05/2019__EPI_ISL_402128 spike protein mRNA gc (1-1273)(L18F_T20N_P26S_D138Y_R190S_K417T_E484K_N501Y_D614G_H655Y _T1027I)
agaauaaacuaguauucuucugguccccacagacucagagagaacccgccaccauguucguguuccugguccuccugccccuggugagcucccagugcgugaacuucaccaaccgcacccagcucccgagcgccuacacgaacuccuucacccggggcgucuacuaccccgacaagguguuccgcagcuccgugcugcacagcacccaggaccuguuccuccccuucuucuccaacgucaccugguuccacgccauccacgugagcgggacgaacggcaccaagcgguucgacaaccccgugcugccguucaacgacggggucuacuucgcguccaccgagaaguccaacaucauccgcggcuggaucuucgggaccacgcuggacuccaagacccagagccuccugaucgugaacaacgccaccaacguggucaucaaggugugcgaguuccaguucugcaacuaccccuuccugggcguguacuaccacaagaacaacaaguccuggauggagagcgaguuccgggucuacuccagcgccaacaacugcaccuucgaguacgugucccagcccuuccucauggaccuggagggcaagcaggggaacuucaagaaccugagcgaguucguguucaagaacaucgacggcuacuucaagaucuacuccaagcacacgcccaucaaccucguccgcgaccugccgcagggguucagcgcccuggagccccucguggaccugcccaucggcaucaacaucacccgguuccagacccugcucgcccugcaccgcagcuaccugacccccggggacuccagcuccggcuggacggcgggcgccgccgccuacuacgugggguaccuccagccgcggaccuuccugcugaaguacaacgagaacggcaccaucaccgacgcggucgacugcgcccucgacccccugagcgagacgaagugcacccugaaguccuucaccguggagaaggggaucuaccagaccagcaacuuccgcgugcagcccacggaguccaucguccgguuccccaacaucaccaaccucugcccguucggcgagguguucaacgccacccgcuucgccagcgucuacgccuggaaccggaagcgcaucuccaacugcguggcggacuacagcgugcuguacaacuccgccagcuucuccaccuucaagugcuacggcgucagccccacgaagcugaacgaccucugcuucaccaacguguacgccgacuccuucgugauccgcggggacgagguccggcagaucgcccccggccagaccgggaccaucgccgacuacaacuacaagcugcccgacgacuucacgggcugcgugaucgcguggaacagcaacaaccuggacuccaaggucgggggcaacuacaacuaccucuaccggcuguuccgcaagagcaaccugaagccguucgagcgggacaucuccaccgagaucuaccaggccggcagcacccccugcaacggggugaagggcuucaacugcuacuucccccuccagagcuacggguuccagcccaccuacggcgugggguaccagccguaccgcguggucgugcuguccuucgagcugcuccacgcccccgccacggugugcggccccaagaaguccaccaaccuggucaagaacaagugcgugaacuucaacuucaacggccugaccgggaccggcgugcucaccgagagcaacaagaaguuccugcccuuccagcaguucgggcgggacaucgccgacacgaccgacgcgguccgcgacccgcagacccuggagauccuggacaucacccccugcagcuucggcgggguguccgugaucacgcccggcaccaacaccagcaaccaggucgccgugcucuaccagggcgugaacugcaccgaggucccgguggccauccacgccgaccagcugacgcccaccuggcgcguguacuccaccgggagcaacgucuuccagacccgggccggcugccugaucggggcggaguacgugaacaacuccuacgagugcgacauccccaucggcgccggcaucugcgccagcuaccagacgcagaccaacagcccccgccgggcccgcagcguggcgucccagagcaucaucgccuacaccaugucccucggggccgagaacagcgucgccuacuccaacaacagcaucgccaucccgaccaacuucacgaucagcgugaccaccgagauccugcccguguccaugaccaagacgagcgucgacugcaccauguacaucugcggcgacuccaccgagugcagcaaccugcuccugcaguacggguccuucugcacccagcugaaccgggcgcucacgggcaucgccguggagcaggacaagaacacccaggagguguucgcccaggucaagcagaucuacaagaccccgcccaucaaggacuucgggggcuucaacuucagccagauccugcccgaccccuccaagcccagcaagcgcuccuucaucgaggaccuccuguucaacaaggugacccuggccgacgccggcuucaucaagcaguacggggacugccugggcgacaucgcggcccgggaccucaucugcgcccagaaguucaacgggcugacggugcugcccccgcuccugaccgacgagaugaucgcccaguacaccagcgcccugcucgcgggcaccaucacguccggguggaccuucggcgccggcgccgcccugcagauccccuucgcgaugcagauggccuaccgcuucaacgggaucggcgucacccagaacgugcuguacgagaaccagaagcucaucgccaaccaguucaacagcgccaucgggaagauccaggacucccugagcuccaccgccagcgcgcugggcaagcuccaggacguggucaaccagaacgcccaggcccugaacacgcuggugaagcagcucuccagcaacuucggggccaucuccagcgugcugaacgacauccugagccggcucgacaaggucgaggccgaggugcagaucgaccgccugaucaccggccggcugcagucccuccagaccuacgugacccagcagcugauccgcgcggccgagauccgggccagcgccaaccuggccgcgaucaagauguccgagugcguccucggccagagcaagcgcguggacuucugcgggaagggcuaccaccugauguccuucccccagagcgcgccccacgggguggucuuccugcacgugaccuacgucccggcccaggagaagaacuucacgaccgcccccgccaucugccacgacggcaaggcccacuucccccgggaggggguguucguguccaacggcacccacugguucgucacccagcgcaacuucuacgagccccagaucaucacgaccgacaacaccuucgugagcggcaacugcgacguggucaucgggaucgugaacaacaccguguacgacccgcuccagcccgagcuggacuccuucaaggaggagcuggacaaguacuucaagaaccacacgagccccgacgucgaccucggcgacaucuccgggaucaacgccagcguggugaacauccagaaggagaucgaccggcugaacgaggucgccaagaaccugaacgagucccucaucgaccugcaggagcugggcaaguacgagcaguacaucaaguggcccugguacaucuggcucggcuucaucgccgggcugaucgcgaucgugauggugaccaucaugcugugcugcaugaccagcugcugcuccugccucaagggcugcugcagcugcggguccugcugcaaguucgacgaggacgacagcgagccgguccugaagggcgugaagcugcacuacaccugaugacucgagcugguacugcaugcacgcaaugcuagcugccccuuucccguccuggguaccccgagucucccccgaccucgggucccagguaugcucccaccuccaccugccccacucaccaccucugcuaguuccagacaccucccaagcacgcagcaaugcagcucaaaacgcuuagccuagccacacccccacgggaaacagcagugauuaaccuuuagcaauaaacgaaaguuuaacuaagcuauacuaaccccaggguuggucaauuucgugccagccacacccuggagcuagcaaaaaaaaaaaaaaaaaaaaaaaaaaaaaagcauaugacuaaaaaaaaaaaaaaaaaaaaaaaaaaaaaaaaaaaaaaaaaaaaaaaaaaaaaaaaaaaaaaaaaaaaaa

SEQ ID NO: 26744 - RNA, 4283 nt, Artificial Sequence
  SARS-CoV-2/Wuhan/WIV05/2019__EPI_ISL_402128 spike protein mRNA gc (1-1273)(S13I_W152C_L452R_D614G)
agaauaaacuaguauucuucugguccccacagacucagagagaacccgccaccauguucguguuccugguccuccugccccuggugagcauccagugcgugaaccucaccacccgcacgcagcugccgcccgccuacaccaacuccuucacccggggcgucuacuaccccgacaagguguuccgcagcuccgugcugcacagcacccaggaccucuuccugcccuucuucuccaacgucacgugguuccacgccauccacgugagcgggaccaacggcaccaagcgguucgacaacccggugcugcccuucaacgacggggucuacuucgcguccaccgagaaguccaacaucauccgcggcuggaucuucgggacgacccucgacagcaagacccagagccugcugaucgugaacaacgccaccaacguggucaucaaggugugcgaguuccaguucugcaacgaccccuuccucggcguguacuaccacaagaacaacaaguccugcauggagagcgaguuccgggucuacuccagcgccaacaacugcacguucgaguacgugucccagcccuuccugauggaccuggagggcaagcaggggaacuucaagaaccuccgcgaguucguguucaagaacaucgacggcuacuucaagaucuacagcaagcacaccccgaucaaccugguccgggaccugccccagggguucuccgcccucgagccccugguggaccugcccaucggcaucaacaucacccgcuuccagacccuccuggcccugcaccggagcuaccucacgccgggggacuccagcagcggcuggaccgcgggcgccgccgccuacuacgugggguaccugcagccccgcaccuuccugcucaaguacaacgagaacggcaccaucacggacgcggucgacugcgcccuggacccccuguccgagaccaagugcacccucaagagcuucaccguggagaaggggaucuaccagacguccaacuuccgggugcagcccaccgagagcaucguccgcuucccgaacaucaccaaccugugccccuucggcgagguguucaacgccacccgguucgccuccgucuacgccuggaaccgcaagcggaucagcaacugcguggcggacuacuccgugcuguacaacagcgccuccuucagcacguucaagugcuacggcgucucccccaccaagcucaacgaccugugcuucaccaacguguacgccgacagcuucgugauccgcggggacgagguccggcagaucgcccccggccagaccgggaagaucgccgacuacaacuacaagcugccggacgacuucacgggcugcgugaucgcguggaacuccaacaaccucgacagcaaggucgggggcaacuacaacuaccgcuaccggcuguuccgcaaguccaaccugaagcccuucgagcgggacaucagcaccgagaucuaccaggccggcuccacccccugcaacgggguggagggcuucaacugcuacuucccccuccagagcuacggguuccagccgaccaacggcgugggguaccagcccuaccgcguggucgugcuguccuucgagcugcuccacgcccccgccacggugugcggccccaagaaguccaccaaccuggucaagaacaagugcgugaacuucaacuucaacggccugaccgggaccggcgugcucaccgagagcaacaagaaguuccugccguuccagcaguucgggcgcgacaucgccgacacgaccgacgcgguccgggacccccagacccuggagauccuggacaucacccccugcagcuucggcggggugagcgugaucacgccgggcaccaacaccuccaaccaggucgccgugcucuaccagggcgugaacugcaccgagguccccguggccauccacgccgaccagcugacgcccaccuggcgcguguacagcaccggguccaacgucuuccagacccgggccggcugccugaucggggcggagcacgugaacaacagcuacgagugcgacauccccaucggcgccggcaucugcgccuccuaccagacgcagaccaacagcccgcgccgggcccgcuccguggcgagccaguccaucaucgccuacaccaugagccucggggccgagaacuccgucgccuacagcaacaacuccaucgccauccccaccaacuucacgaucagcgugaccaccgagauccugcccguguccaugaccaagacgagcgucgacugcaccauguacaucugcggcgacagcaccgagugcuccaaccugcuccugcaguacgggagcuucugcacccagcugaaccgggcgcucacgggcaucgccguggagcaggacaagaacacccaggagguguucgcccaggucaagcagaucuacaagacgcccccgaucaaggacuucgggggcuucaacuucucccagauccugcccgaccccagcaagcccuccaagcgcagcuucaucgaggaccuccuguucaacaaggugacccuggccgacgccggcuucaucaagcaguacggggacugccugggcgacaucgcggcccgggaccucaucugcgcccagaaguucaacgggcugaccgugcugccgccccuccugaccgacgagaugaucgcccaguacaccuccgcccugcucgcgggcaccaucacgagcggguggaccuucggcgccggcgccgcccugcagauccccuucgcgaugcagauggccuaccgcuucaacgggaucggcgucacccagaacgugcuguacgagaaccagaagcucaucgccaaccaguucaacuccgccaucgggaagauccaggacagccuguccagcaccgccuccgcgcugggcaagcuccaggacguggucaaccagaacgcccaggcccugaacacgcuggugaagcagcucagcuccaacuucggggccaucagcuccgugcugaacgacauccugagccggcucgacaaggucgaggccgaggugcagaucgaccgccugaucaccggccggcugcagucccuccagaccuacgugacccagcagcugauccgcgcggccgagauccgggccagcgccaaccuggccgcgaccaagaugagcgagugcguccucggccaguccaagcgcguggacuucugcgggaagggcuaccaccugaugagcuucccccaguccgccccgcacgggguggucuuccugcacgugacguacguccccgcccaggagaagaacuucaccaccgcccccgcgaucugccacgacggcaaggcccacuucccccgggaggggguguucgugagcaacggcacccacugguucgucacgcagcgcaacuucuacgagccgcagaucaucaccaccgacaacaccuucguguccggcaacugcgacguggucaucgggaucgugaacaacacgguguacgacccccuccagcccgagcuggacagcuucaaggaggagcuggacaaguacuucaagaaccacaccucccccgacgucgaccucggcgacaucagcgggaucaacgccuccguggugaacauccagaaggagaucgaccggcugaacgaggucgccaagaaccugaacgagagccucaucgaccugcaggagcugggcaaguacgagcaguacaucaaguggccgugguacaucuggcucggcuucaucgccgggcugaucgcgaucgugauggugaccaucaugcugugcugcaugaccuccugcugcagcugccucaagggcugcugcuccugcgggagcugcugcaaguucgacgaggacgacuccgagcccguccugaagggcgugaagcugcacuacacgugaugacucgagcugguacugcaugcacgcaaugcuagcugccccuuucccguccuggguaccccgagucucccccgaccucgggucccagguaugcucccaccuccaccugccccacucaccaccucugcuaguuccagacaccucccaagcacgcagcaaugcagcucaaaacgcuuagccuagccacacccccacgggaaacagcagugauuaaccuuuagcaauaaacgaaaguuuaacuaagcuauacuaaccccaggguuggucaauuucgugccagccacacccuggagcuagcaaaaaaaaaaaaaaaaaaaaaaaaaaaaaagcauaugacuaaaaaaaaaaaaaaaaaaaaaaaaaaaaaaaaaaaaaaaaaaaaaaaaaaaaaaaaaaaaaaaaaaaaaa

SEQ ID NO: 26745 - RNA, 4283 nt, Artificial Sequence
  SARS-CoV-2/Wuhan/WIV05/2019__EPI_ISL_402128 spike protein mRNA gc (1-1273)
agaauaaacuaguauucuucugguccccacagacucagagagaacccgccaccauguucguguuccuggugcugcugccccuggugagcagccagugcgugaaccugaccacccggacccagcugccaccagccuacaccaacagcuucacccggggcgucuacuaccccgacaagguguuccggagcagcguccugcacagcacccaggaccuguuccugcccuucuucagcaacgugaccugguuccacgccauccacgugagcggcaccaacggcaccaagcgguucgacaaccccgugcugcccuucaacgacggcguguacuucgccagcaccgagaagagcaacaucauccggggcuggaucuucggcaccacccuggacagcaagacccagagccugcugaucgugaauaacgccaccaacguggugaucaaggugugcgaguuccaguucugcaacgaccccuuccugggcguguacuaccacaagaacaacaagagcuggauggagagcgaguuccggguguacagcagcgccaacaacugcaccuucgaguacgugagccagcccuuccugauggaccuggagggcaagcagggcaacuucaagaaccugcgggaguucguguucaagaacaucgacggcuacuucaagaucuacagcaagcacaccccaaucaaccuggugcgggaucugccccagggcuucucagcccuggagccccugguggaccugcccaucggcaucaacaucacccgguuccagacccugcuggcccugcaccggagcuaccugaccccaggcgacagcagcagcggguggacagcaggcgcggcugcuuacuacgugggcuaccugcagccccggaccuuccugcugaaguacaacgagaacggcaccaucaccgacgccguggacugcgcccuggacccucugagcgagaccaagugcacccugaagagcuucaccguggagaagggcaucuaccagaccagcaacuuccgggugcagcccaccgagagcaucgugcgguuccccaacaucaccaaccugugccccuucggcgagguguucaacgccacccgguucgccagcguguacgccuggaaccggaagcggaucagcaacugcguggccgacuacagcgugcuguacaacagcgccagcuucagcaccuucaagugcuacggcgugagccccaccaagcugaacgaccugugcuucaccaacguguacgccgacagcuucgugauccguggcgacgaggugcggcagaucgcacccggccagacaggcaagaucgccgacuacaacuacaagcugcccgacgacuucaccggcugcgugaucgccuggaacagcaacaaccucgacagcaaggugggcggcaacuacaacuaccuguaccggcuguuccggaagagcaaccugaagcccuucgagcgggacaucagcaccgagaucuaccaagccggcuccaccccuugcaacggcguggagggcuucaacugcuacuucccucugcagagcuacggcuuccagcccaccaacggcgugggcuaccagcccuaccgggugguggugcugagcuucgagcugcugcacgccccagccaccguguguggccccaagaagagcaccaaccuggugaagaacaagugcgugaacuucaacuucaacggccuuaccggcaccggcgugcugaccgagagcaacaagaaauuccugcccuuucagcaguucggccgggacaucgccgacaccaccgacgcugugcgggauccccagacccuggagauccuggacaucaccccuugcagcuucggcggcgugagcgugaucaccccaggcaccaacaccagcaaccagguggccgugcuguaccaggacgugaacugcaccgaggugcccguggccauccacgccgaccagcugacacccaccuggcgggucuacagcaccggcagcaacguguuccagacccgggccgguugccugaucggcgccgagcacgugaacaacagcuacgagugcgacauccccaucggcgccggcaucugugccagcuaccagacccagaccaauucaccccggagggcaaggagcguggccagccagagcaucaucgccuacaccaugagccugggcgccgagaacagcguggccuacagcaacaacagcaucgccauccccaccaacuucaccaucagcgugaccaccgagauucugcccgugagcaugaccaagaccagcguggacugcaccauguacaucugcggcgacagcaccgagugcagcaaccugcugcugcaguacggcagcuucugcacccagcugaaccgggcccugaccggcaucgccguggagcaggacaagaacacccaggagguguucgcccaggugaagcagaucuacaagaccccucccaucaaggacuucggcggcuucaacuucagccagauccugcccgaccccagcaagcccagcaagcggagcuucaucgaggaccugcuguucaacaaggugacccuagccgacgccggcuucaucaagcaguacggcgacugccucggcgacauagccgcccgggaccugaucugcgcccagaaguucaacggccugaccgugcugccuccccugcugaccgacgagaugaucgcccaguacaccagcgcccuguuagccggaaccaucaccagcggcuggacuuucggcgcuggagccgcucugcagauccccuucgccaugcagauggccuaccgguucaacggcaucggcgugacccagaacgugcuguacgagaaccagaagcugaucgccaaccaguucaacagcgccaucggcaagauccaggacagccugagcagcaccgcuagcgcccugggcaagcugcaggacguggugaaccagaacgcccaggcccugaacacccuggugaagcagcugagcagcaacuucggcgccaucagcagcgugcugaacgacauccugagccggcuggacaaggucgaggccgaggugcagaucgaccggcugaucacuggccggcugcagagccugcagaccuacgugacccagcagcugauccgggccgccgagauucgggccagcgccaaccuggccgccaccaagaugagcgagugcgugcugggccagagcaagcggguggacuucugcggcaagggcuaccaccugaugagcuuuccccagagcgcaccccacggagugguguuccugcacgugaccuacgugcccgcccaggagaagaacuucaccaccgccccagccaucugccacgacggcaaggcccacuuuccccgggagggcguguucgugagcaacggcacccacugguucgugacccagcggaacuucuacgagccccagaucaucaccaccgacaacaccuucgugagcggcaacugcgacguggugaucggcaucgugaacaacaccguguacgauccccugcagcccgagcuggacagcuucaaggaggagcuggacaaguacuucaagaaucacaccagccccgacguggaccugggcgacaucagcggcaucaacgccagcguggugaacauccagaaggagaucgaucggcugaacgagguggccaagaaccugaacgagagccugaucgaccugcaggagcugggcaaguacgagcaguacaucaaguggcccugguacaucuggcugggcuucaucgccggccugaucgccaucgugauggugaccaucaugcugugcugcaugaccagcugcugcagcugccugaagggcuguugcagcugcggcagcugcugcaaguucgacgaggacgacagcgagcccgugcugaagggcgugaagcugcacuacaccugaugacucgagcugguacugcaugcacgcaaugcuagcugccccuuucccguccuggguaccccgagucucccccgaccucgggucccagguaugcucccaccuccaccugccccacucaccaccucugcuaguuccagacaccucccaagcacgcagcaaugcagcucaaaacgcuuagccuagccacacccccacgggaaacagcagugauuaaccuuuagcaauaaacgaaaguuuaacuaagcuauacuaaccccaggguuggucaauuucgugccagccacacccuggagcuagcaaaaaaaaaaaaaaaaaaaaaaaaaaaaaagcauaugacuaaaaaaaaaaaaaaaaaaaaaaaaaaaaaaaaaaaaaaaaaaaaaaaaaaaaaaaaaaaaaaaaaaaaaa

SEQ ID NO: 26746 - RNA, 4283 nt, Artificial Sequence
  SARS-CoV-2/Wuhan/WIV05/2019__EPI_ISL_402128 spike protein mRNA gc (1-1273)(D614G)
agaauaaacuaguauucuucugguccccacagacucagagagaacccgccaccauguucguguuccuggugcugcugccccuggugagcagccagugcgugaaccugaccacccggacccagcugccaccagccuacaccaacagcuucacccggggcgucuacuaccccgacaagguguuccggagcagcguccugcacagcacccaggaccuguuccugcccuucuucagcaacgugaccugguuccacgccauccacgugagcggcaccaacggcaccaagcgguucgacaaccccgugcugcccuucaacgacggcguguacuucgccagcaccgagaagagcaacaucauccggggcuggaucuucggcaccacccuggacagcaagacccagagccugcugaucgugaauaacgccaccaacguggugaucaaggugugcgaguuccaguucugcaacgaccccuuccugggcguguacuaccacaagaacaacaagagcuggauggagagcgaguuccggguguacagcagcgccaacaacugcaccuucgaguacgugagccagcccuuccugauggaccuggagggcaagcagggcaacuucaagaaccugcgggaguucguguucaagaacaucgacggcuacuucaagaucuacagcaagcacaccccaaucaaccuggugcgggaucugccccagggcuucucagcccuggagccccugguggaccugcccaucggcaucaacaucacccgguuccagacccugcuggcccugcaccggagcuaccugaccccaggcgacagcagcagcggguggacagcaggcgcggcugcuuacuacgugggcuaccugcagccccggaccuuccugcugaaguacaacgagaacggcaccaucaccgacgccguggacugcgcccuggacccucugagcgagaccaagugcacccugaagagcuucaccguggagaagggcaucuaccagaccagcaacuuccgggugcagcccaccgagagcaucgugcgguuccccaacaucaccaaccugugccccuucggcgagguguucaacgccacccgguucgccagcguguacgccuggaaccggaagcggaucagcaacugcguggccgacuacagcgugcuguacaacagcgccagcuucagcaccuucaagugcuacggcgugagccccaccaagcugaacgaccugugcuucaccaacguguacgccgacagcuucgugauccguggcgacgaggugcggcagaucgcacccggccagacaggcaagaucgccgacuacaacuacaagcugcccgacgacuucaccggcugcgugaucgccuggaacagcaacaaccucgacagcaaggugggcggcaacuacaacuaccuguaccggcuguuccggaagagcaaccugaagcccuucgagcgggacaucagcaccgagaucuaccaagccggcuccaccccuugcaacggcguggagggcuucaacugcuacuucccucugcagagcuacggcuuccagcccaccaacggcgugggcuaccagcccuaccgggugguggugcugagcuucgagcugcugcacgccccagccaccguguguggccccaagaagagcaccaaccuggugaagaacaagugcgugaacuucaacuucaacggccuuaccggcaccggcgugcugaccgagagcaacaagaaauuccugcccuuucagcaguucggccgggacaucgccgacaccaccgacgcugugcgggauccccagacccuggagauccuggacaucaccccuugcagcuucggcggcgugagcgugaucaccccaggcaccaacaccagcaaccagguggccgugcuguaccagggcgugaacugcaccgaggugcccguggccauccacgccgaccagcugacacccaccuggcgggucuacagcaccggcagcaacguguuccagacccgggccgguugccugaucggcgccgagcacgugaacaacagcuacgagugcgacauccccaucggcgccggcaucugugccagcuaccagacccagaccaauucaccccggagggcaaggagcguggccagccagagcaucaucgccuacaccaugagccugggcgccgagaacagcguggccuacagcaacaacagcaucgccauccccaccaacuucaccaucagcgugaccaccgagauucugcccgugagcaugaccaagaccagcguggacugcaccauguacaucugcggcgacagcaccgagugcagcaaccugcugcugcaguacggcagcuucugcacccagcugaaccgggcccugaccggcaucgccguggagcaggacaagaacacccaggagguguucgcccaggugaagcagaucuacaagaccccucccaucaaggacuucggcggcuucaacuucagccagauccugcccgaccccagcaagcccagcaagcggagcuucaucgaggaccugcuguucaacaaggugacccuagccgacgccggcuucaucaagcaguacggcgacugccucggcgacauagccgcccgggaccugaucugcgcccagaaguucaacggccugaccgugcugccuccccugcugaccgacgagaugaucgcccaguacaccagcgcccuguuagccggaaccaucaccagcggcuggacuuucggcgcuggagccgcucugcagauccccuucgccaugcagauggccuaccgguucaacggcaucggcgugacccagaacgugcuguacgagaaccagaagcugaucgccaaccaguucaacagcgccaucggcaagauccaggacagccugagcagcaccgcuagcgcccugggcaagcugcaggacguggugaaccagaacgcccaggcccugaacacccuggugaagcagcugagcagcaacuucggcgccaucagcagcgugcugaacgacauccugagccggcuggacaaggucgaggccgaggugcagaucgaccggcugaucacuggccggcugcagagccugcagaccuacgugacccagcagcugauccgggccgccgagauucgggccagcgccaaccuggccgccaccaagaugagcgagugcgugcugggccagagcaagcggguggacuucugcggcaagggcuaccaccugaugagcuuuccccagagcgcaccccacggagugguguuccugcacgugaccuacgugcccgcccaggagaagaacuucaccaccgccccagccaucugccacgacggcaaggcccacuuuccccgggagggcguguucgugagcaacggcacccacugguucgugacccagcggaacuucuacgagccccagaucaucaccaccgacaacaccuucgugagcggcaacugcgacguggugaucggcaucgugaacaacaccguguacgauccccugcagcccgagcuggacagcuucaaggaggagcuggacaaguacuucaagaaucacaccagccccgacguggaccugggcgacaucagcggcaucaacgccagcguggugaacauccagaaggagaucgaucggcugaacgagguggccaagaaccugaacgagagccugaucgaccugcaggagcugggcaaguacgagcaguacaucaaguggcccugguacaucuggcugggcuucaucgccggccugaucgccaucgugauggugaccaucaugcugugcugcaugaccagcugcugcagcugccugaagggcuguugcagcugcggcagcugcugcaaguucgacgaggacgacagcgagcccgugcugaagggcgugaagcugcacuacaccugaugacucgagcugguacugcaugcacgcaaugcuagcugccccuuucccguccuggguaccccgagucucccccgaccucgggucccagguaugcucccaccuccaccugccccacucaccaccucugcuaguuccagacaccucccaagcacgcagcaaugcagcucaaaacgcuuagccuagccacacccccacgggaaacagcagugauuaaccuuuagcaauaaacgaaaguuuaacuaagcuauacuaaccccaggguuggucaauuucgugccagccacacccuggagcuagcaaaaaaaaaaaaaaaaaaaaaaaaaaaaaagcauaugacuaaaaaaaaaaaaaaaaaaaaaaaaaaaaaaaaaaaaaaaaaaaaaaaaaaaaaaaaaaaaaaaaaaaaaa

SEQ ID NO: 26747 - RNA, 4283 nt, Artificial Sequence
  SARS-CoV-2/Wuhan/WIV05/2019__EPI_ISL_402128 spike protein mRNA gc (1-1273)(A222V_D614G)
agaauaaacuaguauucuucugguccccacagacucagagagaacccgccaccauguucguguuccuggugcugcugccccuggugagcagccagugcgugaaccugaccacccggacccagcugccaccagccuacaccaacagcuucacccggggcgucuacuaccccgacaagguguuccggagcagcguccugcacagcacccaggaccuguuccugcccuucuucagcaacgugaccugguuccacgccauccacgugagcggcaccaacggcaccaagcgguucgacaaccccgugcugcccuucaacgacggcguguacuucgccagcaccgagaagagcaacaucauccggggcuggaucuucggcaccacccuggacagcaagacccagagccugcugaucgugaauaacgccaccaacguggugaucaaggugugcgaguuccaguucugcaacgaccccuuccugggcguguacuaccacaagaacaacaagagcuggauggagagcgaguuccggguguacagcagcgccaacaacugcaccuucgaguacgugagccagcccuuccugauggaccuggagggcaagcagggcaacuucaagaaccugcgggaguucguguucaagaacaucgacggcuacuucaagaucuacagcaagcacaccccaaucaaccuggugcgggaucugccccagggcuucucagugcuggagccccugguggaccugcccaucggcaucaacaucacccgguuccagacccugcuggcccugcaccggagcuaccugaccccaggcgacagcagcagcggguggacagcaggcgcggcugcuuacuacgugggcuaccugcagccccggaccuuccugcugaaguacaacgagaacggcaccaucaccgacgccguggacugcgcccuggacccucugagcgagaccaagugcacccugaagagcuucaccguggagaagggcaucuaccagaccagcaacuuccgggugcagcccaccgagagcaucgugcgguuccccaacaucaccaaccugugccccuucggcgagguguucaacgccacccgguucgccagcguguacgccuggaaccggaagcggaucagcaacugcguggccgacuacagcgugcuguacaacagcgccagcuucagcaccuucaagugcuacggcgugagccccaccaagcugaacgaccugugcuucaccaacguguacgccgacagcuucgugauccguggcgacgaggugcggcagaucgcacccggccagacaggcaagaucgccgacuacaacuacaagcugcccgacgacuucaccggcugcgugaucgccuggaacagcaacaaccucgacagcaaggugggcggcaacuacaacuaccuguaccggcuguuccggaagagcaaccugaagcccuucgagcgggacaucagcaccgagaucuaccaagccggcuccaccccuugcaacggcguggagggcuucaacugcuacuucccucugcagagcuacggcuuccagcccaccaacggcgugggcuaccagcccuaccgggugguggugcugagcuucgagcugcugcacgccccagccaccguguguggccccaagaagagcaccaaccuggugaagaacaagugcgugaacuucaacuucaacggccuuaccggcaccggcgugcugaccgagagcaacaagaaauuccugcccuuucagcaguucggccgggacaucgccgacaccaccgacgcugugcgggauccccagacccuggagauccuggacaucaccccuugcagcuucggcggcgugagcgugaucaccccaggcaccaacaccagcaaccagguggccgugcuguaccagggcgugaacugcaccgaggugcccguggccauccacgccgaccagcugacacccaccuggcgggucuacagcaccggcagcaacguguuccagacccgggccgguugccugaucggcgccgagcacgugaacaacagcuacgagugcgacauccccaucggcgccggcaucugugccagcuaccagacccagaccaauucaccccggagggcaaggagcguggccagccagagcaucaucgccuacaccaugagccugggcgccgagaacagcguggccuacagcaacaacagcaucgccauccccaccaacuucaccaucagcgugaccaccgagauucugcccgugagcaugaccaagaccagcguggacugcaccauguacaucugcggcgacagcaccgagugcagcaaccugcugcugcaguacggcagcuucugcacccagcugaaccgggcccugaccggcaucgccguggagcaggacaagaacacccaggagguguucgcccaggugaagcagaucuacaagaccccucccaucaaggacuucggcggcuucaacuucagccagauccugcccgaccccagcaagcccagcaagcggagcuucaucgaggaccugcuguucaacaaggugacccuagccgacgccggcuucaucaagcaguacggcgacugccucggcgacauagccgcccgggaccugaucugcgcccagaaguucaacggccugaccgugcugccuccccugcugaccgacgagaugaucgcccaguacaccagcgcccuguuagccggaaccaucaccagcggcuggacuuucggcgcuggagccgcucugcagauccccuucgccaugcagauggccuaccgguucaacggcaucggcgugacccagaacgugcuguacgagaaccagaagcugaucgccaaccaguucaacagcgccaucggcaagauccaggacagccugagcagcaccgcuagcgcccugggcaagcugcaggacguggugaaccagaacgcccaggcccugaacacccuggugaagcagcugagcagcaacuucggcgccaucagcagcgugcugaacgacauccugagccggcuggacaaggucgaggccgaggugcagaucgaccggcugaucacuggccggcugcagagccugcagaccuacgugacccagcagcugauccgggccgccgagauucgggccagcgccaaccuggccgccaccaagaugagcgagugcgugcugggccagagcaagcggguggacuucugcggcaagggcuaccaccugaugagcuuuccccagagcgcaccccacggagugguguuccugcacgugaccuacgugcccgcccaggagaagaacuucaccaccgccccagccaucugccacgacggcaaggcccacuuuccccgggagggcguguucgugagcaacggcacccacugguucgugacccagcggaacuucuacgagccccagaucaucaccaccgacaacaccuucgugagcggcaacugcgacguggugaucggcaucgugaacaacaccguguacgauccccugcagcccgagcuggacagcuucaaggaggagcuggacaaguacuucaagaaucacaccagccccgacguggaccugggcgacaucagcggcaucaacgccagcguggugaacauccagaaggagaucgaucggcugaacgagguggccaagaaccugaacgagagccugaucgaccugcaggagcugggcaaguacgagcaguacaucaaguggcccugguacaucuggcugggcuucaucgccggccugaucgccaucgugauggugaccaucaugcugugcugcaugaccagcugcugcagcugccugaagggcuguugcagcugcggcagcugcugcaaguucgacgaggacgacagcgagcccgugcugaagggcgugaagcugcacuacaccugaugacucgagcugguacugcaugcacgcaaugcuagcugccccuuucccguccuggguaccccgagucucccccgaccucgggucccagguaugcucccaccuccaccugccccacucaccaccucugcuaguuccagacaccucccaagcacgcagcaaugcagcucaaaacgcuuagccuagccacacccccacgggaaacagcagugauuaaccuuuagcaauaaacgaaaguuuaacuaagcuauacuaaccccaggguuggucaauuucgugccagccacacccuggagcuagcaaaaaaaaaaaaaaaaaaaaaaaaaaaaaagcauaugacuaaaaaaaaaaaaaaaaaaaaaaaaaaaaaaaaaaaaaaaaaaaaaaaaaaaaaaaaaaaaaaaaaaaaaa

SEQ ID NO: 26748 - RNA, 4283 nt, Artificial Sequence
  SARS-CoV-2/Wuhan/WIV05/2019__EPI_ISL_402128 spike protein mRNA gc (1-1273)(N439K_D614G)
agaauaaacuaguauucuucugguccccacagacucagagagaacccgccaccauguucguguuccuggugcugcugccccuggugagcagccagugcgugaaccugaccacccggacccagcugccaccagccuacaccaacagcuucacccggggcgucuacuaccccgacaagguguuccggagcagcguccugcacagcacccaggaccuguuccugcccuucuucagcaacgugaccugguuccacgccauccacgugagcggcaccaacggcaccaagcgguucgacaaccccgugcugcccuucaacgacggcguguacuucgccagcaccgagaagagcaacaucauccggggcuggaucuucggcaccacccuggacagcaagacccagagccugcugaucgugaauaacgccaccaacguggugaucaaggugugcgaguuccaguucugcaacgaccccuuccugggcguguacuaccacaagaacaacaagagcuggauggagagcgaguuccggguguacagcagcgccaacaacugcaccuucgaguacgugagccagcccuuccugauggaccuggagggcaagcagggcaacuucaagaaccugcgggaguucguguucaagaacaucgacggcuacuucaagaucuacagcaagcacaccccaaucaaccuggugcgggaucugccccagggcuucucagcccuggagccccugguggaccugcccaucggcaucaacaucacccgguuccagacccugcuggcccugcaccggagcuaccugaccccaggcgacagcagcagcggguggacagcaggcgcggcugcuuacuacgugggcuaccugcagccccggaccuuccugcugaaguacaacgagaacggcaccaucaccgacgccguggacugcgcccuggacccucugagcgagaccaagugcacccugaagagcuucaccguggagaagggcaucuaccagaccagcaacuuccgggugcagcccaccgagagcaucgugcgguuccccaacaucaccaaccugugccccuucggcgagguguucaacgccacccgguucgccagcguguacgccuggaaccggaagcggaucagcaacugcguggccgacuacagcgugcuguacaacagcgccagcuucagcaccuucaagugcuacggcgugagccccaccaagcugaacgaccugugcuucaccaacguguacgccgacagcuucgugauccguggcgacgaggugcggcagaucgcacccggccagacaggcaagaucgccgacuacaacuacaagcugcccgacgacuucaccggcugcgugaucgccuggaacagcaagaaccucgacagcaaggugggcggcaacuacaacuaccuguaccggcuguuccggaagagcaaccugaagcccuucgagcgggacaucagcaccgagaucuaccaagccggcuccaccccuugcaacggcguggagggcuucaacugcuacuucccucugcagagcuacggcuuccagcccaccaacggcgugggcuaccagcccuaccgggugguggugcugagcuucgagcugcugcacgccccagccaccguguguggccccaagaagagcaccaaccuggugaagaacaagugcgugaacuucaacuucaacggccuuaccggcaccggcgugcugaccgagagcaacaagaaauuccugcccuuucagcaguucggccgggacaucgccgacaccaccgacgcugugcgggauccccagacccuggagauccuggacaucaccccuugcagcuucggcggcgugagcgugaucaccccaggcaccaacaccagcaaccagguggccgugcuguaccagggcgugaacugcaccgaggugcccguggccauccacgccgaccagcugacacccaccuggcgggucuacagcaccggcagcaacguguuccagacccgggccgguugccugaucggcgccgagcacgugaacaacagcuacgagugcgacauccccaucggcgccggcaucugugccagcuaccagacccagaccaauucaccccggagggcaaggagcguggccagccagagcaucaucgccuacaccaugagccugggcgccgagaacagcguggccuacagcaacaacagcaucgccauccccaccaacuucaccaucagcgugaccaccgagauucugcccgugagcaugaccaagaccagcguggacugcaccauguacaucugcggcgacagcaccgagugcagcaaccugcugcugcaguacggcagcuucugcacccagcugaaccgggcccugaccggcaucgccguggagcaggacaagaacacccaggagguguucgcccaggugaagcagaucuacaagaccccucccaucaaggacuucggcggcuucaacuucagccagauccugcccgaccccagcaagcccagcaagcggagcuucaucgaggaccugcuguucaacaaggugacccuagccgacgccggcuucaucaagcaguacggcgacugccucggcgacauagccgcccgggaccugaucugcgcccagaaguucaacggccugaccgugcugccuccccugcugaccgacgagaugaucgcccaguacaccagcgcccuguuagccggaaccaucaccagcggcuggacuuucggcgcuggagccgcucugcagauccccuucgccaugcagauggccuaccgguucaacggcaucggcgugacccagaacgugcuguacgagaaccagaagcugaucgccaaccaguucaacagcgccaucggcaagauccaggacagccugagcagcaccgcuagcgcccugggcaagcugcaggacguggugaaccagaacgcccaggcccugaacacccuggugaagcagcugagcagcaacuucggcgccaucagcagcgugcugaacgacauccugagccggcuggacaaggucgaggccgaggugcagaucgaccggcugaucacuggccggcugcagagccugcagaccuacgugacccagcagcugauccgggccgccgagauucgggccagcgccaaccuggccgccaccaagaugagcgagugcgugcugggccagagcaagcggguggacuucugcggcaagggcuaccaccugaugagcuuuccccagagcgcaccccacggagugguguuccugcacgugaccuacgugcccgcccaggagaagaacuucaccaccgccccagccaucugccacgacggcaaggcccacuuuccccgggagggcguguucgugagcaacggcacccacugguucgugacccagcggaacuucuacgagccccagaucaucaccaccgacaacaccuucgugagcggcaacugcgacguggugaucggcaucgugaacaacaccguguacgauccccugcagcccgagcuggacagcuucaaggaggagcuggacaaguacuucaagaaucacaccagccccgacguggaccugggcgacaucagcggcaucaacgccagcguggugaacauccagaaggagaucgaucggcugaacgagguggccaagaaccugaacgagagccugaucgaccugcaggagcugggcaaguacgagcaguacaucaaguggcccugguacaucuggcugggcuucaucgccggccugaucgccaucgugauggugaccaucaugcugugcugcaugaccagcugcugcagcugccugaagggcuguugcagcugcggcagcugcugcaaguucgacgaggacgacagcgagcccgugcugaagggcgugaagcugcacuacaccugaugacucgagcugguacugcaugcacgcaaugcuagcugccccuuucccguccuggguaccccgagucucccccgaccucgggucccagguaugcucccaccuccaccugccccacucaccaccucugcuaguuccagacaccucccaagcacgcagcaaugcagcucaaaacgcuuagccuagccacacccccacgggaaacagcagugauuaaccuuuagcaauaaacgaaaguuuaacuaagcuauacuaaccccaggguuggucaauuucgugccagccacacccuggagcuagcaaaaaaaaaaaaaaaaaaaaaaaaaaaaaagcauaugacuaaaaaaaaaaaaaaaaaaaaaaaaaaaaaaaaaaaaaaaaaaaaaaaaaaaaaaaaaaaaaaaaaaaaaa

SEQ ID NO: 26749 - RNA, 4283 nt, Artificial Sequence
  SARS-CoV-2/Wuhan/WIV05/2019__EPI_ISL_402128 spike protein mRNA gc (1-1273)(S477N_D614G)
agaauaaacuaguauucuucugguccccacagacucagagagaacccgccaccauguucguguuccuggugcugcugccccuggugagcagccagugcgugaaccugaccacccggacccagcugccaccagccuacaccaacagcuucacccggggcgucuacuaccccgacaagguguuccggagcagcguccugcacagcacccaggaccuguuccugcccuucuucagcaacgugaccugguuccacgccauccacgugagcggcaccaacggcaccaagcgguucgacaaccccgugcugcccuucaacgacggcguguacuucgccagcaccgagaagagcaacaucauccggggcuggaucuucggcaccacccuggacagcaagacccagagccugcugaucgugaauaacgccaccaacguggugaucaaggugugcgaguuccaguucugcaacgaccccuuccugggcguguacuaccacaagaacaacaagagcuggauggagagcgaguuccggguguacagcagcgccaacaacugcaccuucgaguacgugagccagcccuuccugauggaccuggagggcaagcagggcaacuucaagaaccugcgggaguucguguucaagaacaucgacggcuacuucaagaucuacagcaagcacaccccaaucaaccuggugcgggaucugccccagggcuucucagcccuggagccccugguggaccugcccaucggcaucaacaucacccgguuccagacccugcuggcccugcaccggagcuaccugaccccaggcgacagcagcagcggguggacagcaggcgcggcugcuuacuacgugggcuaccugcagccccggaccuuccugcugaaguacaacgagaacggcaccaucaccgacgccguggacugcgcccuggacccucugagcgagaccaagugcacccugaagagcuucaccguggagaagggcaucuaccagaccagcaacuuccgggugcagcccaccgagagcaucgugcgguuccccaacaucaccaaccugugccccuucggcgagguguucaacgccacccgguucgccagcguguacgccuggaaccggaagcggaucagcaacugcguggccgacuacagcgugcuguacaacagcgccagcuucagcaccuucaagugcuacggcgugagccccaccaagcugaacgaccugugcuucaccaacguguacgccgacagcuucgugauccguggcgacgaggugcggcagaucgcacccggccagacaggcaagaucgccgacuacaacuacaagcugcccgacgacuucaccggcugcgugaucgccuggaacagcaacaaccucgacagcaaggugggcggcaacuacaacuaccuguaccggcuguuccggaagagcaaccugaagcccuucgagcgggacaucagcaccgagaucuaccaagccggcaacaccccuugcaacggcguggagggcuucaacugcuacuucccucugcagagcuacggcuuccagcccaccaacggcgugggcuaccagcccuaccgggugguggugcugagcuucgagcugcugcacgccccagccaccguguguggccccaagaagagcaccaaccuggugaagaacaagugcgugaacuucaacuucaacggccuuaccggcaccggcgugcugaccgagagcaacaagaaauuccugcccuuucagcaguucggccgggacaucgccgacaccaccgacgcugugcgggauccccagacccuggagauccuggacaucaccccuugcagcuucggcggcgugagcgugaucaccccaggcaccaacaccagcaaccagguggccgugcuguaccagggcgugaacugcaccgaggugcccguggccauccacgccgaccagcugacacccaccuggcgggucuacagcaccggcagcaacguguuccagacccgggccgguugccugaucggcgccgagcacgugaacaacagcuacgagugcgacauccccaucggcgccggcaucugugccagcuaccagacccagaccaauucaccccggagggcaaggagcguggccagccagagcaucaucgccuacaccaugagccugggcgccgagaacagcguggccuacagcaacaacagcaucgccauccccaccaacuucaccaucagcgugaccaccgagauucugcccgugagcaugaccaagaccagcguggacugcaccauguacaucugcggcgacagcaccgagugcagcaaccugcugcugcaguacggcagcuucugcacccagcugaaccgggcccugaccggcaucgccguggagcaggacaagaacacccaggagguguucgcccaggugaagcagaucuacaagaccccucccaucaaggacuucggcggcuucaacuucagccagauccugcccgaccccagcaagcccagcaagcggagcuucaucgaggaccugcuguucaacaaggugacccuagccgacgccggcuucaucaagcaguacggcgacugccucggcgacauagccgcccgggaccugaucugcgcccagaaguucaacggccugaccgugcugccuccccugcugaccgacgagaugaucgcccaguacaccagcgcccuguuagccggaaccaucaccagcggcuggacuuucggcgcuggagccgcucugcagauccccuucgccaugcagauggccuaccgguucaacggcaucggcgugacccagaacgugcuguacgagaaccagaagcugaucgccaaccaguucaacagcgccaucggcaagauccaggacagccugagcagcaccgcuagcgcccugggcaagcugcaggacguggugaaccagaacgcccaggcccugaacacccuggugaagcagcugagcagcaacuucggcgccaucagcagcgugcugaacgacauccugagccggcuggacaaggucgaggccgaggugcagaucgaccggcugaucacuggccggcugcagagccugcagaccuacgugacccagcagcugauccgggccgccgagauucgggccagcgccaaccuggccgccaccaagaugagcgagugcgugcugggccagagcaagcggguggacuucugcggcaagggcuaccaccugaugagcuuuccccagagcgcaccccacggagugguguuccugcacgugaccuacgugcccgcccaggagaagaacuucaccaccgccccagccaucugccacgacggcaaggcccacuuuccccgggagggcguguucgugagcaacggcacccacugguucgugacccagcggaacuucuacgagccccagaucaucaccaccgacaacaccuucgugagcggcaacugcgacguggugaucggcaucgugaacaacaccguguacgauccccugcagcccgagcuggacagcuucaaggaggagcuggacaaguacuucaagaaucacaccagccccgacguggaccugggcgacaucagcggcaucaacgccagcguggugaacauccagaaggagaucgaucggcugaacgagguggccaagaaccugaacgagagccugaucgaccugcaggagcugggcaaguacgagcaguacaucaaguggcccugguacaucuggcugggcuucaucgccggccugaucgccaucgugauggugaccaucaugcugugcugcaugaccagcugcugcagcugccugaagggcuguugcagcugcggcagcugcugcaaguucgacgaggacgacagcgagcccgugcugaagggcgugaagcugcacuacaccugaugacucgagcugguacugcaugcacgcaaugcuagcugccccuuucccguccuggguaccccgagucucccccgaccucgggucccagguaugcucccaccuccaccugccccacucaccaccucugcuaguuccagacaccucccaagcacgcagcaaugcagcucaaaacgcuuagccuagccacacccccacgggaaacagcagugauuaaccuuuagcaauaaacgaaaguuuaacuaagcuauacuaaccccaggguuggucaauuucgugccagccacacccuggagcuagcaaaaaaaaaaaaaaaaaaaaaaaaaaaaaagcauaugacuaaaaaaaaaaaaaaaaaaaaaaaaaaaaaaaaaaaaaaaaaaaaaaaaaaaaaaaaaaaaaaaaaaaaaa

SEQ ID NO: 26750 - RNA, 4283 nt, Artificial Sequence
  SARS-CoV-2/Wuhan/WIV05/2019__EPI_ISL_402128 spike protein mRNA gc (1-1273)(N501Y_D614G)
agaauaaacuaguauucuucugguccccacagacucagagagaacccgccaccauguucguguuccuggugcugcugccccuggugagcagccagugcgugaaccugaccacccggacccagcugccaccagccuacaccaacagcuucacccggggcgucuacuaccccgacaagguguuccggagcagcguccugcacagcacccaggaccuguuccugcccuucuucagcaacgugaccugguuccacgccauccacgugagcggcaccaacggcaccaagcgguucgacaaccccgugcugcccuucaacgacggcguguacuucgccagcaccgagaagagcaacaucauccggggcuggaucuucggcaccacccuggacagcaagacccagagccugcugaucgugaauaacgccaccaacguggugaucaaggugugcgaguuccaguucugcaacgaccccuuccugggcguguacuaccacaagaacaacaagagcuggauggagagcgaguuccggguguacagcagcgccaacaacugcaccuucgaguacgugagccagcccuuccugauggaccuggagggcaagcagggcaacuucaagaaccugcgggaguucguguucaagaacaucgacggcuacuucaagaucuacagcaagcacaccccaaucaaccuggugcgggaucugccccagggcuucucagcccuggagccccugguggaccugcccaucggcaucaacaucacccgguuccagacccugcuggcccugcaccggagcuaccugaccccaggcgacagcagcagcggguggacagcaggcgcggcugcuuacuacgugggcuaccugcagccccggaccuuccugcugaaguacaacgagaacggcaccaucaccgacgccguggacugcgcccuggacccucugagcgagaccaagugcacccugaagagcuucaccguggagaagggcaucuaccagaccagcaacuuccgggugcagcccaccgagagcaucgugcgguuccccaacaucaccaaccugugccccuucggcgagguguucaacgccacccgguucgccagcguguacgccuggaaccggaagcggaucagcaacugcguggccgacuacagcgugcuguacaacagcgccagcuucagcaccuucaagugcuacggcgugagccccaccaagcugaacgaccugugcuucaccaacguguacgccgacagcuucgugauccguggcgacgaggugcggcagaucgcacccggccagacaggcaagaucgccgacuacaacuacaagcugcccgacgacuucaccggcugcgugaucgccuggaacagcaacaaccucgacagcaaggugggcggcaacuacaacuaccuguaccggcuguuccggaagagcaaccugaagcccuucgagcgggacaucagcaccgagaucuaccaagccggcuccaccccuugcaacggcguggagggcuucaacugcuacuucccucugcagagcuacggcuuccagcccaccuacggcgugggcuaccagcccuaccgggugguggugcugagcuucgagcugcugcacgccccagccaccguguguggccccaagaagagcaccaaccuggugaagaacaagugcgugaacuucaacuucaacggccuuaccggcaccggcgugcugaccgagagcaacaagaaauuccugcccuuucagcaguucggccgggacaucgccgacaccaccgacgcugugcgggauccccagacccuggagauccuggacaucaccccuugcagcuucggcggcgugagcgugaucaccccaggcaccaacaccagcaaccagguggccgugcuguaccagggcgugaacugcaccgaggugcccguggccauccacgccgaccagcugacacccaccuggcgggucuacagcaccggcagcaacguguuccagacccgggccgguugccugaucggcgccgagcacgugaacaacagcuacgagugcgacauccccaucggcgccggcaucugugccagcuaccagacccagaccaauucaccccggagggcaaggagcguggccagccagagcaucaucgccuacaccaugagccugggcgccgagaacagcguggccuacagcaacaacagcaucgccauccccaccaacuucaccaucagcgugaccaccgagauucugcccgugagcaugaccaagaccagcguggacugcaccauguacaucugcggcgacagcaccgagugcagcaaccugcugcugcaguacggcagcuucugcacccagcugaaccgggcccugaccggcaucgccguggagcaggacaagaacacccaggagguguucgcccaggugaagcagaucuacaagaccccucccaucaaggacuucggcggcuucaacuucagccagauccugcccgaccccagcaagcccagcaagcggagcuucaucgaggaccugcuguucaacaaggugacccuagccgacgccggcuucaucaagcaguacggcgacugccucggcgacauagccgcccgggaccugaucugcgcccagaaguucaacggccugaccgugcugccuccccugcugaccgacgagaugaucgcccaguacaccagcgcccuguuagccggaaccaucaccagcggcuggacuuucggcgcuggagccgcucugcagauccccuucgccaugcagauggccuaccgguucaacggcaucggcgugacccagaacgugcuguacgagaaccagaagcugaucgccaaccaguucaacagcgccaucggcaagauccaggacagccugagcagcaccgcuagcgcccugggcaagcugcaggacguggugaaccagaacgcccaggcccugaacacccuggugaagcagcugagcagcaacuucggcgccaucagcagcgugcugaacgacauccugagccggcuggacaaggucgaggccgaggugcagaucgaccggcugaucacuggccggcugcagagccugcagaccuacgugacccagcagcugauccgggccgccgagauucgggccagcgccaaccuggccgccaccaagaugagcgagugcgugcugggccagagcaagcggguggacuucugcggcaagggcuaccaccugaugagcuuuccccagagcgcaccccacggagugguguuccugcacgugaccuacgugcccgcccaggagaagaacuucaccaccgccccagccaucugccacgacggcaaggcccacuuuccccgggagggcguguucgugagcaacggcacccacugguucgugacccagcggaacuucuacgagccccagaucaucaccaccgacaacaccuucgugagcggcaacugcgacguggugaucggcaucgugaacaacaccguguacgauccccugcagcccgagcuggacagcuucaaggaggagcuggacaaguacuucaagaaucacaccagccccgacguggaccugggcgacaucagcggcaucaacgccagcguggugaacauccagaaggagaucgaucggcugaacgagguggccaagaaccugaacgagagccugaucgaccugcaggagcugggcaaguacgagcaguacaucaaguggcccugguacaucuggcugggcuucaucgccggccugaucgccaucgugauggugaccaucaugcugugcugcaugaccagcugcugcagcugccugaagggcuguugcagcugcggcagcugcugcaaguucgacgaggacgacagcgagcccgugcugaagggcgugaagcugcacuacaccugaugacucgagcugguacugcaugcacgcaaugcuagcugccccuuucccguccuggguaccccgagucucccccgaccucgggucccagguaugcucccaccuccaccugccccacucaccaccucugcuaguuccagacaccucccaagcacgcagcaaugcagcucaaaacgcuuagccuagccacacccccacgggaaacagcagugauuaaccuuuagcaauaaacgaaaguuuaacuaagcuauacuaaccccaggguuggucaauuucgugccagccacacccuggagcuagcaaaaaaaaaaaaaaaaaaaaaaaaaaaaaagcauaugacuaaaaaaaaaaaaaaaaaaaaaaaaaaaaaaaaaaaaaaaaaaaaaaaaaaaaaaaaaaaaaaaaaaaaaa

SEQ ID NO: 26751 - RNA, 4277 nt, Artificial Sequence
  SARS-CoV-2/Wuhan/WIV05/2019__EPI_ISL_402128 spike protein mRNA gc (1-1273)(H69del_V70del_D614G)
agaauaaacuaguauucuucugguccccacagacucagagagaacccgccaccauguucguguuccuggugcugcugccccuggugagcagccagugcgugaaccugaccacccggacccagcugccaccagccuacaccaacagcuucacccggggcgucuacuaccccgacaagguguuccggagcagcguccugcacagcacccaggaccuguuccugcccuucuucagcaacgugaccugguuccacgccaucagcggcaccaacggcaccaagcgguucgacaaccccgugcugcccuucaacgacggcguguacuucgccagcaccgagaagagcaacaucauccggggcuggaucuucggcaccacccuggacagcaagacccagagccugcugaucgugaauaacgccaccaacguggugaucaaggugugcgaguuccaguucugcaacgaccccuuccugggcguguacuaccacaagaacaacaagagcuggauggagagcgaguuccggguguacagcagcgccaacaacugcaccuucgaguacgugagccagcccuuccugauggaccuggagggcaagcagggcaacuucaagaaccugcgggaguucguguucaagaacaucgacggcuacuucaagaucuacagcaagcacaccccaaucaaccuggugcgggaucugccccagggcuucucagcccuggagccccugguggaccugcccaucggcaucaacaucacccgguuccagacccugcuggcccugcaccggagcuaccugaccccaggcgacagcagcagcggguggacagcaggcgcggcugcuuacuacgugggcuaccugcagccccggaccuuccugcugaaguacaacgagaacggcaccaucaccgacgccguggacugcgcccuggacccucugagcgagaccaagugcacccugaagagcuucaccguggagaagggcaucuaccagaccagcaacuuccgggugcagcccaccgagagcaucgugcgguuccccaacaucaccaaccugugccccuucggcgagguguucaacgccacccgguucgccagcguguacgccuggaaccggaagcggaucagcaacugcguggccgacuacagcgugcuguacaacagcgccagcuucagcaccuucaagugcuacggcgugagccccaccaagcugaacgaccugugcuucaccaacguguacgccgacagcuucgugauccguggcgacgaggugcggcagaucgcacccggccagacaggcaagaucgccgacuacaacuacaagcugcccgacgacuucaccggcugcgugaucgccuggaacagcaacaaccucgacagcaaggugggcggcaacuacaacuaccuguaccggcuguuccggaagagcaaccugaagcccuucgagcgggacaucagcaccgagaucuaccaagccggcuccaccccuugcaacggcguggagggcuucaacugcuacuucccucugcagagcuacggcuuccagcccaccaacggcgugggcuaccagcccuaccgggugguggugcugagcuucgagcugcugcacgccccagccaccguguguggccccaagaagagcaccaaccuggugaagaacaagugcgugaacuucaacuucaacggccuuaccggcaccggcgugcugaccgagagcaacaagaaauuccugcccuuucagcaguucggccgggacaucgccgacaccaccgacgcugugcgggauccccagacccuggagauccuggacaucaccccuugcagcuucggcggcgugagcgugaucaccccaggcaccaacaccagcaaccagguggccgugcuguaccagggcgugaacugcaccgaggugcccguggccauccacgccgaccagcugacacccaccuggcgggucuacagcaccggcagcaacguguuccagacccgggccgguugccugaucggcgccgagcacgugaacaacagcuacgagugcgacauccccaucggcgccggcaucugugccagcuaccagacccagaccaauucaccccggagggcaaggagcguggccagccagagcaucaucgccuacaccaugagccugggcgccgagaacagcguggccuacagcaacaacagcaucgccauccccaccaacuucaccaucagcgugaccaccgagauucugcccgugagcaugaccaagaccagcguggacugcaccauguacaucugcggcgacagcaccgagugcagcaaccugcugcugcaguacggcagcuucugcacccagcugaaccgggcccugaccggcaucgccguggagcaggacaagaacacccaggagguguucgcccaggugaagcagaucuacaagaccccucccaucaaggacuucggcggcuucaacuucagccagauccugcccgaccccagcaagcccagcaagcggagcuucaucgaggaccugcuguucaacaaggugacccuagccgacgccggcuucaucaagcaguacggcgacugccucggcgacauagccgcccgggaccugaucugcgcccagaaguucaacggccugaccgugcugccuccccugcugaccgacgagaugaucgcccaguacaccagcgcccuguuagccggaaccaucaccagcggcuggacuuucggcgcuggagccgcucugcagauccccuucgccaugcagauggccuaccgguucaacggcaucggcgugacccagaacgugcuguacgagaaccagaagcugaucgccaaccaguucaacagcgccaucggcaagauccaggacagccugagcagcaccgcuagcgcccugggcaagcugcaggacguggugaaccagaacgcccaggcccugaacacccuggugaagcagcugagcagcaacuucggcgccaucagcagcgugcugaacgacauccugagccggcuggacaaggucgaggccgaggugcagaucgaccggcugaucacuggccggcugcagagccugcagaccuacgugacccagcagcugauccgggccgccgagauucgggccagcgccaaccuggccgccaccaagaugagcgagugcgugcugggccagagcaagcggguggacuucugcggcaagggcuaccaccugaugagcuuuccccagagcgcaccccacggagugguguuccugcacgugaccuacgugcccgcccaggagaagaacuucaccaccgccccagccaucugccacgacggcaaggcccacuuuccccgggagggcguguucgugagcaacggcacccacugguucgugacccagcggaacuucuacgagccccagaucaucaccaccgacaacaccuucgugagcggcaacugcgacguggugaucggcaucgugaacaacaccguguacgauccccugcagcccgagcuggacagcuucaaggaggagcuggacaaguacuucaagaaucacaccagccccgacguggaccugggcgacaucagcggcaucaacgccagcguggugaacauccagaaggagaucgaucggcugaacgagguggccaagaaccugaacgagagccugaucgaccugcaggagcugggcaaguacgagcaguacaucaaguggcccugguacaucuggcugggcuucaucgccggccugaucgccaucgugauggugaccaucaugcugugcugcaugaccagcugcugcagcugccugaagggcuguugcagcugcggcagcugcugcaaguucgacgaggacgacagcgagcccgugcugaagggcgugaagcugcacuacaccugaugacucgagcugguacugcaugcacgcaaugcuagcugccccuuucccguccuggguaccccgagucucccccgaccucgggucccagguaugcucccaccuccaccugccccacucaccaccucugcuaguuccagacaccucccaagcacgcagcaaugcagcucaaaacgcuuagccuagccacacccccacgggaaacagcagugauuaaccuuuagcaauaaacgaaaguuuaacuaagcuauacuaaccccaggguuggucaauuucgugccagccacacccuggagcuagcaaaaaaaaaaaaaaaaaaaaaaaaaaaaaagcauaugacuaaaaaaaaaaaaaaaaaaaaaaaaaaaaaaaaaaaaaaaaaaaaaaaaaaaaaaaaaaaaaaaaaaaaaa

SEQ ID NO: 26752 - RNA, 4283 nt, Artificial Sequence
  SARS-CoV-2/Wuhan/WIV05/2019__EPI_ISL_402128 spike protein mRNA gc (1-1273)(Y453F_D614G)
agaauaaacuaguauucuucugguccccacagacucagagagaacccgccaccauguucguguuccuggugcugcugccccuggugagcagccagugcgugaaccugaccacccggacccagcugccaccagccuacaccaacagcuucacccggggcgucuacuaccccgacaagguguuccggagcagcguccugcacagcacccaggaccuguuccugcccuucuucagcaacgugaccugguuccacgccauccacgugagcggcaccaacggcaccaagcgguucgacaaccccgugcugcccuucaacgacggcguguacuucgccagcaccgagaagagcaacaucauccggggcuggaucuucggcaccacccuggacagcaagacccagagccugcugaucgugaauaacgccaccaacguggugaucaaggugugcgaguuccaguucugcaacgaccccuuccugggcguguacuaccacaagaacaacaagagcuggauggagagcgaguuccggguguacagcagcgccaacaacugcaccuucgaguacgugagccagcccuuccugauggaccuggagggcaagcagggcaacuucaagaaccugcgggaguucguguucaagaacaucgacggcuacuucaagaucuacagcaagcacaccccaaucaaccuggugcgggaucugccccagggcuucucagcccuggagccccugguggaccugcccaucggcaucaacaucacccgguuccagacccugcuggcccugcaccggagcuaccugaccccaggcgacagcagcagcggguggacagcaggcgcggcugcuuacuacgugggcuaccugcagccccggaccuuccugcugaaguacaacgagaacggcaccaucaccgacgccguggacugcgcccuggacccucugagcgagaccaagugcacccugaagagcuucaccguggagaagggcaucuaccagaccagcaacuuccgggugcagcccaccgagagcaucgugcgguuccccaacaucaccaaccugugccccuucggcgagguguucaacgccacccgguucgccagcguguacgccuggaaccggaagcggaucagcaacugcguggccgacuacagcgugcuguacaacagcgccagcuucagcaccuucaagugcuacggcgugagccccaccaagcugaacgaccugugcuucaccaacguguacgccgacagcuucgugauccguggcgacgaggugcggcagaucgcacccggccagacaggcaagaucgccgacuacaacuacaagcugcccgacgacuucaccggcugcgugaucgccuggaacagcaacaaccucgacagcaaggugggcggcaacuacaacuaccuguuccggcuguuccggaagagcaaccugaagcccuucgagcgggacaucagcaccgagaucuaccaagccggcuccaccccuugcaacggcguggagggcuucaacugcuacuucccucugcagagcuacggcuuccagcccaccaacggcgugggcuaccagcccuaccgggugguggugcugagcuucgagcugcugcacgccccagccaccguguguggccccaagaagagcaccaaccuggugaagaacaagugcgugaacuucaacuucaacggccuuaccggcaccggcgugcugaccgagagcaacaagaaauuccugcccuuucagcaguucggccgggacaucgccgacaccaccgacgcugugcgggauccccagacccuggagauccuggacaucaccccuugcagcuucggcggcgugagcgugaucaccccaggcaccaacaccagcaaccagguggccgugcuguaccagggcgugaacugcaccgaggugcccguggccauccacgccgaccagcugacacccaccuggcgggucuacagcaccggcagcaacguguuccagacccgggccgguugccugaucggcgccgagcacgugaacaacagcuacgagugcgacauccccaucggcgccggcaucugugccagcuaccagacccagaccaauucaccccggagggcaaggagcguggccagccagagcaucaucgccuacaccaugagccugggcgccgagaacagcguggccuacagcaacaacagcaucgccauccccaccaacuucaccaucagcgugaccaccgagauucugcccgugagcaugaccaagaccagcguggacugcaccauguacaucugcggcgacagcaccgagugcagcaaccugcugcugcaguacggcagcuucugcacccagcugaaccgggcccugaccggcaucgccguggagcaggacaagaacacccaggagguguucgcccaggugaagcagaucuacaagaccccucccaucaaggacuucggcggcuucaacuucagccagauccugcccgaccccagcaagcccagcaagcggagcuucaucgaggaccugcuguucaacaaggugacccuagccgacgccggcuucaucaagcaguacggcgacugccucggcgacauagccgcccgggaccugaucugcgcccagaaguucaacggccugaccgugcugccuccccugcugaccgacgagaugaucgcccaguacaccagcgcccuguuagccggaaccaucaccagcggcuggacuuucggcgcuggagccgcucugcagauccccuucgccaugcagauggccuaccgguucaacggcaucggcgugacccagaacgugcuguacgagaaccagaagcugaucgccaaccaguucaacagcgccaucggcaagauccaggacagccugagcagcaccgcuagcgcccugggcaagcugcaggacguggugaaccagaacgcccaggcccugaacacccuggugaagcagcugagcagcaacuucggcgccaucagcagcgugcugaacgacauccugagccggcuggacaaggucgaggccgaggugcagaucgaccggcugaucacuggccggcugcagagccugcagaccuacgugacccagcagcugauccgggccgccgagauucgggccagcgccaaccuggccgccaccaagaugagcgagugcgugcugggccagagcaagcggguggacuucugcggcaagggcuaccaccugaugagcuuuccccagagcgcaccccacggagugguguuccugcacgugaccuacgugcccgcccaggagaagaacuucaccaccgccccagccaucugccacgacggcaaggcccacuuuccccgggagggcguguucgugagcaacggcacccacugguucgugacccagcggaacuucuacgagccccagaucaucaccaccgacaacaccuucgugagcggcaacugcgacguggugaucggcaucgugaacaacaccguguacgauccccugcagcccgagcuggacagcuucaaggaggagcuggacaaguacuucaagaaucacaccagccccgacguggaccugggcgacaucagcggcaucaacgccagcguggugaacauccagaaggagaucgaucggcugaacgagguggccaagaaccugaacgagagccugaucgaccugcaggagcugggcaaguacgagcaguacaucaaguggcccugguacaucuggcugggcuucaucgccggccugaucgccaucgugauggugaccaucaugcugugcugcaugaccagcugcugcagcugccugaagggcuguugcagcugcggcagcugcugcaaguucgacgaggacgacagcgagcccgugcugaagggcgugaagcugcacuacaccugaugacucgagcugguacugcaugcacgcaaugcuagcugccccuuucccguccuggguaccccgagucucccccgaccucgggucccagguaugcucccaccuccaccugccccacucaccaccucugcuaguuccagacaccucccaagcacgcagcaaugcagcucaaaacgcuuagccuagccacacccccacgggaaacagcagugauuaaccuuuagcaauaaacgaaaguuuaacuaagcuauacuaaccccaggguuggucaauuucgugccagccacacccuggagcuagcaaaaaaaaaaaaaaaaaaaaaaaaaaaaaagcauaugacuaaaaaaaaaaaaaaaaaaaaaaaaaaaaaaaaaaaaaaaaaaaaaaaaaaaaaaaaaaaaaaaaaaaaaa

SEQ ID NO: 26753 - RNA, 4283 nt, Artificial Sequence
  SARS-CoV-2/Wuhan/WIV05/2019__EPI_ISL_402128 spike protein mRNA gc (1-1273)(D614G_I692V)
agaauaaacuaguauucuucugguccccacagacucagagagaacccgccaccauguucguguuccuggugcugcugccccuggugagcagccagugcgugaaccugaccacccggacccagcugccaccagccuacaccaacagcuucacccggggcgucuacuaccccgacaagguguuccggagcagcguccugcacagcacccaggaccuguuccugcccuucuucagcaacgugaccugguuccacgccauccacgugagcggcaccaacggcaccaagcgguucgacaaccccgugcugcccuucaacgacggcguguacuucgccagcaccgagaagagcaacaucauccggggcuggaucuucggcaccacccuggacagcaagacccagagccugcugaucgugaauaacgccaccaacguggugaucaaggugugcgaguuccaguucugcaacgaccccuuccugggcguguacuaccacaagaacaacaagagcuggauggagagcgaguuccggguguacagcagcgccaacaacugcaccuucgaguacgugagccagcccuuccugauggaccuggagggcaagcagggcaacuucaagaaccugcgggaguucguguucaagaacaucgacggcuacuucaagaucuacagcaagcacaccccaaucaaccuggugcgggaucugccccagggcuucucagcccuggagccccugguggaccugcccaucggcaucaacaucacccgguuccagacccugcuggcccugcaccggagcuaccugaccccaggcgacagcagcagcggguggacagcaggcgcggcugcuuacuacgugggcuaccugcagccccggaccuuccugcugaaguacaacgagaacggcaccaucaccgacgccguggacugcgcccuggacccucugagcgagaccaagugcacccugaagagcuucaccguggagaagggcaucuaccagaccagcaacuuccgggugcagcccaccgagagcaucgugcgguuccccaacaucaccaaccugugccccuucggcgagguguucaacgccacccgguucgccagcguguacgccuggaaccggaagcggaucagcaacugcguggccgacuacagcgugcuguacaacagcgccagcuucagcaccuucaagugcuacggcgugagccccaccaagcugaacgaccugugcuucaccaacguguacgccgacagcuucgugauccguggcgacgaggugcggcagaucgcacccggccagacaggcaagaucgccgacuacaacuacaagcugcccgacgacuucaccggcugcgugaucgccuggaacagcaacaaccucgacagcaaggugggcggcaacuacaacuaccuguaccggcuguuccggaagagcaaccugaagcccuucgagcgggacaucagcaccgagaucuaccaagccggcuccaccccuugcaacggcguggagggcuucaacugcuacuucccucugcagagcuacggcuuccagcccaccaacggcgugggcuaccagcccuaccgggugguggugcugagcuucgagcugcugcacgccccagccaccguguguggccccaagaagagcaccaaccuggugaagaacaagugcgugaacuucaacuucaacggccuuaccggcaccggcgugcugaccgagagcaacaagaaauuccugcccuuucagcaguucggccgggacaucgccgacaccaccgacgcugugcgggauccccagacccuggagauccuggacaucaccccuugcagcuucggcggcgugagcgugaucaccccaggcaccaacaccagcaaccagguggccgugcuguaccagggcgugaacugcaccgaggugcccguggccauccacgccgaccagcugacacccaccuggcgggucuacagcaccggcagcaacguguuccagacccgggccgguugccugaucggcgccgagcacgugaacaacagcuacgagugcgacauccccaucggcgccggcaucugugccagcuaccagacccagaccaauucaccccggagggcaaggagcguggccagccagagcgugaucgccuacaccaugagccugggcgccgagaacagcguggccuacagcaacaacagcaucgccauccccaccaacuucaccaucagcgugaccaccgagauucugcccgugagcaugaccaagaccagcguggacugcaccauguacaucugcggcgacagcaccgagugcagcaaccugcugcugcaguacggcagcuucugcacccagcugaaccgggcccugaccggcaucgccguggagcaggacaagaacacccaggagguguucgcccaggugaagcagaucuacaagaccccucccaucaaggacuucggcggcuucaacuucagccagauccugcccgaccccagcaagcccagcaagcggagcuucaucgaggaccugcuguucaacaaggugacccuagccgacgccggcuucaucaagcaguacggcgacugccucggcgacauagccgcccgggaccugaucugcgcccagaaguucaacggccugaccgugcugccuccccugcugaccgacgagaugaucgcccaguacaccagcgcccuguuagccggaaccaucaccagcggcuggacuuucggcgcuggagccgcucugcagauccccuucgccaugcagauggccuaccgguucaacggcaucggcgugacccagaacgugcuguacgagaaccagaagcugaucgccaaccaguucaacagcgccaucggcaagauccaggacagccugagcagcaccgcuagcgcccugggcaagcugcaggacguggugaaccagaacgcccaggcccugaacacccuggugaagcagcugagcagcaacuucggcgccaucagcagcgugcugaacgacauccugagccggcuggacaaggucgaggccgaggugcagaucgaccggcugaucacuggccggcugcagagccugcagaccuacgugacccagcagcugauccgggccgccgagauucgggccagcgccaaccuggccgccaccaagaugagcgagugcgugcugggccagagcaagcggguggacuucugcggcaagggcuaccaccugaugagcuuuccccagagcgcaccccacggagugguguuccugcacgugaccuacgugcccgcccaggagaagaacuucaccaccgccccagccaucugccacgacggcaaggcccacuuuccccgggagggcguguucgugagcaacggcacccacugguucgugacccagcggaacuucuacgagccccagaucaucaccaccgacaacaccuucgugagcggcaacugcgacguggugaucggcaucgugaacaacaccguguacgauccccugcagcccgagcuggacagcuucaaggaggagcuggacaaguacuucaagaaucacaccagccccgacguggaccugggcgacaucagcggcaucaacgccagcguggugaacauccagaaggagaucgaucggcugaacgagguggccaagaaccugaacgagagccugaucgaccugcaggagcugggcaaguacgagcaguacaucaaguggcccugguacaucuggcugggcuucaucgccggccugaucgccaucgugauggugaccaucaugcugugcugcaugaccagcugcugcagcugccugaagggcuguugcagcugcggcagcugcugcaaguucgacgaggacgacagcgagcccgugcugaagggcgugaagcugcacuacaccugaugacucgagcugguacugcaugcacgcaaugcuagcugccccuuucccguccuggguaccccgagucucccccgaccucgggucccagguaugcucccaccuccaccugccccacucaccaccucugcuaguuccagacaccucccaagcacgcagcaaugcagcucaaaacgcuuagccuagccacacccccacgggaaacagcagugauuaaccuuuagcaauaaacgaaaguuuaacuaagcuauacuaaccccaggguuggucaauuucgugccagccacacccuggagcuagcaaaaaaaaaaaaaaaaaaaaaaaaaaaaaagcauaugacuaaaaaaaaaaaaaaaaaaaaaaaaaaaaaaaaaaaaaaaaaaaaaaaaaaaaaaaaaaaaaaaaaaaaaa

SEQ ID NO: 26754 - RNA, 4283 nt, Artificial Sequence
  SARS-CoV-2/Wuhan/WIV05/2019__EPI_ISL_402128 spike protein mRNA gc (1-1273)(D614G_M1229I)
agaauaaacuaguauucuucugguccccacagacucagagagaacccgccaccauguucguguuccuggugcugcugccccuggugagcagccagugcgugaaccugaccacccggacccagcugccaccagccuacaccaacagcuucacccggggcgucuacuaccccgacaagguguuccggagcagcguccugcacagcacccaggaccuguuccugcccuucuucagcaacgugaccugguuccacgccauccacgugagcggcaccaacggcaccaagcgguucgacaaccccgugcugcccuucaacgacggcguguacuucgccagcaccgagaagagcaacaucauccggggcuggaucuucggcaccacccuggacagcaagacccagagccugcugaucgugaauaacgccaccaacguggugaucaaggugugcgaguuccaguucugcaacgaccccuuccugggcguguacuaccacaagaacaacaagagcuggauggagagcgaguuccggguguacagcagcgccaacaacugcaccuucgaguacgugagccagcccuuccugauggaccuggagggcaagcagggcaacuucaagaaccugcgggaguucguguucaagaacaucgacggcuacuucaagaucuacagcaagcacaccccaaucaaccuggugcgggaucugccccagggcuucucagcccuggagccccugguggaccugcccaucggcaucaacaucacccgguuccagacccugcuggcccugcaccggagcuaccugaccccaggcgacagcagcagcggguggacagcaggcgcggcugcuuacuacgugggcuaccugcagccccggaccuuccugcugaaguacaacgagaacggcaccaucaccgacgccguggacugcgcccuggacccucugagcgagaccaagugcacccugaagagcuucaccguggagaagggcaucuaccagaccagcaacuuccgggugcagcccaccgagagcaucgugcgguuccccaacaucaccaaccugugccccuucggcgagguguucaacgccacccgguucgccagcguguacgccuggaaccggaagcggaucagcaacugcguggccgacuacagcgugcuguacaacagcgccagcuucagcaccuucaagugcuacggcgugagccccaccaagcugaacgaccugugcuucaccaacguguacgccgacagcuucgugauccguggcgacgaggugcggcagaucgcacccggccagacaggcaagaucgccgacuacaacuacaagcugcccgacgacuucaccggcugcgugaucgccuggaacagcaacaaccucgacagcaaggugggcggcaacuacaacuaccuguaccggcuguuccggaagagcaaccugaagcccuucgagcgggacaucagcaccgagaucuaccaagccggcuccaccccuugcaacggcguggagggcuucaacugcuacuucccucugcagagcuacggcuuccagcccaccaacggcgugggcuaccagcccuaccgggugguggugcugagcuucgagcugcugcacgccccagccaccguguguggccccaagaagagcaccaaccuggugaagaacaagugcgugaacuucaacuucaacggccuuaccggcaccggcgugcugaccgagagcaacaagaaauuccugcccuuucagcaguucggccgggacaucgccgacaccaccgacgcugugcgggauccccagacccuggagauccuggacaucaccccuugcagcuucggcggcgugagcgugaucaccccaggcaccaacaccagcaaccagguggccgugcuguaccagggcgugaacugcaccgaggugcccguggccauccacgccgaccagcugacacccaccuggcgggucuacagcaccggcagcaacguguuccagacccgggccgguugccugaucggcgccgagcacgugaacaacagcuacgagugcgacauccccaucggcgccggcaucugugccagcuaccagacccagaccaauucaccccggagggcaaggagcguggccagccagagcaucaucgccuacaccaugagccugggcgccgagaacagcguggccuacagcaacaacagcaucgccauccccaccaacuucaccaucagcgugaccaccgagauucugcccgugagcaugaccaagaccagcguggacugcaccauguacaucugcggcgacagcaccgagugcagcaaccugcugcugcaguacggcagcuucugcacccagcugaaccgggcccugaccggcaucgccguggagcaggacaagaacacccaggagguguucgcccaggugaagcagaucuacaagaccccucccaucaaggacuucggcggcuucaacuucagccagauccugcccgaccccagcaagcccagcaagcggagcuucaucgaggaccugcuguucaacaaggugacccuagccgacgccggcuucaucaagcaguacggcgacugccucggcgacauagccgcccgggaccugaucugcgcccagaaguucaacggccugaccgugcugccuccccugcugaccgacgagaugaucgcccaguacaccagcgcccuguuagccggaaccaucaccagcggcuggacuuucggcgcuggagccgcucugcagauccccuucgccaugcagauggccuaccgguucaacggcaucggcgugacccagaacgugcuguacgagaaccagaagcugaucgccaaccaguucaacagcgccaucggcaagauccaggacagccugagcagcaccgcuagcgcccugggcaagcugcaggacguggugaaccagaacgcccaggcccugaacacccuggugaagcagcugagcagcaacuucggcgccaucagcagcgugcugaacgacauccugagccggcuggacaaggucgaggccgaggugcagaucgaccggcugaucacuggccggcugcagagccugcagaccuacgugacccagcagcugauccgggccgccgagauucgggccagcgccaaccuggccgccaccaagaugagcgagugcgugcugggccagagcaagcggguggacuucugcggcaagggcuaccaccugaugagcuuuccccagagcgcaccccacggagugguguuccugcacgugaccuacgugcccgcccaggagaagaacuucaccaccgccccagccaucugccacgacggcaaggcccacuuuccccgggagggcguguucgugagcaacggcacccacugguucgugacccagcggaacuucuacgagccccagaucaucaccaccgacaacaccuucgugagcggcaacugcgacguggugaucggcaucgugaacaacaccguguacgauccccugcagcccgagcuggacagcuucaaggaggagcuggacaaguacuucaagaaucacaccagccccgacguggaccugggcgacaucagcggcaucaacgccagcguggugaacauccagaaggagaucgaucggcugaacgagguggccaagaaccugaacgagagccugaucgaccugcaggagcugggcaaguacgagcaguacaucaaguggcccugguacaucuggcugggcuucaucgccggccugaucgccaucgugaucgugaccaucaugcugugcugcaugaccagcugcugcagcugccugaagggcuguugcagcugcggcagcugcugcaaguucgacgaggacgacagcgagcccgugcugaagggcgugaagcugcacuacaccugaugacucgagcugguacugcaugcacgcaaugcuagcugccccuuucccguccuggguaccccgagucucccccgaccucgggucccagguaugcucccaccuccaccugccccacucaccaccucugcuaguuccagacaccucccaagcacgcagcaaugcagcucaaaacgcuuagccuagccacacccccacgggaaacagcagugauuaaccuuuagcaauaaacgaaaguuuaacuaagcuauacuaaccccaggguuggucaauuucgugccagccacacccuggagcuagcaaaaaaaaaaaaaaaaaaaaaaaaaaaaaagcauaugacuaaaaaaaaaaaaaaaaaaaaaaaaaaaaaaaaaaaaaaaaaaaaaaaaaaaaaaaaaaaaaaaaaaaaaa

SEQ ID NO: 26755 - RNA, 4277 nt, Artificial Sequence
  SARS-CoV-2/Wuhan/WIV05/2019__EPI_ISL_402128 spike protein mRNA gc (1-1273)(H69del_V70del_A222V_Y453F_S477N_D614G_I692V)
agaauaaacuaguauucuucugguccccacagacucagagagaacccgccaccauguucguguuccuggugcugcugccccuggugagcagccagugcgugaaccugaccacccggacccagcugccaccagccuacaccaacagcuucacccggggcgucuacuaccccgacaagguguuccggagcagcguccugcacagcacccaggaccuguuccugcccuucuucagcaacgugaccugguuccacgccaucagcggcaccaacggcaccaagcgguucgacaaccccgugcugcccuucaacgacggcguguacuucgccagcaccgagaagagcaacaucauccggggcuggaucuucggcaccacccuggacagcaagacccagagccugcugaucgugaauaacgccaccaacguggugaucaaggugugcgaguuccaguucugcaacgaccccuuccugggcguguacuaccacaagaacaacaagagcuggauggagagcgaguuccggguguacagcagcgccaacaacugcaccuucgaguacgugagccagcccuuccugauggaccuggagggcaagcagggcaacuucaagaaccugcgggaguucguguucaagaacaucgacggcuacuucaagaucuacagcaagcacaccccaaucaaccuggugcgggaucugccccagggcuucucagugcuggagccccugguggaccugcccaucggcaucaacaucacccgguuccagacccugcuggcccugcaccggagcuaccugaccccaggcgacagcagcagcggguggacagcaggcgcggcugcuuacuacgugggcuaccugcagccccggaccuuccugcugaaguacaacgagaacggcaccaucaccgacgccguggacugcgcccuggacccucugagcgagaccaagugcacccugaagagcuucaccguggagaagggcaucuaccagaccagcaacuuccgggugcagcccaccgagagcaucgugcgguuccccaacaucaccaaccugugccccuucggcgagguguucaacgccacccgguucgccagcguguacgccuggaaccggaagcggaucagcaacugcguggccgacuacagcgugcuguacaacagcgccagcuucagcaccuucaagugcuacggcgugagccccaccaagcugaacgaccugugcuucaccaacguguacgccgacagcuucgugauccguggcgacgaggugcggcagaucgcacccggccagacaggcaagaucgccgacuacaacuacaagcugcccgacgacuucaccggcugcgugaucgccuggaacagcaacaaccucgacagcaaggugggcggcaacuacaacuaccuguuccggcuguuccggaagagcaaccugaagcccuucgagcgggacaucagcaccgagaucuaccaagccggcaacaccccuugcaacggcguggagggcuucaacugcuacuucccucugcagagcuacggcuuccagcccaccaacggcgugggcuaccagcccuaccgggugguggugcugagcuucgagcugcugcacgccccagccaccguguguggccccaagaagagcaccaaccuggugaagaacaagugcgugaacuucaacuucaacggccuuaccggcaccggcgugcugaccgagagcaacaagaaauuccugcccuuucagcaguucggccgggacaucgccgacaccaccgacgcugugcgggauccccagacccuggagauccuggacaucaccccuugcagcuucggcggcgugagcgugaucaccccaggcaccaacaccagcaaccagguggccgugcuguaccagggcgugaacugcaccgaggugcccguggccauccacgccgaccagcugacacccaccuggcgggucuacagcaccggcagcaacguguuccagacccgggccgguugccugaucggcgccgagcacgugaacaacagcuacgagugcgacauccccaucggcgccggcaucugugccagcuaccagacccagaccaauucaccccggagggcaaggagcguggccagccagagcgugaucgccuacaccaugagccugggcgccgagaacagcguggccuacagcaacaacagcaucgccauccccaccaacuucaccaucagcgugaccaccgagauucugcccgugagcaugaccaagaccagcguggacugcaccauguacaucugcggcgacagcaccgagugcagcaaccugcugcugcaguacggcagcuucugcacccagcugaaccgggcccugaccggcaucgccguggagcaggacaagaacacccaggagguguucgcccaggugaagcagaucuacaagaccccucccaucaaggacuucggcggcuucaacuucagccagauccugcccgaccccagcaagcccagcaagcggagcuucaucgaggaccugcuguucaacaaggugacccuagccgacgccggcuucaucaagcaguacggcgacugccucggcgacauagccgcccgggaccugaucugcgcccagaaguucaacggccugaccgugcugccuccccugcugaccgacgagaugaucgcccaguacaccagcgcccuguuagccggaaccaucaccagcggcuggacuuucggcgcuggagccgcucugcagauccccuucgccaugcagauggccuaccgguucaacggcaucggcgugacccagaacgugcuguacgagaaccagaagcugaucgccaaccaguucaacagcgccaucggcaagauccaggacagccugagcagcaccgcuagcgcccugggcaagcugcaggacguggugaaccagaacgcccaggcccugaacacccuggugaagcagcugagcagcaacuucggcgccaucagcagcgugcugaacgacauccugagccggcuggacaaggucgaggccgaggugcagaucgaccggcugaucacuggccggcugcagagccugcagaccuacgugacccagcagcugauccgggccgccgagauucgggccagcgccaaccuggccgccaccaagaugagcgagugcgugcugggccagagcaagcggguggacuucugcggcaagggcuaccaccugaugagcuuuccccagagcgcaccccacggagugguguuccugcacgugaccuacgugcccgcccaggagaagaacuucaccaccgccccagccaucugccacgacggcaaggcccacuuuccccgggagggcguguucgugagcaacggcacccacugguucgugacccagcggaacuucuacgagccccagaucaucaccaccgacaacaccuucgugagcggcaacugcgacguggugaucggcaucgugaacaacaccguguacgauccccugcagcccgagcuggacagcuucaaggaggagcuggacaaguacuucaagaaucacaccagccccgacguggaccugggcgacaucagcggcaucaacgccagcguggugaacauccagaaggagaucgaucggcugaacgagguggccaagaaccugaacgagagccugaucgaccugcaggagcugggcaaguacgagcaguacaucaaguggcccugguacaucuggcugggcuucaucgccggccugaucgccaucgugauggugaccaucaugcugugcugcaugaccagcugcugcagcugccugaagggcuguugcagcugcggcagcugcugcaaguucgacgaggacgacagcgagcccgugcugaagggcgugaagcugcacuacaccugaugacucgagcugguacugcaugcacgcaaugcuagcugccccuuucccguccuggguaccccgagucucccccgaccucgggucccagguaugcucccaccuccaccugccccacucaccaccucugcuaguuccagacaccucccaagcacgcagcaaugcagcucaaaacgcuuagccuagccacacccccacgggaaacagcagugauuaaccuuuagcaauaaacgaaaguuuaacuaagcuauacuaaccccaggguuggucaauuucgugccagccacacccuggagcuagcaaaaaaaaaaaaaaaaaaaaaaaaaaaaaagcauaugacuaaaaaaaaaaaaaaaaaaaaaaaaaaaaaaaaaaaaaaaaaaaaaaaaaaaaaaaaaaaaaaaaaaaaaa

SEQ ID NO: 26756 - RNA, 4277 nt, Artificial Sequence
  SARS-CoV-2/Wuhan/WIV05/2019__EPI_ISL_402128 spike protein mRNA gc (1-1273)(H69del_V70del_Y453F_D614G_I692V_M1229I)
agaauaaacuaguauucuucugguccccacagacucagagagaacccgccaccauguucguguuccuggugcugcugccccuggugagcagccagugcgugaaccugaccacccggacccagcugccaccagccuacaccaacagcuucacccggggcgucuacuaccccgacaagguguuccggagcagcguccugcacagcacccaggaccuguuccugcccuucuucagcaacgugaccugguuccacgccaucagcggcaccaacggcaccaagcgguucgacaaccccgugcugcccuucaacgacggcguguacuucgccagcaccgagaagagcaacaucauccggggcuggaucuucggcaccacccuggacagcaagacccagagccugcugaucgugaauaacgccaccaacguggugaucaaggugugcgaguuccaguucugcaacgaccccuuccugggcguguacuaccacaagaacaacaagagcuggauggagagcgaguuccggguguacagcagcgccaacaacugcaccuucgaguacgugagccagcccuuccugauggaccuggagggcaagcagggcaacuucaagaaccugcgggaguucguguucaagaacaucgacggcuacuucaagaucuacagcaagcacaccccaaucaaccuggugcgggaucugccccagggcuucucagcccuggagccccugguggaccugcccaucggcaucaacaucacccgguuccagacccugcuggcccugcaccggagcuaccugaccccaggcgacagcagcagcggguggacagcaggcgcggcugcuuacuacgugggcuaccugcagccccggaccuuccugcugaaguacaacgagaacggcaccaucaccgacgccguggacugcgcccuggacccucugagcgagaccaagugcacccugaagagcuucaccguggagaagggcaucuaccagaccagcaacuuccgggugcagcccaccgagagcaucgugcgguuccccaacaucaccaaccugugccccuucggcgagguguucaacgccacccgguucgccagcguguacgccuggaaccggaagcggaucagcaacugcguggccgacuacagcgugcuguacaacagcgccagcuucagcaccuucaagugcuacggcgugagccccaccaagcugaacgaccugugcuucaccaacguguacgccgacagcuucgugauccguggcgacgaggugcggcagaucgcacccggccagacaggcaagaucgccgacuacaacuacaagcugcccgacgacuucaccggcugcgugaucgccuggaacagcaacaaccucgacagcaaggugggcggcaacuacaacuaccuguuccggcuguuccggaagagcaaccugaagcccuucgagcgggacaucagcaccgagaucuaccaagccggcuccaccccuugcaacggcguggagggcuucaacugcuacuucccucugcagagcuacggcuuccagcccaccaacggcgugggcuaccagcccuaccgggugguggugcugagcuucgagcugcugcacgccccagccaccguguguggccccaagaagagcaccaaccuggugaagaacaagugcgugaacuucaacuucaacggccuuaccggcaccggcgugcugaccgagagcaacaagaaauuccugcccuuucagcaguucggccgggacaucgccgacaccaccgacgcugugcgggauccccagacccuggagauccuggacaucaccccuugcagcuucggcggcgugagcgugaucaccccaggcaccaacaccagcaaccagguggccgugcuguaccagggcgugaacugcaccgaggugcccguggccauccacgccgaccagcugacacccaccuggcgggucuacagcaccggcagcaacguguuccagacccgggccgguugccugaucggcgccgagcacgugaacaacagcuacgagugcgacauccccaucggcgccggcaucugugccagcuaccagacccagaccaauucaccccggagggcaaggagcguggccagccagagcgugaucgccuacaccaugagccugggcgccgagaacagcguggccuacagcaacaacagcaucgccauccccaccaacuucaccaucagcgugaccaccgagauucugcccgugagcaugaccaagaccagcguggacugcaccauguacaucugcggcgacagcaccgagugcagcaaccugcugcugcaguacggcagcuucugcacccagcugaaccgggcccugaccggcaucgccguggagcaggacaagaacacccaggagguguucgcccaggugaagcagaucuacaagaccccucccaucaaggacuucggcggcuucaacuucagccagauccugcccgaccccagcaagcccagcaagcggagcuucaucgaggaccugcuguucaacaaggugacccuagccgacgccggcuucaucaagcaguacggcgacugccucggcgacauagccgcccgggaccugaucugcgcccagaaguucaacggccugaccgugcugccuccccugcugaccgacgagaugaucgcccaguacaccagcgcccuguuagccggaaccaucaccagcggcuggacuuucggcgcuggagccgcucugcagauccccuucgccaugcagauggccuaccgguucaacggcaucggcgugacccagaacgugcuguacgagaaccagaagcugaucgccaaccaguucaacagcgccaucggcaagauccaggacagccugagcagcaccgcuagcgcccugggcaagcugcaggacguggugaaccagaacgcccaggcccugaacacccuggugaagcagcugagcagcaacuucggcgccaucagcagcgugcugaacgacauccugagccggcuggacaaggucgaggccgaggugcagaucgaccggcugaucacuggccggcugcagagccugcagaccuacgugacccagcagcugauccgggccgccgagauucgggccagcgccaaccuggccgccaccaagaugagcgagugcgugcugggccagagcaagcggguggacuucugcggcaagggcuaccaccugaugagcuuuccccagagcgcaccccacggagugguguuccugcacgugaccuacgugcccgcccaggagaagaacuucaccaccgccccagccaucugccacgacggcaaggcccacuuuccccgggagggcguguucgugagcaacggcacccacugguucgugacccagcggaacuucuacgagccccagaucaucaccaccgacaacaccuucgugagcggcaacugcgacguggugaucggcaucgugaacaacaccguguacgauccccugcagcccgagcuggacagcuucaaggaggagcuggacaaguacuucaagaaucacaccagccccgacguggaccugggcgacaucagcggcaucaacgccagcguggugaacauccagaaggagaucgaucggcugaacgagguggccaagaaccugaacgagagccugaucgaccugcaggagcugggcaaguacgagcaguacaucaaguggcccugguacaucuggcugggcuucaucgccggccugaucgccaucgugaucgugaccaucaugcugugcugcaugaccagcugcugcagcugccugaagggcuguugcagcugcggcagcugcugcaaguucgacgaggacgacagcgagcccgugcugaagggcgugaagcugcacuacaccugaugacucgagcugguacugcaugcacgcaaugcuagcugccccuuucccguccuggguaccccgagucucccccgaccucgggucccagguaugcucccaccuccaccugccccacucaccaccucugcuaguuccagacaccucccaagcacgcagcaaugcagcucaaaacgcuuagccuagccacacccccacgggaaacagcagugauuaaccuuuagcaauaaacgaaaguuuaacuaagcuauacuaaccccaggguuggucaauuucgugccagccacacccuggagcuagcaaaaaaaaaaaaaaaaaaaaaaaaaaaaaagcauaugacuaaaaaaaaaaaaaaaaaaaaaaaaaaaaaaaaaaaaaaaaaaaaaaaaaaaaaaaaaaaaaaaaaaaaaa

SEQ ID NO: 26757 - RNA, 4274 nt, Artificial Sequence
  SARS-CoV-2/Wuhan/WIV05/2019__EPI_ISL_402128 spike protein mRNA gc (1-1273)(H69del_V70del_Y144del_N501Y_A570D_D614G_P681H_T716I_S982 A_D1118H)
agaauaaacuaguauucuucugguccccacagacucagagagaacccgccaccauguucguguuccuggugcugcugccccuggugagcagccagugcgugaaccugaccacccggacccagcugccaccagccuacaccaacagcuucacccggggcgucuacuaccccgacaagguguuccggagcagcguccugcacagcacccaggaccuguuccugcccuucuucagcaacgugaccugguuccacgccaucagcggcaccaacggcaccaagcgguucgacaaccccgugcugcccuucaacgacggcguguacuucgccagcaccgagaagagcaacaucauccggggcuggaucuucggcaccacccuggacagcaagacccagagccugcugaucgugaauaacgccaccaacguggugaucaaggugugcgaguuccaguucugcaacgaccccuuccugggcguguaccacaagaacaacaagagcuggauggagagcgaguuccggguguacagcagcgccaacaacugcaccuucgaguacgugagccagcccuuccugauggaccuggagggcaagcagggcaacuucaagaaccugcgggaguucguguucaagaacaucgacggcuacuucaagaucuacagcaagcacaccccaaucaaccuggugcgggaucugccccagggcuucucagcccuggagccccugguggaccugcccaucggcaucaacaucacccgguuccagacccugcuggcccugcaccggagcuaccugaccccaggcgacagcagcagcggguggacagcaggcgcggcugcuuacuacgugggcuaccugcagccccggaccuuccugcugaaguacaacgagaacggcaccaucaccgacgccguggacugcgcccuggacccucugagcgagaccaagugcacccugaagagcuucaccguggagaagggcaucuaccagaccagcaacuuccgggugcagcccaccgagagcaucgugcgguuccccaacaucaccaaccugugccccuucggcgagguguucaacgccacccgguucgccagcguguacgccuggaaccggaagcggaucagcaacugcguggccgacuacagcgugcuguacaacagcgccagcuucagcaccuucaagugcuacggcgugagccccaccaagcugaacgaccugugcuucaccaacguguacgccgacagcuucgugauccguggcgacgaggugcggcagaucgcacccggccagacaggcaagaucgccgacuacaacuacaagcugcccgacgacuucaccggcugcgugaucgccuggaacagcaacaaccucgacagcaaggugggcggcaacuacaacuaccuguaccggcuguuccggaagagcaaccugaagcccuucgagcgggacaucagcaccgagaucuaccaagccggcuccaccccuugcaacggcguggagggcuucaacugcuacuucccucugcagagcuacggcuuccagcccaccuacggcgugggcuaccagcccuaccgggugguggugcugagcuucgagcugcugcacgccccagccaccguguguggccccaagaagagcaccaaccuggugaagaacaagugcgugaacuucaacuucaacggccuuaccggcaccggcgugcugaccgagagcaacaagaaauuccugcccuuucagcaguucggccgggacaucgacgacaccaccgacgcugugcgggauccccagacccuggagauccuggacaucaccccuugcagcuucggcggcgugagcgugaucaccccaggcaccaacaccagcaaccagguggccgugcuguaccagggcgugaacugcaccgaggugcccguggccauccacgccgaccagcugacacccaccuggcgggucuacagcaccggcagcaacguguuccagacccgggccgguugccugaucggcgccgagcacgugaacaacagcuacgagugcgacauccccaucggcgccggcaucugugccagcuaccagacccagaccaauucacaccggagggcaaggagcguggccagccagagcaucaucgccuacaccaugagccugggcgccgagaacagcguggccuacagcaacaacagcaucgccauccccaucaacuucaccaucagcgugaccaccgagauucugcccgugagcaugaccaagaccagcguggacugcaccauguacaucugcggcgacagcaccgagugcagcaaccugcugcugcaguacggcagcuucugcacccagcugaaccgggcccugaccggcaucgccguggagcaggacaagaacacccaggagguguucgcccaggugaagcagaucuacaagaccccucccaucaaggacuucggcggcuucaacuucagccagauccugcccgaccccagcaagcccagcaagcggagcuucaucgaggaccugcuguucaacaaggugacccuagccgacgccggcuucaucaagcaguacggcgacugccucggcgacauagccgcccgggaccugaucugcgcccagaaguucaacggccugaccgugcugccuccccugcugaccgacgagaugaucgcccaguacaccagcgcccuguuagccggaaccaucaccagcggcuggacuuucggcgcuggagccgcucugcagauccccuucgccaugcagauggccuaccgguucaacggcaucggcgugacccagaacgugcuguacgagaaccagaagcugaucgccaaccaguucaacagcgccaucggcaagauccaggacagccugagcagcaccgcuagcgcccugggcaagcugcaggacguggugaaccagaacgcccaggcccugaacacccuggugaagcagcugagcagcaacuucggcgccaucagcagcgugcugaacgacauccuggcccggcuggacaaggucgaggccgaggugcagaucgaccggcugaucacuggccggcugcagagccugcagaccuacgugacccagcagcugauccgggccgccgagauucgggccagcgccaaccuggccgccaccaagaugagcgagugcgugcugggccagagcaagcggguggacuucugcggcaagggcuaccaccugaugagcuuuccccagagcgcaccccacggagugguguuccugcacgugaccuacgugcccgcccaggagaagaacuucaccaccgccccagccaucugccacgacggcaaggcccacuuuccccgggagggcguguucgugagcaacggcacccacugguucgugacccagcggaacuucuacgagccccagaucaucaccacccacaacaccuucgugagcggcaacugcgacguggugaucggcaucgugaacaacaccguguacgauccccugcagcccgagcuggacagcuucaaggaggagcuggacaaguacuucaagaaucacaccagccccgacguggaccugggcgacaucagcggcaucaacgccagcguggugaacauccagaaggagaucgaucggcugaacgagguggccaagaaccugaacgagagccugaucgaccugcaggagcugggcaaguacgagcaguacaucaaguggcccugguacaucuggcugggcuucaucgccggccugaucgccaucgugauggugaccaucaugcugugcugcaugaccagcugcugcagcugccugaagggcuguugcagcugcggcagcugcugcaaguucgacgaggacgacagcgagcccgugcugaagggcgugaagcugcacuacaccugaugacucgagcugguacugcaugcacgcaaugcuagcugccccuuucccguccuggguaccccgagucucccccgaccucgggucccagguaugcucccaccuccaccugccccacucaccaccucugcuaguuccagacaccucccaagcacgcagcaaugcagcucaaaacgcuuagccuagccacacccccacgggaaacagcagugauuaaccuuuagcaauaaacgaaaguuuaacuaagcuauacuaaccccaggguuggucaauuucgugccagccacacccuggagcuagcaaaaaaaaaaaaaaaaaaaaaaaaaaaaaagcauaugacuaaaaaaaaaaaaaaaaaaaaaaaaaaaaaaaaaaaaaaaaaaaaaaaaaaaaaaaaaaaaaaaaaaaaaa

SEQ ID NO: 26758 - RNA, 4283 nt, Artificial Sequence
  SARS-CoV-2/Wuhan/WIV05/2019__EPI_ISL_402128 spike protein mRNA gc (1-1273)(K417N_E484K_N501Y_D614G)
agaauaaacuaguauucuucugguccccacagacucagagagaacccgccaccauguucguguuccuggugcugcugccccuggugagcagccagugcgugaaccugaccacccggacccagcugccaccagccuacaccaacagcuucacccggggcgucuacuaccccgacaagguguuccggagcagcguccugcacagcacccaggaccuguuccugcccuucuucagcaacgugaccugguuccacgccauccacgugagcggcaccaacggcaccaagcgguucgacaaccccgugcugcccuucaacgacggcguguacuucgccagcaccgagaagagcaacaucauccggggcuggaucuucggcaccacccuggacagcaagacccagagccugcugaucgugaauaacgccaccaacguggugaucaaggugugcgaguuccaguucugcaacgaccccuuccugggcguguacuaccacaagaacaacaagagcuggauggagagcgaguuccggguguacagcagcgccaacaacugcaccuucgaguacgugagccagcccuuccugauggaccuggagggcaagcagggcaacuucaagaaccugcgggaguucguguucaagaacaucgacggcuacuucaagaucuacagcaagcacaccccaaucaaccuggugcgggaucugccccagggcuucucagcccuggagccccugguggaccugcccaucggcaucaacaucacccgguuccagacccugcuggcccugcaccggagcuaccugaccccaggcgacagcagcagcggguggacagcaggcgcggcugcuuacuacgugggcuaccugcagccccggaccuuccugcugaaguacaacgagaacggcaccaucaccgacgccguggacugcgcccuggacccucugagcgagaccaagugcacccugaagagcuucaccguggagaagggcaucuaccagaccagcaacuuccgggugcagcccaccgagagcaucgugcgguuccccaacaucaccaaccugugccccuucggcgagguguucaacgccacccgguucgccagcguguacgccuggaaccggaagcggaucagcaacugcguggccgacuacagcgugcuguacaacagcgccagcuucagcaccuucaagugcuacggcgugagccccaccaagcugaacgaccugugcuucaccaacguguacgccgacagcuucgugauccguggcgacgaggugcggcagaucgcacccggccagacaggcaacaucgccgacuacaacuacaagcugcccgacgacuucaccggcugcgugaucgccuggaacagcaacaaccucgacagcaaggugggcggcaacuacaacuaccuguaccggcuguuccggaagagcaaccugaagcccuucgagcgggacaucagcaccgagaucuaccaagccggcuccaccccuugcaacggcgugaagggcuucaacugcuacuucccucugcagagcuacggcuuccagcccaccuacggcgugggcuaccagcccuaccgggugguggugcugagcuucgagcugcugcacgccccagccaccguguguggccccaagaagagcaccaaccuggugaagaacaagugcgugaacuucaacuucaacggccuuaccggcaccggcgugcugaccgagagcaacaagaaauuccugcccuuucagcaguucggccgggacaucgccgacaccaccgacgcugugcgggauccccagacccuggagauccuggacaucaccccuugcagcuucggcggcgugagcgugaucaccccaggcaccaacaccagcaaccagguggccgugcuguaccagggcgugaacugcaccgaggugcccguggccauccacgccgaccagcugacacccaccuggcgggucuacagcaccggcagcaacguguuccagacccgggccgguugccugaucggcgccgagcacgugaacaacagcuacgagugcgacauccccaucggcgccggcaucugugccagcuaccagacccagaccaauucaccccggagggcaaggagcguggccagccagagcaucaucgccuacaccaugagccugggcgccgagaacagcguggccuacagcaacaacagcaucgccauccccaccaacuucaccaucagcgugaccaccgagauucugcccgugagcaugaccaagaccagcguggacugcaccauguacaucugcggcgacagcaccgagugcagcaaccugcugcugcaguacggcagcuucugcacccagcugaaccgggcccugaccggcaucgccguggagcaggacaagaacacccaggagguguucgcccaggugaagcagaucuacaagaccccucccaucaaggacuucggcggcuucaacuucagccagauccugcccgaccccagcaagcccagcaagcggagcuucaucgaggaccugcuguucaacaaggugacccuagccgacgccggcuucaucaagcaguacggcgacugccucggcgacauagccgcccgggaccugaucugcgcccagaaguucaacggccugaccgugcugccuccccugcugaccgacgagaugaucgcccaguacaccagcgcccuguuagccggaaccaucaccagcggcuggacuuucggcgcuggagccgcucugcagauccccuucgccaugcagauggccuaccgguucaacggcaucggcgugacccagaacgugcuguacgagaaccagaagcugaucgccaaccaguucaacagcgccaucggcaagauccaggacagccugagcagcaccgcuagcgcccugggcaagcugcaggacguggugaaccagaacgcccaggcccugaacacccuggugaagcagcugagcagcaacuucggcgccaucagcagcgugcugaacgacauccugagccggcuggacaaggucgaggccgaggugcagaucgaccggcugaucacuggccggcugcagagccugcagaccuacgugacccagcagcugauccgggccgccgagauucgggccagcgccaaccuggccgccaccaagaugagcgagugcgugcugggccagagcaagcggguggacuucugcggcaagggcuaccaccugaugagcuuuccccagagcgcaccccacggagugguguuccugcacgugaccuacgugcccgcccaggagaagaacuucaccaccgccccagccaucugccacgacggcaaggcccacuuuccccgggagggcguguucgugagcaacggcacccacugguucgugacccagcggaacuucuacgagccccagaucaucaccaccgacaacaccuucgugagcggcaacugcgacguggugaucggcaucgugaacaacaccguguacgauccccugcagcccgagcuggacagcuucaaggaggagcuggacaaguacuucaagaaucacaccagccccgacguggaccugggcgacaucagcggcaucaacgccagcguggugaacauccagaaggagaucgaucggcugaacgagguggccaagaaccugaacgagagccugaucgaccugcaggagcugggcaaguacgagcaguacaucaaguggcccugguacaucuggcugggcuucaucgccggccugaucgccaucgugauggugaccaucaugcugugcugcaugaccagcugcugcagcugccugaagggcuguugcagcugcggcagcugcugcaaguucgacgaggacgacagcgagcccgugcugaagggcgugaagcugcacuacaccugaugacucgagcugguacugcaugcacgcaaugcuagcugccccuuucccguccuggguaccccgagucucccccgaccucgggucccagguaugcucccaccuccaccugccccacucaccaccucugcuaguuccagacaccucccaagcacgcagcaaugcagcucaaaacgcuuagccuagccacacccccacgggaaacagcagugauuaaccuuuagcaauaaacgaaaguuuaacuaagcuauacuaaccccaggguuggucaauuucgugccagccacacccuggagcuagcaaaaaaaaaaaaaaaaaaaaaaaaaaaaaagcauaugacuaaaaaaaaaaaaaaaaaaaaaaaaaaaaaaaaaaaaaaaaaaaaaaaaaaaaaaaaaaaaaaaaaaaaaa

SEQ ID NO: 26759 - RNA, 4274 nt, Artificial Sequence
  SARS-CoV-2/Wuhan/WIV05/2019__EPI_ISL_402128 spike protein mRNA gc (1-1273)(L18F_D80A_D215G_L242del_A243del_L244del_R246I_K417N_E484 K_N501Y_D614G_A701V)
agaauaaacuaguauucuucugguccccacagacucagagagaacccgccaccauguucguguuccuggugcugcugccccuggugagcagccagugcgugaacuucaccacccggacccagcugccaccagccuacaccaacagcuucacccggggcgucuacuaccccgacaagguguuccggagcagcguccugcacagcacccaggaccuguuccugcccuucuucagcaacgugaccugguuccacgccauccacgugagcggcaccaacggcaccaagcgguucgccaaccccgugcugcccuucaacgacggcguguacuucgccagcaccgagaagagcaacaucauccggggcuggaucuucggcaccacccuggacagcaagacccagagccugcugaucgugaauaacgccaccaacguggugaucaaggugugcgaguuccaguucugcaacgaccccuuccugggcguguacuaccacaagaacaacaagagcuggauggagagcgaguuccggguguacagcagcgccaacaacugcaccuucgaguacgugagccagcccuuccugauggaccuggagggcaagcagggcaacuucaagaaccugcgggaguucguguucaagaacaucgacggcuacuucaagaucuacagcaagcacaccccaaucaaccuggugcggggccugccccagggcuucucagcccuggagccccugguggaccugcccaucggcaucaacaucacccgguuccagacccugcacaucagcuaccugaccccaggcgacagcagcagcggguggacagcaggcgcggcugcuuacuacgugggcuaccugcagccccggaccuuccugcugaaguacaacgagaacggcaccaucaccgacgccguggacugcgcccuggacccucugagcgagaccaagugcacccugaagagcuucaccguggagaagggcaucuaccagaccagcaacuuccgggugcagcccaccgagagcaucgugcgguuccccaacaucaccaaccugugccccuucggcgagguguucaacgccacccgguucgccagcguguacgccuggaaccggaagcggaucagcaacugcguggccgacuacagcgugcuguacaacagcgccagcuucagcaccuucaagugcuacggcgugagccccaccaagcugaacgaccugugcuucaccaacguguacgccgacagcuucgugauccguggcgacgaggugcggcagaucgcacccggccagacaggcaacaucgccgacuacaacuacaagcugcccgacgacuucaccggcugcgugaucgccuggaacagcaacaaccucgacagcaaggugggcggcaacuacaacuaccuguaccggcuguuccggaagagcaaccugaagcccuucgagcgggacaucagcaccgagaucuaccaagccggcuccaccccuugcaacggcgugaagggcuucaacugcuacuucccucugcagagcuacggcuuccagcccaccuacggcgugggcuaccagcccuaccgggugguggugcugagcuucgagcugcugcacgccccagccaccguguguggccccaagaagagcaccaaccuggugaagaacaagugcgugaacuucaacuucaacggccuuaccggcaccggcgugcugaccgagagcaacaagaaauuccugcccuuucagcaguucggccgggacaucgccgacaccaccgacgcugugcgggauccccagacccuggagauccuggacaucaccccuugcagcuucggcggcgugagcgugaucaccccaggcaccaacaccagcaaccagguggccgugcuguaccagggcgugaacugcaccgaggugcccguggccauccacgccgaccagcugacacccaccuggcgggucuacagcaccggcagcaacguguuccagacccgggccgguugccugaucggcgccgagcacgugaacaacagcuacgagugcgacauccccaucggcgccggcaucugugccagcuaccagacccagaccaauucaccccggagggcaaggagcguggccagccagagcaucaucgccuacaccaugagccugggcguggagaacagcguggccuacagcaacaacagcaucgccauccccaccaacuucaccaucagcgugaccaccgagauucugcccgugagcaugaccaagaccagcguggacugcaccauguacaucugcggcgacagcaccgagugcagcaaccugcugcugcaguacggcagcuucugcacccagcugaaccgggcccugaccggcaucgccguggagcaggacaagaacacccaggagguguucgcccaggugaagcagaucuacaagaccccucccaucaaggacuucggcggcuucaacuucagccagauccugcccgaccccagcaagcccagcaagcggagcuucaucgaggaccugcuguucaacaaggugacccuagccgacgccggcuucaucaagcaguacggcgacugccucggcgacauagccgcccgggaccugaucugcgcccagaaguucaacggccugaccgugcugccuccccugcugaccgacgagaugaucgcccaguacaccagcgcccuguuagccggaaccaucaccagcggcuggacuuucggcgcuggagccgcucugcagauccccuucgccaugcagauggccuaccgguucaacggcaucggcgugacccagaacgugcuguacgagaaccagaagcugaucgccaaccaguucaacagcgccaucggcaagauccaggacagccugagcagcaccgcuagcgcccugggcaagcugcaggacguggugaaccagaacgcccaggcccugaacacccuggugaagcagcugagcagcaacuucggcgccaucagcagcgugcugaacgacauccugagccggcuggacaaggucgaggccgaggugcagaucgaccggcugaucacuggccggcugcagagccugcagaccuacgugacccagcagcugauccgggccgccgagauucgggccagcgccaaccuggccgccaccaagaugagcgagugcgugcugggccagagcaagcggguggacuucugcggcaagggcuaccaccugaugagcuuuccccagagcgcaccccacggagugguguuccugcacgugaccuacgugcccgcccaggagaagaacuucaccaccgccccagccaucugccacgacggcaaggcccacuuuccccgggagggcguguucgugagcaacggcacccacugguucgugacccagcggaacuucuacgagccccagaucaucaccaccgacaacaccuucgugagcggcaacugcgacguggugaucggcaucgugaacaacaccguguacgauccccugcagcccgagcuggacagcuucaaggaggagcuggacaaguacuucaagaaucacaccagccccgacguggaccugggcgacaucagcggcaucaacgccagcguggugaacauccagaaggagaucgaucggcugaacgagguggccaagaaccugaacgagagccugaucgaccugcaggagcugggcaaguacgagcaguacaucaaguggcccugguacaucuggcugggcuucaucgccggccugaucgccaucgugauggugaccaucaugcugugcugcaugaccagcugcugcagcugccugaagggcuguugcagcugcggcagcugcugcaaguucgacgaggacgacagcgagcccgugcugaagggcgugaagcugcacuacaccugaugacucgagcugguacugcaugcacgcaaugcuagcugccccuuucccguccuggguaccccgagucucccccgaccucgggucccagguaugcucccaccuccaccugccccacucaccaccucugcuaguuccagacaccucccaagcacgcagcaaugcagcucaaaacgcuuagccuagccacacccccacgggaaacagcagugauuaaccuuuagcaauaaacgaaaguuuaacuaagcuauacuaaccccaggguuggucaauuucgugccagccacacccuggagcuagcaaaaaaaaaaaaaaaaaaaaaaaaaaaaaagcauaugacuaaaaaaaaaaaaaaaaaaaaaaaaaaaaaaaaaaaaaaaaaaaaaaaaaaaaaaaaaaaaaaaaaaaaaa

SEQ ID NO: 26760 - RNA, 4283 nt, Artificial Sequence
  SARS-CoV-2/Wuhan/WIV05/2019__EPI_ISL_402128 spike protein mRNA gc (1-1273)(E484K_D614G)
agaauaaacuaguauucuucugguccccacagacucagagagaacccgccaccauguucguguuccuggugcugcugccccuggugagcagccagugcgugaaccugaccacccggacccagcugccaccagccuacaccaacagcuucacccggggcgucuacuaccccgacaagguguuccggagcagcguccugcacagcacccaggaccuguuccugcccuucuucagcaacgugaccugguuccacgccauccacgugagcggcaccaacggcaccaagcgguucgacaaccccgugcugcccuucaacgacggcguguacuucgccagcaccgagaagagcaacaucauccggggcuggaucuucggcaccacccuggacagcaagacccagagccugcugaucgugaauaacgccaccaacguggugaucaaggugugcgaguuccaguucugcaacgaccccuuccugggcguguacuaccacaagaacaacaagagcuggauggagagcgaguuccggguguacagcagcgccaacaacugcaccuucgaguacgugagccagcccuuccugauggaccuggagggcaagcagggcaacuucaagaaccugcgggaguucguguucaagaacaucgacggcuacuucaagaucuacagcaagcacaccccaaucaaccuggugcgggaucugccccagggcuucucagcccuggagccccugguggaccugcccaucggcaucaacaucacccgguuccagacccugcuggcccugcaccggagcuaccugaccccaggcgacagcagcagcggguggacagcaggcgcggcugcuuacuacgugggcuaccugcagccccggaccuuccugcugaaguacaacgagaacggcaccaucaccgacgccguggacugcgcccuggacccucugagcgagaccaagugcacccugaagagcuucaccguggagaagggcaucuaccagaccagcaacuuccgggugcagcccaccgagagcaucgugcgguuccccaacaucaccaaccugugccccuucggcgagguguucaacgccacccgguucgccagcguguacgccuggaaccggaagcggaucagcaacugcguggccgacuacagcgugcuguacaacagcgccagcuucagcaccuucaagugcuacggcgugagccccaccaagcugaacgaccugugcuucaccaacguguacgccgacagcuucgugauccguggcgacgaggugcggcagaucgcacccggccagacaggcaagaucgccgacuacaacuacaagcugcccgacgacuucaccggcugcgugaucgccuggaacagcaacaaccucgacagcaaggugggcggcaacuacaacuaccuguaccggcuguuccggaagagcaaccugaagcccuucgagcgggacaucagcaccgagaucuaccaagccggcuccaccccuugcaacggcgugaagggcuucaacugcuacuucccucugcagagcuacggcuuccagcccaccaacggcgugggcuaccagcccuaccgggugguggugcugagcuucgagcugcugcacgccccagccaccguguguggccccaagaagagcaccaaccuggugaagaacaagugcgugaacuucaacuucaacggccuuaccggcaccggcgugcugaccgagagcaacaagaaauuccugcccuuucagcaguucggccgggacaucgccgacaccaccgacgcugugcgggauccccagacccuggagauccuggacaucaccccuugcagcuucggcggcgugagcgugaucaccccaggcaccaacaccagcaaccagguggccgugcuguaccagggcgugaacugcaccgaggugcccguggccauccacgccgaccagcugacacccaccuggcgggucuacagcaccggcagcaacguguuccagacccgggccgguugccugaucggcgccgagcacgugaacaacagcuacgagugcgacauccccaucggcgccggcaucugugccagcuaccagacccagaccaauucaccccggagggcaaggagcguggccagccagagcaucaucgccuacaccaugagccugggcgccgagaacagcguggccuacagcaacaacagcaucgccauccccaccaacuucaccaucagcgugaccaccgagauucugcccgugagcaugaccaagaccagcguggacugcaccauguacaucugcggcgacagcaccgagugcagcaaccugcugcugcaguacggcagcuucugcacccagcugaaccgggcccugaccggcaucgccguggagcaggacaagaacacccaggagguguucgcccaggugaagcagaucuacaagaccccucccaucaaggacuucggcggcuucaacuucagccagauccugcccgaccccagcaagcccagcaagcggagcuucaucgaggaccugcuguucaacaaggugacccuagccgacgccggcuucaucaagcaguacggcgacugccucggcgacauagccgcccgggaccugaucugcgcccagaaguucaacggccugaccgugcugccuccccugcugaccgacgagaugaucgcccaguacaccagcgcccuguuagccggaaccaucaccagcggcuggacuuucggcgcuggagccgcucugcagauccccuucgccaugcagauggccuaccgguucaacggcaucggcgugacccagaacgugcuguacgagaaccagaagcugaucgccaaccaguucaacagcgccaucggcaagauccaggacagccugagcagcaccgcuagcgcccugggcaagcugcaggacguggugaaccagaacgcccaggcccugaacacccuggugaagcagcugagcagcaacuucggcgccaucagcagcgugcugaacgacauccugagccggcuggacaaggucgaggccgaggugcagaucgaccggcugaucacuggccggcugcagagccugcagaccuacgugacccagcagcugauccgggccgccgagauucgggccagcgccaaccuggccgccaccaagaugagcgagugcgugcugggccagagcaagcggguggacuucugcggcaagggcuaccaccugaugagcuuuccccagagcgcaccccacggagugguguuccugcacgugaccuacgugcccgcccaggagaagaacuucaccaccgccccagccaucugccacgacggcaaggcccacuuuccccgggagggcguguucgugagcaacggcacccacugguucgugacccagcggaacuucuacgagccccagaucaucaccaccgacaacaccuucgugagcggcaacugcgacguggugaucggcaucgugaacaacaccguguacgauccccugcagcccgagcuggacagcuucaaggaggagcuggacaaguacuucaagaaucacaccagccccgacguggaccugggcgacaucagcggcaucaacgccagcguggugaacauccagaaggagaucgaucggcugaacgagguggccaagaaccugaacgagagccugaucgaccugcaggagcugggcaaguacgagcaguacaucaaguggcccugguacaucuggcugggcuucaucgccggccugaucgccaucgugauggugaccaucaugcugugcugcaugaccagcugcugcagcugccugaagggcuguugcagcugcggcagcugcugcaaguucgacgaggacgacagcgagcccgugcugaagggcgugaagcugcacuacaccugaugacucgagcugguacugcaugcacgcaaugcuagcugccccuuucccguccuggguaccccgagucucccccgaccucgggucccagguaugcucccaccuccaccugccccacucaccaccucugcuaguuccagacaccucccaagcacgcagcaaugcagcucaaaacgcuuagccuagccacacccccacgggaaacagcagugauuaaccuuuagcaauaaacgaaaguuuaacuaagcuauacuaaccccaggguuggucaauuucgugccagccacacccuggagcuagcaaaaaaaaaaaaaaaaaaaaaaaaaaaaaagcauaugacuaaaaaaaaaaaaaaaaaaaaaaaaaaaaaaaaaaaaaaaaaaaaaaaaaaaaaaaaaaaaaaaaaaaaaa

SEQ ID NO: 26761 - RNA, 4283 nt, Artificial Sequence
  SARS-CoV-2/Wuhan/WIV05/2019__EPI_ISL_402128 spike protein mRNA gc (1-1273)(L18F_T20N_P26S_D138Y_R190S_K417T_E484K_N501Y_D614G_H655Y _T1027I)
agaauaaacuaguauucuucugguccccacagacucagagagaacccgccaccauguucguguuccuggugcugcugccccuggugagcagccagugcgugaacuucaccaaccggacccagcugccaagcgccuacaccaacagcuucacccggggcgucuacuaccccgacaagguguuccggagcagcguccugcacagcacccaggaccuguuccugcccuucuucagcaacgugaccugguuccacgccauccacgugagcggcaccaacggcaccaagcgguucgacaaccccgugcugcccuucaacgacggcguguacuucgccagcaccgagaagagcaacaucauccggggcuggaucuucggcaccacccuggacagcaagacccagagccugcugaucgugaauaacgccaccaacguggugaucaaggugugcgaguuccaguucugcaacuaccccuuccugggcguguacuaccacaagaacaacaagagcuggauggagagcgaguuccggguguacagcagcgccaacaacugcaccuucgaguacgugagccagcccuuccugauggaccuggagggcaagcagggcaacuucaagaaccugagcgaguucguguucaagaacaucgacggcuacuucaagaucuacagcaagcacaccccaaucaaccuggugcgggaucugccccagggcuucucagcccuggagccccugguggaccugcccaucggcaucaacaucacccgguuccagacccugcuggcccugcaccggagcuaccugaccccaggcgacagcagcagcggguggacagcaggcgcggcugcuuacuacgugggcuaccugcagccccggaccuuccugcugaaguacaacgagaacggcaccaucaccgacgccguggacugcgcccuggacccucugagcgagaccaagugcacccugaagagcuucaccguggagaagggcaucuaccagaccagcaacuuccgggugcagcccaccgagagcaucgugcgguuccccaacaucaccaaccugugccccuucggcgagguguucaacgccacccgguucgccagcguguacgccuggaaccggaagcggaucagcaacugcguggccgacuacagcgugcuguacaacagcgccagcuucagcaccuucaagugcuacggcgugagccccaccaagcugaacgaccugugcuucaccaacguguacgccgacagcuucgugauccguggcgacgaggugcggcagaucgcacccggccagacaggcaccaucgccgacuacaacuacaagcugcccgacgacuucaccggcugcgugaucgccuggaacagcaacaaccucgacagcaaggugggcggcaacuacaacuaccuguaccggcuguuccggaagagcaaccugaagcccuucgagcgggacaucagcaccgagaucuaccaagccggcuccaccccuugcaacggcgugaagggcuucaacugcuacuucccucugcagagcuacggcuuccagcccaccuacggcgugggcuaccagcccuaccgggugguggugcugagcuucgagcugcugcacgccccagccaccguguguggccccaagaagagcaccaaccuggugaagaacaagugcgugaacuucaacuucaacggccuuaccggcaccggcgugcugaccgagagcaacaagaaauuccugcccuuucagcaguucggccgggacaucgccgacaccaccgacgcugugcgggauccccagacccuggagauccuggacaucaccccuugcagcuucggcggcgugagcgugaucaccccaggcaccaacaccagcaaccagguggccgugcuguaccagggcgugaacugcaccgaggugcccguggccauccacgccgaccagcugacacccaccuggcgggucuacagcaccggcagcaacguguuccagacccgggccgguugccugaucggcgccgaguacgugaacaacagcuacgagugcgacauccccaucggcgccggcaucugugccagcuaccagacccagaccaauucaccccggagggcaaggagcguggccagccagagcaucaucgccuacaccaugagccugggcgccgagaacagcguggccuacagcaacaacagcaucgccauccccaccaacuucaccaucagcgugaccaccgagauucugcccgugagcaugaccaagaccagcguggacugcaccauguacaucugcggcgacagcaccgagugcagcaaccugcugcugcaguacggcagcuucugcacccagcugaaccgggcccugaccggcaucgccguggagcaggacaagaacacccaggagguguucgcccaggugaagcagaucuacaagaccccucccaucaaggacuucggcggcuucaacuucagccagauccugcccgaccccagcaagcccagcaagcggagcuucaucgaggaccugcuguucaacaaggugacccuagccgacgccggcuucaucaagcaguacggcgacugccucggcgacauagccgcccgggaccugaucugcgcccagaaguucaacggccugaccgugcugccuccccugcugaccgacgagaugaucgcccaguacaccagcgcccuguuagccggaaccaucaccagcggcuggacuuucggcgcuggagccgcucugcagauccccuucgccaugcagauggccuaccgguucaacggcaucggcgugacccagaacgugcuguacgagaaccagaagcugaucgccaaccaguucaacagcgccaucggcaagauccaggacagccugagcagcaccgcuagcgcccugggcaagcugcaggacguggugaaccagaacgcccaggcccugaacacccuggugaagcagcugagcagcaacuucggcgccaucagcagcgugcugaacgacauccugagccggcuggacaaggucgaggccgaggugcagaucgaccggcugaucacuggccggcugcagagccugcagaccuacgugacccagcagcugauccgggccgccgagauucgggccagcgccaaccuggccgccaucaagaugagcgagugcgugcugggccagagcaagcggguggacuucugcggcaagggcuaccaccugaugagcuuuccccagagcgcaccccacggagugguguuccugcacgugaccuacgugcccgcccaggagaagaacuucaccaccgccccagccaucugccacgacggcaaggcccacuuuccccgggagggcguguucgugagcaacggcacccacugguucgugacccagcggaacuucuacgagccccagaucaucaccaccgacaacaccuucgugagcggcaacugcgacguggugaucggcaucgugaacaacaccguguacgauccccugcagcccgagcuggacagcuucaaggaggagcuggacaaguacuucaagaaucacaccagccccgacguggaccugggcgacaucagcggcaucaacgccagcguggugaacauccagaaggagaucgaucggcugaacgagguggccaagaaccugaacgagagccugaucgaccugcaggagcugggcaaguacgagcaguacaucaaguggcccugguacaucuggcugggcuucaucgccggccugaucgccaucgugauggugaccaucaugcugugcugcaugaccagcugcugcagcugccugaagggcuguugcagcugcggcagcugcugcaaguucgacgaggacgacagcgagcccgugcugaagggcgugaagcugcacuacaccugaugacucgagcugguacugcaugcacgcaaugcuagcugccccuuucccguccuggguaccccgagucucccccgaccucgggucccagguaugcucccaccuccaccugccccacucaccaccucugcuaguuccagacaccucccaagcacgcagcaaugcagcucaaaacgcuuagccuagccacacccccacgggaaacagcagugauuaaccuuuagcaauaaacgaaaguuuaacuaagcuauacuaaccccaggguuggucaauuucgugccagccacacccuggagcuagcaaaaaaaaaaaaaaaaaaaaaaaaaaaaaagcauaugacuaaaaaaaaaaaaaaaaaaaaaaaaaaaaaaaaaaaaaaaaaaaaaaaaaaaaaaaaaaaaaaaaaaaaaa

SEQ ID NO: 26762 - RNA, 4283 nt, Artificial Sequence
  SARS-CoV-2/Wuhan/WIV05/2019__EPI_ISL_402128 spike protein mRNA gc (1-1273)(S13I_W152C_L452R_D614G)
agaauaaacuaguauucuucugguccccacagacucagagagaacccgccaccauguucguguuccuggugcugcugccccuggugagcauccagugcgugaaccugaccacccggacccagcugccaccagccuacaccaacagcuucacccggggcgucuacuaccccgacaagguguuccggagcagcguccugcacagcacccaggaccuguuccugcccuucuucagcaacgugaccugguuccacgccauccacgugagcggcaccaacggcaccaagcgguucgacaaccccgugcugcccuucaacgacggcguguacuucgccagcaccgagaagagcaacaucauccggggcuggaucuucggcaccacccuggacagcaagacccagagccugcugaucgugaauaacgccaccaacguggugaucaaggugugcgaguuccaguucugcaacgaccccuuccugggcguguacuaccacaagaacaacaagagcugcauggagagcgaguuccggguguacagcagcgccaacaacugcaccuucgaguacgugagccagcccuuccugauggaccuggagggcaagcagggcaacuucaagaaccugcgggaguucguguucaagaacaucgacggcuacuucaagaucuacagcaagcacaccccaaucaaccuggugcgggaucugccccagggcuucucagcccuggagccccugguggaccugcccaucggcaucaacaucacccgguuccagacccugcuggcccugcaccggagcuaccugaccccaggcgacagcagcagcggguggacagcaggcgcggcugcuuacuacgugggcuaccugcagccccggaccuuccugcugaaguacaacgagaacggcaccaucaccgacgccguggacugcgcccuggacccucugagcgagaccaagugcacccugaagagcuucaccguggagaagggcaucuaccagaccagcaacuuccgggugcagcccaccgagagcaucgugcgguuccccaacaucaccaaccugugccccuucggcgagguguucaacgccacccgguucgccagcguguacgccuggaaccggaagcggaucagcaacugcguggccgacuacagcgugcuguacaacagcgccagcuucagcaccuucaagugcuacggcgugagccccaccaagcugaacgaccugugcuucaccaacguguacgccgacagcuucgugauccguggcgacgaggugcggcagaucgcacccggccagacaggcaagaucgccgacuacaacuacaagcugcccgacgacuucaccggcugcgugaucgccuggaacagcaacaaccucgacagcaaggugggcggcaacuacaacuaccgcuaccggcuguuccggaagagcaaccugaagcccuucgagcgggacaucagcaccgagaucuaccaagccggcuccaccccuugcaacggcguggagggcuucaacugcuacuucccucugcagagcuacggcuuccagcccaccaacggcgugggcuaccagcccuaccgggugguggugcugagcuucgagcugcugcacgccccagccaccguguguggccccaagaagagcaccaaccuggugaagaacaagugcgugaacuucaacuucaacggccuuaccggcaccggcgugcugaccgagagcaacaagaaauuccugcccuuucagcaguucggccgggacaucgccgacaccaccgacgcugugcgggauccccagacccuggagauccuggacaucaccccuugcagcuucggcggcgugagcgugaucaccccaggcaccaacaccagcaaccagguggccgugcuguaccagggcgugaacugcaccgaggugcccguggccauccacgccgaccagcugacacccaccuggcgggucuacagcaccggcagcaacguguuccagacccgggccgguugccugaucggcgccgagcacgugaacaacagcuacgagugcgacauccccaucggcgccggcaucugugccagcuaccagacccagaccaauucaccccggagggcaaggagcguggccagccagagcaucaucgccuacaccaugagccugggcgccgagaacagcguggccuacagcaacaacagcaucgccauccccaccaacuucaccaucagcgugaccaccgagauucugcccgugagcaugaccaagaccagcguggacugcaccauguacaucugcggcgacagcaccgagugcagcaaccugcugcugcaguacggcagcuucugcacccagcugaaccgggcccugaccggcaucgccguggagcaggacaagaacacccaggagguguucgcccaggugaagcagaucuacaagaccccucccaucaaggacuucggcggcuucaacuucagccagauccugcccgaccccagcaagcccagcaagcggagcuucaucgaggaccugcuguucaacaaggugacccuagccgacgccggcuucaucaagcaguacggcgacugccucggcgacauagccgcccgggaccugaucugcgcccagaaguucaacggccugaccgugcugccuccccugcugaccgacgagaugaucgcccaguacaccagcgcccuguuagccggaaccaucaccagcggcuggacuuucggcgcuggagccgcucugcagauccccuucgccaugcagauggccuaccgguucaacggcaucggcgugacccagaacgugcuguacgagaaccagaagcugaucgccaaccaguucaacagcgccaucggcaagauccaggacagccugagcagcaccgcuagcgcccugggcaagcugcaggacguggugaaccagaacgcccaggcccugaacacccuggugaagcagcugagcagcaacuucggcgccaucagcagcgugcugaacgacauccugagccggcuggacaaggucgaggccgaggugcagaucgaccggcugaucacuggccggcugcagagccugcagaccuacgugacccagcagcugauccgggccgccgagauucgggccagcgccaaccuggccgccaccaagaugagcgagugcgugcugggccagagcaagcggguggacuucugcggcaagggcuaccaccugaugagcuuuccccagagcgcaccccacggagugguguuccugcacgugaccuacgugcccgcccaggagaagaacuucaccaccgccccagccaucugccacgacggcaaggcccacuuuccccgggagggcguguucgugagcaacggcacccacugguucgugacccagcggaacuucuacgagccccagaucaucaccaccgacaacaccuucgugagcggcaacugcgacguggugaucggcaucgugaacaacaccguguacgauccccugcagcccgagcuggacagcuucaaggaggagcuggacaaguacuucaagaaucacaccagccccgacguggaccugggcgacaucagcggcaucaacgccagcguggugaacauccagaaggagaucgaucggcugaacgagguggccaagaaccugaacgagagccugaucgaccugcaggagcugggcaaguacgagcaguacaucaaguggcccugguacaucuggcugggcuucaucgccggccugaucgccaucgugauggugaccaucaugcugugcugcaugaccagcugcugcagcugccugaagggcuguugcagcugcggcagcugcugcaaguucgacgaggacgacagcgagcccgugcugaagggcgugaagcugcacuacaccugaugacucgagcugguacugcaugcacgcaaugcuagcugccccuuucccguccuggguaccccgagucucccccgaccucgggucccagguaugcucccaccuccaccugccccacucaccaccucugcuaguuccagacaccucccaagcacgcagcaaugcagcucaaaacgcuuagccuagccacacccccacgggaaacagcagugauuaaccuuuagcaauaaacgaaaguuuaacuaagcuauacuaaccccaggguuggucaauuucgugccagccacacccuggagcuagcaaaaaaaaaaaaaaaaaaaaaaaaaaaaaagcauaugacuaaaaaaaaaaaaaaaaaaaaaaaaaaaaaaaaaaaaaaaaaaaaaaaaaaaaaaaaaaaaaaaaaaaaaa

SEQ ID NO: 26763 - RNA, 4283 nt, Artificial Sequence
  SARS-CoV-2/Wuhan/WIV05/2019__EPI_ISL_402128 spike protein mRNA gc (1-1273)
agaauaaacuaguauucuucugguccccacagacucagagagaacccgccaccauguucguguuccuggugcugcugccccuggugagcagccagugcgugaaccugaccacccggacccagcugcccccugccuacaccaacagcuucacccggggcguguacuaccccgacaagguguuccggagcagcgugcugcacagcacccaggaccuguuccugcccuucuucagcaacgugaccugguuccacgccauccacgugagcggcaccaacggcaccaagcgguucgacaacccagugcugcccuucaacgacggcguguacuucgccagcaccgagaagucaaacaucauccggggcuggaucuucggcaccacccuggacagcaagacacagagccugcugaucgugaacaacgccaccaacguggugaucaaggugugcgaguuucaguucugcaacgaccccuuccugggcguguacuaccacaagaacaacaagagcuggauggagagcgaguuccgggucuacagcagcgcuaacaauugcaccuucgaguacgugagccagcccuuccugauggaccucgagggcaagcagggcaacuucaagaaccugcgggaguucguguucaagaacaucgauggcuacuucaagaucuacagcaagcacacccccaucaaccuggugcgggaccugccccagggauucagcgcccuggagccucugguggaccugcccaucggcaucaacaucaccagguuccagacccugcuggcccugcaccggagcuaccugacccccggcgacagcagcagcggcuggaccgccggcgccgccgcauacuacgugggcuaccugcagccacggaccuuccugcugaaguacaacgagaacggcaccaucaccgacgccguggacugcgcccuggacccccugagcgagaccaagugcacccuaaagagcuucaccguggagaagggcaucuaccagaccagcaacuuccgggugcagcccacugagagcaucgugcgguuccccaacauuaccaaccugugucccuucggcgagguguucaacgccacccgguucgccagcguguacgccuggaaccggaagcggaucagcaacugcguggccgacuacagcgugcuguacaacagcgccagcuucagcaccuucaagugcuacggcgugagcccuaccaagcugaacgaccugugcuucaccaacguguacgcugacagcuucgugauccggggcgacgaggugcggcagaucgcccccggccagaccggcaagaucgccgacuacaacuacaagcugcccgacgacuucaccggcugcgugaucgccuggaacagcaacaaccuggacagcaaggugggcggcaacuacaacuaccuguaccggcuguuccguaagagcaaccugaagccauucgagcgggacaucagcaccgagaucuaccaggccggcagcacccccugcaacgguguggagggcuuuaacugcuacuucccccugcagagcuacggcuuccagcccaccaacggcgugggcuaccagcccuaccgggugguggugcugagcuucgagcugcugcacgcccccgccaccgugugcggcccuaaaaagagcaccaaccuggugaagaacaagugcgugaacuucaauuucaacggccugaccggcaccggcgugcugaccgagagcaacaagaaguuccugcccuuccagcaguucggccgggauaucgccgacaccaccgacgcagugcgggacccccagacccuggagauccuggacaucaccccaugcagcuucggcggcgugagcgucaucacccccggcacaaacaccagcaaccagguggccgugcuguaccaggacgugaacugcaccgaggugcccguggccauccacgccgaccagcugacccccaccuggcggguguacagcaccggaagcaacguguuccagacccgggccggcugccugaucggcgccgagcacgugaacaacuccuacgagugcgacauccccaucggcgcuggcaucugcgccagcuaccagacccagaccaacagcccccggcgggcccggagcguggccagccagagcaucaucgccuacaccaugagcuuaggcgccgagaacagcguggccuacagcaacaacagcaucgcgaucccuaccaacuucaccaucagcgugaccaccgagauacugcccgugagcaugaccaagaccagcguggacuguaccauguacaucugcggcgacagcaccgagugcagcaaccugcugcugcaguacggcagcuucugcacccagcugaaccgggcccugaccggcaucgccguggagcaggacaagaacacccaagagguguucgcccaggugaagcagaucuacaagacucccccaaucaaggacuucggcggcuucaacuucagccagauccugcccgaccccagcaagcccagcaagcggagcuucaucgaggaccugcuguucaacaaggugacccuggccgacgccggcuucaucaagcaguacggcgauugccugggcgacaucgccgcucgggaccugaucugcgcccagaaguucaacgggcugaccgugcugcccccucugcugaccgacgagaugaucgcccaguacaccagcgcccugcuugccggcaccaucaccagcggcuggaccuucggcgccggcgcagcccugcagauccccuucgccaugcagauggccuaccgguucaacggcaucggcgugacccagaacgugcuguacgagaaccagaagcugaucgccaaccaguucaacagcgccaucggcaagauccaggacagccugagcagcaccgccagcgcccugggcaagcugcaggacguggugaaccagaacgcucaggcccugaacacccuggugaagcagcugagcagcaacuucggcgccaucagcucagugcugaaugacauccugagcaggcuggacaagguggaggccgaggugcagaucgaccggcugaucaccggccggcugcagagccugcagaccuacgugacccagcagcugauccgggccgccgagauccgggccagcgccaaccuggcagccaccaagaugagcgagugcgugcugggccagagcaagcggguggacuuuugcggcaagggcuaccaccugaugagcuucccccagagcgccccacacggcgugguguuccuccacgucacauacgugcccgcccaggagaagaacuucaccaccgcccccgccauuugccacgacggcaaggcucacuucccccgggagggcguguucgugagcaacggaacccacugguucgugacccagcggaacuucuacgagccccagaucaucaccaccgacaacaccuucgugagcggcaacugcgacguggugaucggcaucgugaacaacaccguguacgacccccugcagccugagcuggacagcuucaaggaggagcuggacaaguacuucaagaaccacaccagccccgauguggaccugggcgacaucagcggcaucaacgccagcguggugaacauccagaaggagaucgaccggcugaacgagguggccaagaaccugaacgagagccugaucgaccugcaggagcugggcaaguacgagcaguacaucaaguggcccugguacaucuggcugggcuucaucgccggccugaucgccaucgugauggugaccaucaugcugugcugcaugaccagcugcuguagcugccugaagggcugcugcagcugcggcagcugcugcaaguucgacgaggacgacagcgagccagugcugaagggcgugaagcugcacuacaccugaugacucgagcugguacugcaugcacgcaaugcuagcugccccuuucccguccuggguaccccgagucucccccgaccucgggucccagguaugcucccaccuccaccugccccacucaccaccucugcuaguuccagacaccucccaagcacgcagcaaugcagcucaaaacgcuuagccuagccacacccccacgggaaacagcagugauuaaccuuuagcaauaaacgaaaguuuaacuaagcuauacuaaccccaggguuggucaauuucgugccagccacacccuggagcuagcaaaaaaaaaaaaaaaaaaaaaaaaaaaaaagcauaugacuaaaaaaaaaaaaaaaaaaaaaaaaaaaaaaaaaaaaaaaaaaaaaaaaaaaaaaaaaaaaaaaaaaaaaa

SEQ ID NO: 26764 - RNA, 4283 nt, Artificial Sequence
  SARS-CoV-2/Wuhan/WIV05/2019__EPI_ISL_402128 spike protein mRNA gc (1-1273)(D614G)
agaauaaacuaguauucuucugguccccacagacucagagagaacccgccaccauguucguguuccuggugcugcugccccuggugagcagccagugcgugaaccugaccacccggacccagcugcccccugccuacaccaacagcuucacccggggcguguacuaccccgacaagguguuccggagcagcgugcugcacagcacccaggaccuguuccugcccuucuucagcaacgugaccugguuccacgccauccacgugagcggcaccaacggcaccaagcgguucgacaacccagugcugcccuucaacgacggcguguacuucgccagcaccgagaagucaaacaucauccggggcuggaucuucggcaccacccuggacagcaagacacagagccugcugaucgugaacaacgccaccaacguggugaucaaggugugcgaguuucaguucugcaacgaccccuuccugggcguguacuaccacaagaacaacaagagcuggauggagagcgaguuccgggucuacagcagcgcuaacaauugcaccuucgaguacgugagccagcccuuccugauggaccucgagggcaagcagggcaacuucaagaaccugcgggaguucguguucaagaacaucgauggcuacuucaagaucuacagcaagcacacccccaucaaccuggugcgggaccugccccagggauucagcgcccuggagccucugguggaccugcccaucggcaucaacaucaccagguuccagacccugcuggcccugcaccggagcuaccugacccccggcgacagcagcagcggcuggaccgccggcgccgccgcauacuacgugggcuaccugcagccacggaccuuccugcugaaguacaacgagaacggcaccaucaccgacgccguggacugcgcccuggacccccugagcgagaccaagugcacccuaaagagcuucaccguggagaagggcaucuaccagaccagcaacuuccgggugcagcccacugagagcaucgugcgguuccccaacauuaccaaccugugucccuucggcgagguguucaacgccacccgguucgccagcguguacgccuggaaccggaagcggaucagcaacugcguggccgacuacagcgugcuguacaacagcgccagcuucagcaccuucaagugcuacggcgugagcccuaccaagcugaacgaccugugcuucaccaacguguacgcugacagcuucgugauccggggcgacgaggugcggcagaucgcccccggccagaccggcaagaucgccgacuacaacuacaagcugcccgacgacuucaccggcugcgugaucgccuggaacagcaacaaccuggacagcaaggugggcggcaacuacaacuaccuguaccggcuguuccguaagagcaaccugaagccauucgagcgggacaucagcaccgagaucuaccaggccggcagcacccccugcaacgguguggagggcuuuaacugcuacuucccccugcagagcuacggcuuccagcccaccaacggcgugggcuaccagcccuaccgggugguggugcugagcuucgagcugcugcacgcccccgccaccgugugcggcccuaaaaagagcaccaaccuggugaagaacaagugcgugaacuucaauuucaacggccugaccggcaccggcgugcugaccgagagcaacaagaaguuccugcccuuccagcaguucggccgggauaucgccgacaccaccgacgcagugcgggacccccagacccuggagauccuggacaucaccccaugcagcuucggcggcgugagcgucaucacccccggcacaaacaccagcaaccagguggccgugcuguaccagggagugaacugcaccgaggugcccguggccauccacgccgaccagcugacccccaccuggcggguguacagcaccggcagcaacguguuccagacccgggccggcugccugaucggcgccgagcacgugaacaacuccuacgagugcgacauccccaucggcgcuggcaucugcgccagcuaccagacccagaccaacagcccccggcgggcccggagcguggccagccagagcaucaucgccuacaccaugagcuuaggcgccgagaacagcguggccuacagcaacaacagcaucgcgaucccuaccaacuucaccaucagcgugaccaccgagauacugcccgugagcaugaccaagaccagcguggacuguaccauguacaucugcggcgacagcaccgagugcagcaaccugcugcugcaguacggcagcuucugcacccagcugaaccgggcccugaccggcaucgccguggagcaggacaagaacacccaagagguguucgcccaggugaagcagaucuacaagacucccccaaucaaggacuucggcggcuucaacuucagccagauccugcccgaccccagcaagcccagcaagcggagcuucaucgaggaccugcuguucaacaaggugacccuggccgacgccggcuucaucaagcaguacggcgacugccugggggauaucgccgcucgggaccugaucugcgcccagaaguucaacggccugaccgugcugcccccucugcugaccgacgagaugaucgcccaguacaccagcgcccugcuugccggcaccaucaccagcggcuggaccuucggcgccggcgcagcccugcagauccccuucgccaugcagauggccuaccgguucaacggcaucggcgugacccagaacgugcuguacgagaaccagaagcugaucgccaaccaguucaacagcgccaucggcaagauccaggacagccugagcagcaccgccagcgcccugggcaagcugcaggacguggugaaccagaacgcucaggcccugaacacccuggugaagcagcugagcagcaacuucggcgccaucagcucagugcugaaugacauccugagcaggcuggacaagguggaggccgaggugcagaucgaccggcugaucaccggccggcugcagagccugcagaccuacgugacccagcagcugauccgggccgccgagauccgggccagcgccaaccuggcagccaccaagaugagcgagugcgugcugggccagagcaagcggguggacuuuugcggcaagggcuaccaccugaugagcuucccccagagcgccccacacggcgugguguuccuccacgucacauacgugcccgcccaggagaagaacuucaccaccgcccccgccauuugccacgacggcaaggcucacuucccccgggagggaguguucgugagcaacggcacccacugguucgugacccagcggaacuucuacgagccccagaucaucaccaccgacaacaccuucgugagcggcaacugcgacguggugaucggcaucgugaacaacaccguguacgacccccugcagccugagcuggacagcuucaaggaggagcuggacaaguacuucaagaaccacaccagccccgacguggaucugggcgacaucagcggcaucaacgccagcguggugaacauccagaaggagaucgaccggcugaacgagguggccaagaaccugaacgagagccugaucgaccugcaggagcugggcaaguacgagcaguacaucaaguggcccugguacaucuggcugggcuucaucgccggccugaucgccaucgugauggugaccaucaugcugugcugcaugaccagcugcuguagcugccugaagggcugcugcagcugcggcagcugcugcaaguucgacgaggacgacagcgagccagugcugaagggcgugaagcugcacuacaccugaugacucgagcugguacugcaugcacgcaaugcuagcugccccuuucccguccuggguaccccgagucucccccgaccucgggucccagguaugcucccaccuccaccugccccacucaccaccucugcuaguuccagacaccucccaagcacgcagcaaugcagcucaaaacgcuuagccuagccacacccccacgggaaacagcagugauuaaccuuuagcaauaaacgaaaguuuaacuaagcuauacuaaccccaggguuggucaauuucgugccagccacacccuggagcuagcaaaaaaaaaaaaaaaaaaaaaaaaaaaaaagcauaugacuaaaaaaaaaaaaaaaaaaaaaaaaaaaaaaaaaaaaaaaaaaaaaaaaaaaaaaaaaaaaaaaaaaaaaa

SEQ ID NO: 26765 - RNA, 4283 nt, Artificial Sequence
  SARS-CoV-2/Wuhan/WIV05/2019__EPI_ISL_402128 spike protein mRNA gc (1-1273)(A222V_D614G)
agaauaaacuaguauucuucugguccccacagacucagagagaacccgccaccauguucguguuccuggugcugcugccccuggugagcagccagugcgugaaccugaccacccggacccagcugcccccugccuacaccaacagcuucacccggggcguguacuaccccgacaagguguuccggagcagcgugcugcacagcacccaggaccuguuccugcccuucuucagcaacgugaccugguuccacgccauccacgugagcggcaccaacggcaccaagcgguucgacaacccagugcugcccuucaacgacggcguguacuucgccagcaccgagaagucaaacaucauccggggcuggaucuucggcaccacccuggacagcaagacacagagccugcugaucgugaacaacgccaccaacguggugaucaaggugugcgaguuucaguucugcaacgaccccuuccugggcguguacuaccacaagaacaacaagagcuggauggagagcgaguuccgggucuacagcagcgcuaacaauugcaccuucgaguacgugagccagcccuuccugauggaccucgagggcaagcagggcaacuucaagaaccugcgggaguucguguucaagaacaucgauggcuacuucaagaucuacagcaagcacacccccaucaaccuggugcgggaccugccccagggauucagcgugcuggagccucugguggaccugcccaucggcaucaacaucaccagguuccagacccugcuggcccugcaccggagcuaccugacccccggcgacagcagcagcggcuggaccgccggcgccgccgccuacuacgugggcuaccugcagccacggaccuuccugcugaaguacaacgagaacggcaccaucaccgacgcaguggacugcgcccuggacccccugagcgagaccaagugcacccuaaagagcuucaccguggagaagggcaucuaccagaccagcaacuuccgggugcagcccacugagagcaucgugcgguuccccaacauuaccaaccugugucccuucggcgagguguucaacgccacccgguucgccagcguguacgccuggaaccggaagcggaucagcaacugcguggccgacuacagcgugcuguacaacagcgccagcuucagcaccuucaagugcuacggcgugagcccuaccaagcugaacgaccugugcuucaccaacguguacgccgacagcuucgugauccggggcgacgaggugcggcagaucgcucccggccagaccggcaagaucgccgacuacaacuacaagcugcccgacgacuucaccggcugcgugaucgccuggaacagcaacaaccuggacagcaaggugggcggcaacuacaacuaccuguaccggcuguuccguaagagcaaccugaagccauucgagcgggacaucagcaccgagaucuaccaggccggcagcacccccugcaacgguguggagggcuuuaacugcuacuucccccugcagagcuacggcuuccagcccaccaacggcgugggcuaccagcccuaccgggugguggugcugagcuucgagcugcugcacgcccccgccaccgugugcggcccuaaaaagagcaccaaccuggugaagaacaagugcgugaacuucaauuucaacggccugaccggcaccggcgugcugaccgagagcaacaagaaguuccugcccuuccagcaguucggccgggauaucgccgacaccaccgacgccgugcgggacccccagacccuggagauccuggacaucaccccaugcagcuucggcggcgucagcgugaucacccccggcacaaacaccagcaaccagguggcagugcuguaccagggagugaacugcaccgaggugcccguggccauccacgccgaccagcugacccccaccuggcggguguacagcaccggcagcaacguguuccagacccgggccggcugccugaucggcgccgagcacgugaacaacuccuacgagugcgacauccccaucggcgccggcaucugcgcuagcuaccagacccagaccaacagcccccggcgggcccggagcguggccagccagagcaucaucgccuacaccaugagcuuaggcgccgagaacagcguggccuacagcaacaacagcaucgccaucccuaccaacuucaccaucagcgugaccaccgagauacugcccgugagcaugaccaagaccagcguggacuguaccauguacaucugcggcgacagcaccgagugcagcaaccugcugcugcaguacggcagcuucugcacccagcugaaccgggcgcugaccggcaucgccguggagcaggacaagaacacccaagagguguucgcccaggugaagcagaucuacaagacucccccaaucaaggacuucggcggcuucaacuucagccagauccugcccgaccccagcaagcccagcaagcggagcuucaucgaggaccugcuguucaacaaggugacccuggccgacgccggcuucaucaagcaguacggcgacugccugggggauaucgccgcccgggaccugaucugcgcucagaaguucaacggccugaccgugcugcccccucugcugaccgacgagaugaucgcccaguacaccagcgcccugcuugccggcaccaucaccagcggcuggaccuucggcgccggcgccgcacugcagauccccuucgccaugcagauggccuaccgguucaacggcaucggcgugacccagaacgugcuguacgagaaccagaagcugaucgccaaccaguucaacagcgccaucggcaagauccaggacagccugagcagcaccgccagcgcccugggcaagcugcaggacguggugaaccagaacgcccaggcucugaacacccuggugaagcagcugagcagcaacuucggcgccaucagcucagugcugaaugacauccugagcaggcuggacaagguggaggccgaggugcagaucgaccggcugaucaccggccggcugcagagccugcagaccuacgugacccagcagcugauccgggccgccgagauccgggccagcgccaaccuggccgcaaccaagaugagcgagugcgugcugggccagagcaagcggguggacuuuugcggcaagggcuaccaccugaugagcuucccccagagcgccccacacggcguggucuuccuccacgugacauacgugcccgcccaggagaagaacuucaccaccgcccccgccauuugccacgacggcaaggcccacuucccccgggagggaguguucgugagcaacggcacccacugguucgugacccagcggaacuucuacgagccccagaucaucaccaccgacaacaccuucgugagcggcaacugcgacguggugaucggcaucgugaacaacaccguguacgacccccugcagccugagcuggacagcuucaaggaggagcuggacaaguacuucaagaaccacaccagccccgacguggaucugggcgacaucagcggcaucaacgcuagcguggugaacauccagaaggagaucgaccggcugaacgagguggccaagaaccugaacgagagccugaucgaccugcaggagcugggcaaguacgagcaguacaucaaguggcccugguacaucuggcugggcuucaucgccggccugaucgccaucgugauggugaccaucaugcugugcugcaugaccagcugcuguagcugccugaagggcugcugcagcugcggcagcugcugcaaguucgacgaggacgacagcgagccagugcugaagggcgugaagcugcacuacaccugaugacucgagcugguacugcaugcacgcaaugcuagcugccccuuucccguccuggguaccccgagucucccccgaccucgggucccagguaugcucccaccuccaccugccccacucaccaccucugcuaguuccagacaccucccaagcacgcagcaaugcagcucaaaacgcuuagccuagccacacccccacgggaaacagcagugauuaaccuuuagcaauaaacgaaaguuuaacuaagcuauacuaaccccaggguuggucaauuucgugccagccacacccuggagcuagcaaaaaaaaaaaaaaaaaaaaaaaaaaaaaagcauaugacuaaaaaaaaaaaaaaaaaaaaaaaaaaaaaaaaaaaaaaaaaaaaaaaaaaaaaaaaaaaaaaaaaaaaaa

SEQ ID NO: 26766 - RNA, 4283 nt, Artificial Sequence
  SARS-CoV-2/Wuhan/WIV05/2019__EPI_ISL_402128 spike protein mRNA gc (1-1273)(N439K_D614G)
agaauaaacuaguauucuucugguccccacagacucagagagaacccgccaccauguucguguuccuggugcugcugccccuggugagcagccagugcgugaaccugaccacccggacccagcugcccccugccuacaccaacagcuucacccggggcguguacuaccccgacaagguguuccggagcagcgugcugcacagcacccaggaccuguuccugcccuucuucagcaacgugaccugguuccacgccauccacgugagcggcaccaacggcaccaagcgguucgacaacccagugcugcccuucaacgacggcguguacuucgccagcaccgagaagucaaacaucauccggggcuggaucuucggcaccacccuggacagcaagacacagagccugcugaucgugaacaacgccaccaacguggugaucaaggugugcgaguuucaguucugcaacgaccccuuccugggcguguacuaccacaagaacaacaagagcuggauggagagcgaguuccgggucuacagcagcgcuaacaauugcaccuucgaguacgugagccagcccuuccugauggaccucgagggcaagcagggcaacuucaagaaccugcgggaguucguguucaagaacaucgauggcuacuucaagaucuacagcaagcacacccccaucaaccuggugcgggaccugccccagggauucagcgcccuggagccucugguggaccugcccaucggcaucaacaucaccagguuccagacccugcuggcccugcaccggagcuaccugacccccggcgacagcagcagcggcuggaccgccggcgccgccgcauacuacgugggcuaccugcagccacggaccuuccugcugaaguacaacgagaacggcaccaucaccgacgccguggacugcgcccuggacccccugagcgagaccaagugcacccuaaagagcuucaccguggagaagggcaucuaccagaccagcaacuuccgggugcagcccacugagagcaucgugcgguuccccaacauuaccaaccugugucccuucggcgagguguucaacgccacccgguucgccagcguguacgccuggaaccggaagcggaucagcaacugcguggccgacuacagcgugcuguacaacagcgccagcuucagcaccuucaagugcuacggcgugagcccuaccaagcugaacgaccugugcuucaccaacguguacgcugacagcuucgugauccggggcgacgaggugcggcagaucgcccccggccagaccggcaagaucgccgacuacaacuacaagcugcccgacgacuucaccggcugcgugaucgccuggaacagcaagaaccuggacagcaaggugggcggcaacuacaacuaccuguaccggcuguuccguaagagcaaccugaagccauucgagcgggacaucagcaccgagaucuaccaggccggcagcacccccugcaacgguguggagggcuuuaacugcuacuucccccugcagagcuacggcuuccagcccaccaacggcgugggcuaccagcccuaccgggugguggugcugagcuucgagcugcugcacgcccccgccaccgugugcggcccuaaaaagagcaccaaccuggugaagaacaagugcgugaacuucaacuucaauggccugaccggcaccggcgugcugaccgagagcaacaagaaguuccugcccuuccagcaguucggccgggauaucgccgacaccaccgacgcagugcgggacccccagacccuggagauccuggacaucaccccaugcagcuucggcggcgugagcgucaucacccccggcacaaacaccagcaaccagguggccgugcuguaccagggagugaacugcaccgaggugcccguggccauccacgccgaccagcugacccccaccuggcggguguacagcaccggcagcaacguguuccagacccgggccggcugccugaucggcgccgagcacgugaacaacuccuacgagugcgacauccccaucggcgcuggcaucugcgccagcuaccagacccagaccaacagcccccggcgggcccggagcguggccagccagagcaucaucgccuacaccaugagcuuaggcgccgagaacagcguggccuacagcaacaacagcaucgcgaucccuaccaacuucaccaucagcgugaccaccgagauacugcccgugagcaugaccaagaccagcguggacuguaccauguacaucugcggcgacagcaccgagugcagcaaccugcugcugcaguacggcagcuucugcacccagcugaaccgggcccugaccggcaucgccguggagcaggacaagaacacccaagagguguucgcccaggugaagcagaucuacaagacucccccaaucaaggacuucggcggcuucaacuucagccagauccugcccgaccccagcaagcccagcaagcggagcuucaucgaggaccugcuguucaacaaggugacccuggccgacgccggcuucaucaagcaguacggcgacugccugggggauaucgccgcucgggaccugaucugcgcccagaaguucaacggccugaccgugcugcccccucugcugaccgacgagaugaucgcccaguacaccagcgcccugcuugccggcaccaucaccagcggcuggaccuucggcgccggcgcagcccugcagauccccuucgccaugcagauggccuaccgguucaacggcaucggcgugacccagaacgugcuguacgagaaccagaagcugaucgccaaccaguucaacagcgccaucggcaagauccaggacagccugagcagcaccgccagcgcccugggcaagcugcaggacguggugaaccagaacgcucaggcccugaacacccuggugaagcagcugagcagcaacuucggcgccaucagcucagugcugaacgacauccugagcaggcuggacaagguggaggccgaggugcagaucgaccggcugaucaccggccggcugcagagccugcagaccuacgugacccagcagcugauccgggccgccgagauccgggccagcgccaaucuggcagccaccaagaugagcgagugcgugcugggccagagcaagcggguggacuuuugcggcaagggcuaccaccugaugagcuucccccagagcgccccacacggcgugguguuccuccacgucacauacgugcccgcccaggagaagaacuucaccaccgcccccgccauuugccacgacggcaaggcucacuucccccgggagggaguguucgugagcaacggcacccacugguucgugacccagcggaacuucuacgagccccagaucaucaccaccgacaacaccuucgugagcggcaacugcgacguggugaucggcaucgugaacaacaccguguacgacccccugcagccugagcuggacagcuucaaggaggagcuggacaaguacuucaagaaccacaccagccccgacguggaucugggcgacaucagcggcaucaacgccagcguggugaacauccagaaggagaucgaccggcugaacgagguggccaagaaccugaacgagagccugaucgaccugcaggagcugggcaaguacgagcaguacaucaaguggcccugguacaucuggcugggcuucaucgccggccugaucgccaucgugauggugaccaucaugcugugcugcaugaccagcugcuguagcugccugaagggcugcugcagcugcggcagcugcugcaaguucgacgaggacgacagcgagccagugcugaagggcgugaagcugcacuacaccugaugacucgagcugguacugcaugcacgcaaugcuagcugccccuuucccguccuggguaccccgagucucccccgaccucgggucccagguaugcucccaccuccaccugccccacucaccaccucugcuaguuccagacaccucccaagcacgcagcaaugcagcucaaaacgcuuagccuagccacacccccacgggaaacagcagugauuaaccuuuagcaauaaacgaaaguuuaacuaagcuauacuaaccccaggguuggucaauuucgugccagccacacccuggagcuagcaaaaaaaaaaaaaaaaaaaaaaaaaaaaaagcauaugacuaaaaaaaaaaaaaaaaaaaaaaaaaaaaaaaaaaaaaaaaaaaaaaaaaaaaaaaaaaaaaaaaaaaaaa

SEQ ID NO: 26767 - RNA, 4283 nt, Artificial Sequence
  SARS-CoV-2/Wuhan/WIV05/2019__EPI_ISL_402128 spike protein mRNA gc (1-1273)(S477N_D614G)
agaauaaacuaguauucuucugguccccacagacucagagagaacccgccaccauguucguguuccuggugcugcugccccuggugagcagccagugcgugaaccugaccacccggacccagcugcccccugccuacaccaacagcuucacccggggcguguacuaccccgacaagguguuccggagcagcgugcugcacagcacccaggaccuguuccugcccuucuucagcaacgugaccugguuccacgccauccacgugagcggcaccaacggcaccaagcgguucgacaacccagugcugcccuucaacgacggcguguacuucgccagcaccgagaagucaaacaucauccggggcuggaucuucggcaccacccuggacagcaagacacagagccugcugaucgugaacaacgccaccaacguggugaucaaggugugcgaguuucaguucugcaacgaccccuuccugggcguguacuaccacaagaacaacaagagcuggauggagagcgaguuccgggucuacagcagcgcuaacaauugcaccuucgaguacgugagccagcccuuccugauggaccucgagggcaagcagggcaacuucaagaaccugcgggaguucguguucaagaacaucgauggcuacuucaagaucuacagcaagcacacccccaucaaccuggugcgggaccugccccagggauucagcgcccuggagccucugguggaccugcccaucggcaucaacaucaccagguuccagacccugcuggcccugcaccggagcuaccugacccccggcgacagcagcagcggcuggaccgccggcgccgccgcauacuacgugggcuaccugcagccacggaccuuccugcugaaguacaacgagaacggcaccaucaccgacgccguggacugcgcccuggacccccugagcgagaccaagugcacccuaaagagcuucaccguggagaagggcaucuaccagaccagcaacuuccgggugcagcccacugagagcaucgugcgguuccccaacauuaccaaccugugucccuucggcgagguguucaacgccacccgguucgccagcguguacgccuggaaccggaagcggaucagcaacugcguggccgacuacagcgugcuguacaacagcgccagcuucagcaccuucaagugcuacggcgugagcccuaccaagcugaacgaccugugcuucaccaacguguacgcugacagcuucgugauccggggcgacgaggugcggcagaucgcccccggccagaccggcaagaucgccgacuacaacuacaagcugcccgacgacuucaccggcugcgugaucgccuggaacagcaacaaccuggacagcaaggugggcggcaacuacaacuaccuguaccggcuguuccguaagagcaaccugaagccauucgagcgggacaucagcaccgagaucuaccaggccggcaacacccccugcaacgguguggagggcuuuaacugcuacuucccccugcagagcuacggcuuccagcccaccaacggcgugggcuaccagcccuaccgggugguggugcugagcuucgagcugcugcacgcccccgccaccgugugcggcccuaaaaagagcaccaaccuggugaagaacaagugcgugaauuucaacuucaacggccugaccggcaccggcgugcugaccgagagcaacaagaaguuccugcccuuccagcaguucggccgggauaucgccgacaccaccgacgcagugcgggacccccagacccuggagauccuggacaucaccccaugcagcuucggcggcgugagcgucaucacccccggcacaaacaccagcaaccagguggccgugcuguaccagggagugaacugcaccgaggugcccguggccauccacgccgaccagcugacccccaccuggcggguguacagcaccggcagcaacguguuccagacccgggccggcugccugaucggcgccgagcacgugaacaacagcuacgagugcgacauccccaucggcgcuggcaucugcgccuccuaccagacccagaccaacagcccccggcgggcccggagcguggccagccagagcaucaucgccuacaccaugagcuuaggcgccgagaacagcguggccuacagcaacaacagcaucgcgaucccuaccaacuucaccaucagcgugaccaccgagauacugcccgugagcaugaccaagaccagcguggacuguaccauguacaucugcggcgacagcaccgagugcagcaaccugcugcugcaguacggcagcuucugcacccagcugaaccgggcccugaccggcaucgccguggagcaggacaagaacacccaagagguguucgcccaggugaagcagaucuacaagacucccccaaucaaggacuucggcggcuucaacuucagccagauccugcccgaccccagcaagcccagcaagcggagcuucaucgaggaccugcuguucaacaaggugacccuggccgacgccggcuucaucaagcaguacggcgacugccugggggauaucgccgcucgggaccugaucugcgcccagaaguucaacggccugaccgugcugcccccucugcugaccgacgagaugaucgcccaguacaccagcgcccugcuugccggcaccaucaccagcggcuggaccuucggcgccggcgcagcccugcagauccccuucgccaugcagauggccuaccgguucaacggcaucggcgugacccagaacgugcuguacgagaaccagaagcugaucgccaaccaguucaacagcgccaucggcaagauccaggacagccugagcagcaccgccagcgcccugggcaagcugcaggacguggugaaccagaacgcucaggcccugaacacccuggugaagcagcugagcagcaauuucggcgccaucagcagcgugcugaacgacauccugucaaggcuggacaagguggaggccgaggugcagaucgaccggcugaucaccggccggcugcagagccugcagaccuacgugacccagcagcugauccgggccgccgagauccgggccagcgccaaccuggcagccaccaagaugagcgagugcgugcugggccagagcaagcggguggacuuuugcggcaagggcuaccaccugaugagcuucccccagagcgccccacacggcgugguguuccuccacgucacauacgugcccgcccaggagaagaacuucaccaccgcccccgccauuugccacgacggcaaggcucacuucccccgggagggaguguucgugagcaacggcacccacugguucgugacccagcggaacuucuacgagccccagaucaucaccaccgacaacaccuucgugagcggcaacugcgacguggugaucggcaucgugaacaacaccguguacgacccccugcagccugagcuggacagcuucaaggaggagcuggacaaguacuucaagaaccacaccagccccgacguggaucugggcgacaucagcggcaucaacgccagcguggugaacauccagaaggagaucgaccggcugaacgagguggccaagaaccugaacgagagccugaucgaccugcaggagcugggcaaguacgagcaguacaucaaguggcccugguacaucuggcugggcuucaucgccggccugaucgccaucgugauggugaccaucaugcugugcugcaugaccagcugcuguagcugccugaagggcugcugcagcugcggcagcugcugcaaguucgacgaggacgacagcgagccagugcugaagggcgugaagcugcacuacaccugaugacucgagcugguacugcaugcacgcaaugcuagcugccccuuucccguccuggguaccccgagucucccccgaccucgggucccagguaugcucccaccuccaccugccccacucaccaccucugcuaguuccagacaccucccaagcacgcagcaaugcagcucaaaacgcuuagccuagccacacccccacgggaaacagcagugauuaaccuuuagcaauaaacgaaaguuuaacuaagcuauacuaaccccaggguuggucaauuucgugccagccacacccuggagcuagcaaaaaaaaaaaaaaaaaaaaaaaaaaaaaagcauaugacuaaaaaaaaaaaaaaaaaaaaaaaaaaaaaaaaaaaaaaaaaaaaaaaaaaaaaaaaaaaaaaaaaaaaaa

SEQ ID NO: 26768 - RNA, 4283 nt, Artificial Sequence
  SARS-CoV-2/Wuhan/WIV05/2019__EPI_ISL_402128 spike protein mRNA gc (1-1273)(N501Y_D614G)
agaauaaacuaguauucuucugguccccacagacucagagagaacccgccaccauguucguguuccuggugcugcugccccuggugagcagccagugcgugaaccugaccacccggacccagcugcccccugccuacaccaacagcuucacccggggcguguacuaccccgacaagguguuccggagcagcgugcugcacagcacccaggaccuguuccugcccuucuucagcaacgugaccugguuccacgccauccacgugagcggcaccaacggcaccaagcgguucgacaacccagugcugcccuucaacgacggcguguacuucgccagcaccgagaagucaaacaucauccggggcuggaucuucggcaccacccuggacagcaagacacagagccugcugaucgugaacaacgccaccaacguggugaucaaggugugcgaguuucaguucugcaacgaccccuuccugggcguguacuaccacaagaacaacaagagcuggauggagagcgaguuccgggucuacagcagcgcuaacaauugcaccuucgaguacgugagccagcccuuccugauggaccucgagggcaagcagggcaacuucaagaaccugcgggaguucguguucaagaacaucgauggcuacuucaagaucuacagcaagcacacccccaucaaccuggugcgggaccugccccagggauucagcgcccuggagccucugguggaccugcccaucggcaucaacaucaccagguuccagacccugcuggcccugcaccggagcuaccugacccccggcgacagcagcagcggcuggaccgccggcgccgccgcauacuacgugggcuaccugcagccacggaccuuccugcugaaguacaacgagaacggcaccaucaccgacgccguggacugcgcccuggacccccugagcgagaccaagugcacccuaaagagcuucaccguggagaagggcaucuaccagaccagcaacuuccgggugcagcccacugagagcaucgugcgguuccccaacauuaccaaccugugucccuucggcgagguguucaacgccacccgguucgccagcguguacgccuggaaccggaagcggaucagcaacugcguggccgacuacagcgugcuguacaacagcgccagcuucagcaccuucaagugcuacggcgugagcccuaccaagcugaacgaccugugcuucaccaacguguacgcugacagcuucgugauccggggcgacgaggugcggcagaucgcccccggccagaccggcaagaucgccgacuacaacuacaagcugcccgacgacuucaccggcugcgugaucgccuggaacagcaacaaccuggacagcaaggugggcggcaacuacaacuaccuguaccggcuguuccguaagagcaaccugaagccauucgagcgggacaucagcaccgagaucuaccaggccggcagcacccccugcaacgguguggagggcuuuaacugcuacuucccccugcagagcuacggcuuccagcccaccuacggcgugggcuaccagcccuaccgggugguggugcugagcuucgagcugcugcacgcccccgccaccgugugcggcccuaaaaagagcaccaaccuggugaagaacaagugcgugaacuucaacuucaauggccugaccggcaccggcgugcugaccgagagcaacaagaaguuccugcccuuccagcaguucggccgggauaucgccgacaccaccgacgcagugcgggacccccagacccuggagauccuggacaucaccccaugcagcuucggcggcgugagcgucaucacccccggcacaaacaccagcaaccagguggccgugcuguaccagggagugaacugcaccgaggugcccguggccauccacgccgaccagcugacccccaccuggcggguguacagcaccggcagcaacguguuccagacccgggccggcugccugaucggcgccgagcacgugaacaacuccuacgagugcgacauccccaucggcgcuggcaucugcgccagcuaccagacccagaccaacagcccccggcgggcccggagcguggccagccagagcaucaucgccuacaccaugagcuuaggcgccgagaacagcguggccuacagcaacaacagcaucgcgaucccuaccaacuucaccaucagcgugaccaccgagauacugcccgugagcaugaccaagaccagcguggacuguaccauguacaucugcggcgacagcaccgagugcagcaaccugcugcugcaguacggcagcuucugcacccagcugaaccgggcccugaccggcaucgccguggagcaggacaagaacacccaagagguguucgcccaggugaagcagaucuacaagacucccccaaucaaggacuucggcggcuucaacuucagccagauccugcccgaccccagcaagcccagcaagcggagcuucaucgaggaccugcuguucaacaaggugacccuggccgacgccggcuucaucaagcaguacggcgacugccugggggauaucgccgcucgggaccugaucugcgcccagaaguucaacggccugaccgugcugcccccucugcugaccgacgagaugaucgcccaguacaccagcgcccugcuugccggcaccaucaccagcggcuggaccuucggcgccggcgcagcccugcagauccccuucgccaugcagauggccuaccgguucaacggcaucggcgugacccagaacgugcuguacgagaaccagaagcugaucgccaaccaguucaacagcgccaucggcaagauccaggacagccugagcagcaccgccagcgcccugggcaagcugcaggacguggugaaccagaacgcucaggcccugaacacccuggugaagcagcugagcagcaacuucggcgccaucagcucagugcugaacgacauccugagcaggcuggacaagguggaggccgaggugcagaucgaccggcugaucaccggccggcugcagagccugcagaccuacgugacccagcagcugauccgggccgccgagauccgggccagcgccaaucuggcagccaccaagaugagcgagugcgugcugggccagagcaagcggguggacuuuugcggcaagggcuaccaccugaugagcuucccccagagcgccccacacggcgugguguuccuccacgucacauacgugcccgcccaggagaagaacuucaccaccgcccccgccauuugccacgacggcaaggcucacuucccccgggagggaguguucgugagcaacggcacccacugguucgugacccagcggaacuucuacgagccccagaucaucaccaccgacaacaccuucgugagcggcaacugcgacguggugaucggcaucgugaacaacaccguguacgacccccugcagccugagcuggacagcuucaaggaggagcuggacaaguacuucaagaaccacaccagccccgacguggaucugggcgacaucagcggcaucaacgccagcguggugaacauccagaaggagaucgaccggcugaacgagguggccaagaaccugaacgagagccugaucgaccugcaggagcugggcaaguacgagcaguacaucaaguggcccugguacaucuggcugggcuucaucgccggccugaucgccaucgugauggugaccaucaugcugugcugcaugaccagcugcuguagcugccugaagggcugcugcagcugcggcagcugcugcaaguucgacgaggacgacagcgagccagugcugaagggcgugaagcugcacuacaccugaugacucgagcugguacugcaugcacgcaaugcuagcugccccuuucccguccuggguaccccgagucucccccgaccucgggucccagguaugcucccaccuccaccugccccacucaccaccucugcuaguuccagacaccucccaagcacgcagcaaugcagcucaaaacgcuuagccuagccacacccccacgggaaacagcagugauuaaccuuuagcaauaaacgaaaguuuaacuaagcuauacuaaccccaggguuggucaauuucgugccagccacacccuggagcuagcaaaaaaaaaaaaaaaaaaaaaaaaaaaaaagcauaugacuaaaaaaaaaaaaaaaaaaaaaaaaaaaaaaaaaaaaaaaaaaaaaaaaaaaaaaaaaaaaaaaaaaaaaa

SEQ ID NO: 26769 - RNA, 4277 nt, Artificial Sequence
  SARS-CoV-2/Wuhan/WIV05/2019__EPI_ISL_402128 spike protein mRNA gc (1-1273)(H69del_V70del_D614G)
agaauaaacuaguauucuucugguccccacagacucagagagaacccgccaccauguucguguuccuggugcugcugccccuggugagcagccagugcgugaaccugaccacccggacccagcugcccccugccuacaccaacagcuucacccggggcguguacuaccccgacaagguguuccggagcagcgugcugcacagcacccaggaccuguuccugcccuucuucagcaacgugaccugguuccacgccaucagcggcaccaacggcaccaagcgguucgacaacccagugcugcccuucaacgacggcguguacuucgccagcaccgagaagucaaacaucauccggggcuggaucuucggcaccacccuggacagcaagacacagagccugcugaucgugaacaacgccaccaacguggugaucaaggugugcgaguuucaguucugcaacgaccccuuccugggcguguacuaccacaagaacaacaagagcuggauggagagcgaguuccggguguacagcagcgcuaacaauugcaccuucgaguacgucagccagcccuuccugauggaccucgagggcaagcagggcaacuucaagaaccugcgggaguucguguucaagaacaucgauggcuacuucaagaucuacagcaagcacacccccaucaaccuggugcgggaccugccccagggauucagcgcccuggagccucugguggaccugcccaucggcaucaacaucaccagguuccagacccugcuggcccugcaccggagcuaccugacccccggcgacagcagcagcggcuggaccgccggcgccgccgcauacuacgugggcuaccugcagccacggaccuuccugcugaaguacaacgagaacggcaccaucaccgacgccguggacugcgcccuggacccccugagcgagaccaagugcacccuaaagagcuucaccguggagaagggcaucuaccagaccagcaacuuccgggugcagcccacugagagcaucgugcgguuccccaacauuaccaaccugugucccuucggcgagguguucaacgccacccgguucgccagcguguacgccuggaaccggaagcggaucagcaacugcguggccgacuacagcgugcuguacaacagcgccagcuucagcaccuucaagugcuacggcgugagcccuaccaagcugaacgaccugugcuucaccaacguguacgcugacagcuucgugauccggggcgacgaggugcggcagaucgcccccggccagaccggcaagaucgccgacuacaacuacaagcugcccgacgacuucaccggcugcgugaucgccuggaacagcaacaaccuggacagcaaggugggcggcaacuacaacuaccuguaccggcuguuccguaagagcaaccugaagccauucgagcgggacaucagcaccgagaucuaccaggccggcagcacccccugcaacgguguggagggcuuuaacugcuacuucccccugcagagcuacggcuuccagcccaccaacggcgugggcuaccagcccuaccgggugguggugcugagcuucgagcugcugcacgcccccgccaccgugugcggcccuaaaaagagcaccaaccuggugaagaacaagugcgugaacuucaauuucaacggccugaccggcaccggcgugcugaccgagagcaacaagaaguuccugcccuuccagcaguucggccgggauaucgccgacaccaccgacgcagugcgggacccccagacccuggagauccuggacaucaccccaugcagcuucggcggcgugagcgugaucacccccggcacaaacaccagcaaccaggucgccgugcuguaccagggagugaacugcaccgaggugcccguggccauccacgccgaccagcugacccccaccuggcggguguacagcaccggcagcaacguguuccagacccgggccggcugccugaucggcgccgagcacgugaacaacuccuacgagugcgacauccccaucggcgcuggcaucugcgccagcuaccagacccagaccaacagcccccggcgggcccggagcguggccagccagagcaucaucgccuacaccaugagcuuaggcgccgagaacagcguggccuacagcaacaacagcaucgcgaucccuaccaacuucaccaucagcgugaccaccgagauacugcccgugagcaugaccaagaccagcguggacuguaccauguacaucugcggcgacagcaccgagugcagcaaccugcugcugcaguacggcagcuucugcacccagcugaaccgggcccugaccggcaucgccguggagcaggacaagaacacccaagagguguucgcccaggugaagcagaucuacaagacucccccaaucaaggacuucggcggcuucaacuucagccagauccugcccgaccccagcaagcccagcaagcggagcuucaucgaggaccugcuguucaacaaggugacccuggccgacgccggcuucaucaagcaguacggcgacugccugggggauaucgccgcucgggaccugaucugcgcccagaaguucaacggccugaccgugcugcccccucugcugaccgacgagaugaucgcccaguacaccagcgcccugcuugccggcaccaucaccagcggcuggaccuucggcgccggcgcagcccugcagauccccuucgccaugcagauggccuaccgguucaacggcaucggcgugacccagaacgugcuguacgagaaccagaagcugaucgccaaccaguucaacagcgccaucggcaagauccaggacagccugagcagcaccgccagcgcccugggcaagcugcaggacguggugaaccagaacgcucaggcccugaacacccuggugaagcagcugagcagcaacuucggcgccaucagcucagugcugaaugacauccugagcaggcuggacaagguggaggccgaggugcagaucgaccggcugaucaccggccggcugcagagccugcagaccuacgugacccagcagcugauccgggccgccgagauccgggccagcgccaaccuggcagccaccaagaugagcgagugcgugcugggccagagcaagcggguggacuuuugcggcaagggcuaccaccugaugagcuucccccagagcgccccacacggcgugguguuccuccacgugacauacguccccgcccaggagaagaacuucaccaccgcccccgccauuugccacgacggcaaggcucacuucccccgggagggaguguucgugagcaacggcacccacugguucgugacccagcggaacuucuacgagccccagaucaucaccaccgacaacaccuucgugagcggcaacugcgacguggugaucggcaucgugaacaacaccguguacgacccccugcagccugagcuggacagcuucaaggaggagcuggacaaguacuucaagaaccacaccagccccgacguggaucugggcgacaucagcggcaucaacgccagcguggugaacauccagaaggagaucgaccggcugaacgagguggccaagaaccugaacgagagccugaucgaccugcaggagcugggcaaguacgagcaguacaucaaguggcccugguacaucuggcugggcuucaucgccggccugaucgccaucgugauggugaccaucaugcugugcugcaugaccagcugcuguagcugccugaagggcugcugcagcugcggcagcugcugcaaguucgacgaggacgacagcgagccagugcugaagggcgugaagcugcacuacaccugaugacucgagcugguacugcaugcacgcaaugcuagcugccccuuucccguccuggguaccccgagucucccccgaccucgggucccagguaugcucccaccuccaccugccccacucaccaccucugcuaguuccagacaccucccaagcacgcagcaaugcagcucaaaacgcuuagccuagccacacccccacgggaaacagcagugauuaaccuuuagcaauaaacgaaaguuuaacuaagcuauacuaaccccaggguuggucaauuucgugccagccacacccuggagcuagcaaaaaaaaaaaaaaaaaaaaaaaaaaaaaagcauaugacuaaaaaaaaaaaaaaaaaaaaaaaaaaaaaaaaaaaaaaaaaaaaaaaaaaaaaaaaaaaaaaaaaaaaaa

SEQ ID NO: 26770 - RNA, 4283 nt, Artificial Sequence
  SARS-CoV-2/Wuhan/WIV05/2019__EPI_ISL_402128 spike protein mRNA gc (1-1273)(Y453F_D614G)
agaauaaacuaguauucuucugguccccacagacucagagagaacccgccaccauguucguguuccuggugcugcugccccuggugagcagccagugcgugaaccugaccacccggacccagcugcccccugccuacaccaacagcuucacccggggcguguacuaccccgacaagguguuccggagcagcgugcugcacagcacccaggaccuguuccugcccuucuucagcaacgugaccugguuccacgccauccacgugagcggcaccaacggcaccaagcgguucgacaacccagugcugcccuucaacgacggcguguacuucgccagcaccgagaagucaaacaucauccggggcuggaucuucggcaccacccuggacagcaagacacagagccugcugaucgugaacaacgccaccaacguggugaucaaggugugcgaguuucaguucugcaacgaccccuuccugggcguguacuaccacaagaacaacaagagcuggauggagagcgaguuccgggucuacagcagcgcuaacaauugcaccuucgaguacgugagccagcccuuccugauggaccucgagggcaagcagggcaacuucaagaaccugcgggaguucguguucaagaacaucgauggcuacuucaagaucuacagcaagcacacccccaucaaccuggugcgggaccugccccagggauucagcgcccuggagccucugguggaccugcccaucggcaucaacaucaccagguuccagacccugcuggcccugcaccggagcuaccugacccccggcgacagcagcagcggcuggaccgccggcgccgccgcauacuacgugggcuaccugcagccacggaccuuccugcugaaguacaacgagaacggcaccaucaccgacgccguggacugcgcccuggacccccugagcgagaccaagugcacccuaaagagcuucaccguggagaagggcaucuaccagaccagcaacuuccgggugcagcccacugagagcaucgugcgguuccccaacauuaccaaccugugucccuucggcgagguguucaacgccacccgguucgccagcguguacgccuggaaccggaagcggaucagcaacugcguggccgacuacagcgugcuguacaacagcgccagcuucagcaccuucaagugcuacggcgugagcccuaccaagcugaacgaccugugcuucaccaacguguacgcugacagcuucgugauccggggcgacgaggugcggcagaucgcccccggccagaccggcaagaucgccgacuacaacuacaagcugcccgacgacuucaccggcugcgugaucgccuggaacagcaacaaccuggacagcaaggugggcggcaacuacaacuaccuguuccggcuguuccguaagagcaaccugaagccauuugagcgggacaucagcaccgagaucuaccaggccggcagcacccccugcaacgguguggagggcuucaacugcuacuucccccugcagagcuacggcuuccagcccaccaacggcgugggcuaccagcccuaccgggugguggugcugagcuucgagcugcugcacgcccccgccaccgugugcggcccuaaaaagagcaccaaccuggugaagaacaagugcgugaacuucaauuucaacggccugaccggcaccggcgugcugaccgagagcaacaagaaguuccugcccuuccagcaguucggccgggauaucgccgacaccaccgacgcagugcgggacccccagacccuggagauccuggacaucaccccaugcagcuucggcggcgugagcgucaucacccccggcacaaacaccagcaaccagguggccgugcuguaccagggagugaacugcaccgaggugcccguggccauccacgccgaccagcugacccccaccuggcggguguacagcaccggcagcaacguguuccagacccgggccggcugccugaucggcgccgagcacgugaacaacuccuacgagugcgacauccccaucggcgcuggcaucugcgccagcuaccagacccagaccaacagcccccggcgggcccggagcguggccagccagagcaucaucgccuacaccaugagcuuaggcgccgagaacagcguggccuacagcaacaacagcaucgcgaucccuaccaacuucaccaucagcgugaccaccgagauacugcccgugagcaugaccaagaccagcguggacuguaccauguacaucugcggcgacagcaccgagugcagcaaccugcugcugcaguacggcagcuucugcacccagcugaaccgggcccugaccggcaucgccguggagcaggacaagaacacccaagagguguucgcccaggugaagcagaucuacaagacucccccaaucaaggacuucggcggcuucaacuucagccagauccugcccgaccccagcaagcccagcaagcggagcuucaucgaggaccugcuguucaacaaggugacccuggccgacgccggcuucaucaagcaguacggcgacugccugggggauaucgccgcucgggaccugaucugcgcccagaaguucaacggccugaccgugcugcccccucugcugaccgacgagaugaucgcccaguacaccagcgcccugcuugccggcaccaucaccagcggcuggaccuucggcgccggcgcagcccugcagauccccuucgccaugcagauggccuaccgguucaacggcaucggcgugacccagaacgugcuguacgagaaccagaagcugaucgccaaccaguucaacagcgccaucggcaagauccaggacagccugagcagcaccgccagcgcccugggcaagcugcaggacguggugaaccagaacgcucaggcccugaacacccuggugaagcagcugagcagcaacuuuggcgccaucagcucagugcugaaugacauccugagcaggcuggacaagguggaggccgaggugcagaucgaccggcugaucaccggccggcugcagagccugcagaccuacgugacccagcagcugauccgggccgccgagauccgggccagcgccaaccuggcagccaccaagaugagcgagugcgugcugggccagagcaagcggguggacuucugcggcaagggcuaccaccugaugagcuucccccagagcgccccacacggcgugguguuccuccacgucacauacgugcccgcccaggagaagaacuucaccaccgcccccgccauuugccacgacggcaaggcucacuucccccgggagggaguguucgugagcaacggcacccacugguucgugacccagcggaacuucuacgagccccagaucaucaccaccgacaacaccuucgugagcggcaacugcgacguggugaucggcaucgugaacaacaccguguacgacccccugcagccugagcuggacagcuucaaggaggagcuggacaaguacuucaagaaccacaccagccccgacguggaucugggcgacaucagcggcaucaacgccagcguggugaacauccagaaggagaucgaccggcugaacgagguggccaagaaccugaacgagagccugaucgaccugcaggagcugggcaaguacgagcaguacaucaaguggcccugguacaucuggcugggcuucaucgccggccugaucgccaucgugauggugaccaucaugcugugcugcaugaccagcugcuguagcugccugaagggcugcugcagcugcggcagcugcugcaaguucgacgaggacgacagcgagccagugcugaagggcgugaagcugcacuacaccugaugacucgagcugguacugcaugcacgcaaugcuagcugccccuuucccguccuggguaccccgagucucccccgaccucgggucccagguaugcucccaccuccaccugccccacucaccaccucugcuaguuccagacaccucccaagcacgcagcaaugcagcucaaaacgcuuagccuagccacacccccacgggaaacagcagugauuaaccuuuagcaauaaacgaaaguuuaacuaagcuauacuaaccccaggguuggucaauuucgugccagccacacccuggagcuagcaaaaaaaaaaaaaaaaaaaaaaaaaaaaaagcauaugacuaaaaaaaaaaaaaaaaaaaaaaaaaaaaaaaaaaaaaaaaaaaaaaaaaaaaaaaaaaaaaaaaaaaaaa

SEQ ID NO: 26771 - RNA, 4283 nt, Artificial Sequence
  SARS-CoV-2/Wuhan/WIV05/2019__EPI_ISL_402128 spike protein mRNA gc (1-1273)(D614G_I692V)
agaauaaacuaguauucuucugguccccacagacucagagagaacccgccaccauguucguguuccuggugcugcugccccuggugagcagccagugcgugaaccugaccacccggacccagcugcccccugccuacaccaacagcuucacccggggcguguacuaccccgacaagguguuccggagcagcgugcugcacagcacccaggaccuguuccugcccuucuucagcaacgugaccugguuccacgccauccacgugagcggcaccaacggcaccaagcgguucgacaacccagugcugcccuucaacgacggcguguacuucgccagcaccgagaagucaaacaucauccggggcuggaucuucggcaccacccuggacagcaagacacagagccugcugaucgugaacaacgccaccaacguggugaucaaggugugcgaguuucaguucugcaacgaccccuuccugggcguguacuaccacaagaacaacaagagcuggauggagagcgaguuccgggucuacagcagcgcuaacaauugcaccuucgaguacgugagccagcccuuccugauggaccucgagggcaagcagggcaacuucaagaaccugcgggaguucguguucaagaacaucgauggcuacuucaagaucuacagcaagcacacccccaucaaccuggugcgggaccugccccagggauucagcgcccuggagccucugguggaccugcccaucggcaucaacaucaccagguuccagacccugcuggcccugcaccggagcuaccugacccccggcgacagcagcagcggcuggaccgccggcgccgccgcauacuacgugggcuaccugcagccacggaccuuccugcugaaguacaacgagaacggcaccaucaccgacgccguggacugcgcccuggacccccugagcgagaccaagugcacccuaaagagcuucaccguggagaagggcaucuaccagaccagcaacuuccgggugcagcccacugagagcaucgugcgguuccccaacauuaccaaccugugucccuucggcgagguguucaacgccacccgguucgccagcguguacgccuggaaccggaagcggaucagcaacugcguggccgacuacagcgugcuguacaacagcgccagcuucagcaccuucaagugcuacggcgugagcccuaccaagcugaacgaccugugcuucaccaacguguacgcugacagcuucgugauccggggcgacgaggugcggcagaucgcccccggccagaccggcaagaucgccgacuacaacuacaagcugcccgacgacuucaccggcugcgugaucgccuggaacagcaacaaccuggacagcaaggugggcggcaacuacaacuaccuguaccggcuguuccguaagagcaaccugaagccauucgagcgggacaucagcaccgagaucuaccaggccggcagcacccccugcaacgguguggagggcuuuaacugcuacuucccccugcagagcuacggcuuccagcccaccaacggcgugggcuaccagcccuaccgggugguggugcugagcuucgagcugcugcacgcccccgccaccgugugcggcccuaaaaagagcaccaaccuggugaagaacaagugcgugaacuucaauuucaacggccugaccggcaccggcgugcugaccgagagcaacaagaaguuccugcccuuccagcaguucggccgggauaucgccgacaccaccgacgcagugcgggacccccagacccuggagauccuggacaucaccccaugcagcuucggcggcgugagcgucaucacccccggcacaaacaccagcaaccagguggccgugcuguaccagggagugaacugcaccgaggugcccguggccauccacgccgaccagcugacccccaccuggcggguguacagcaccggcagcaacguguuccagacccgggccggcugccugaucggcgccgagcacgugaacaacuccuacgagugcgacauccccaucggcgcuggcaucugcgccagcuaccagacccagaccaacagcccccggcgggcccggagcguggccagccagagcgugaucgccuacaccaugagcuuaggcgccgagaacagcguggccuacagcaacaacagcaucgcgaucccuaccaacuucaccaucagcgugaccaccgagauccugcccgugagcaugaccaagaccagcguggacuguaccauguacauaugcggcgacagcaccgagugcagcaaccugcugcugcaguacggcagcuucugcacccagcugaaccgggcccugaccggcaucgccguggagcaggacaagaacacccaagagguguucgcccaggugaagcagaucuacaagacucccccaaucaaggacuucggcggcuucaacuucagccagauccugcccgaccccagcaagcccagcaagcggagcuucaucgaggaccugcuguucaacaaggugacccuggccgacgccggcuucaucaagcaguacggcgacugccugggggauaucgccgcucgggaccugaucugcgcccagaaguucaacggccugaccgugcugcccccucugcugaccgacgagaugaucgcccaguacaccagcgcccugcuugccggcaccaucaccagcggcuggaccuucggcgccggcgcagcccugcagauccccuucgccaugcagauggccuaccgguucaacggcaucggcgugacccagaacgugcuguacgagaaccagaagcugaucgccaaccaguucaacagcgccaucggcaagauccaggacagccugagcagcaccgccagcgcccugggcaagcugcaggacguggugaaccagaacgcucaggcccugaacacccuggugaagcagcugagcagcaacuucggcgccaucagcucagugcugaaugacauccugagcaggcuggacaagguggaggccgaggugcagaucgaccggcugaucaccggccggcugcagagccugcagaccuacgugacccagcagcugauccgggccgccgagauccgggccagcgccaaccuggcagccaccaagaugagcgagugcgugcugggccagagcaagcggguggacuuuugcggcaagggcuaccaccugaugagcuucccccagagcgccccacacggcguggucuuccuccacgugacauacgugcccgcccaggagaagaacuucaccaccgcccccgccaucugccacgacggcaaggcucacuucccccgggagggaguguucgugagcaacggcacccacugguucgugacccagcggaacuucuacgagccccagauuaucaccaccgacaacaccuucgugagcggcaacugcgacguggugaucggcaucgugaacaacaccguguacgacccccugcagccugagcuggacagcuucaaggaggagcuggacaaguacuucaagaaccacaccagccccgacguggaucugggcgacaucagcggcaucaacgccagcguggugaacauccagaaggagaucgaccggcugaacgagguggccaagaaccugaacgagagccugaucgaccugcaggagcugggcaaguacgagcaguacaucaaguggcccugguacaucuggcugggcuucaucgccggccugaucgccaucgugauggugaccaucaugcugugcugcaugaccagcugcuguagcugccugaagggcugcugcagcugcggcagcugcugcaaguucgacgaggacgacagcgagccagugcugaagggcgugaagcugcacuacaccugaugacucgagcugguacugcaugcacgcaaugcuagcugccccuuucccguccuggguaccccgagucucccccgaccucgggucccagguaugcucccaccuccaccugccccacucaccaccucugcuaguuccagacaccucccaagcacgcagcaaugcagcucaaaacgcuuagccuagccacacccccacgggaaacagcagugauuaaccuuuagcaauaaacgaaaguuuaacuaagcuauacuaaccccaggguuggucaauuucgugccagccacacccuggagcuagcaaaaaaaaaaaaaaaaaaaaaaaaaaaaaagcauaugacuaaaaaaaaaaaaaaaaaaaaaaaaaaaaaaaaaaaaaaaaaaaaaaaaaaaaaaaaaaaaaaaaaaaaaa

SEQ ID NO: 26772 - RNA, 4283 nt, Artificial Sequence
  SARS-CoV-2/Wuhan/WIV05/2019__EPI_ISL_402128 spike protein mRNA gc (1-1273)(D614G_M1229I)
agaauaaacuaguauucuucugguccccacagacucagagagaacccgccaccauguucguguuccuggugcugcugccccuggugagcagccagugcgugaaccugaccacccggacccagcugcccccugccuacaccaacagcuucacccggggcguguacuaccccgacaagguguuccggagcagcgugcugcacagcacccaggaccuguuccugcccuucuucagcaacgugaccugguuccacgccauccacgugagcggcaccaacggcaccaagcgguucgacaacccagugcugcccuucaacgacggcguguacuucgccagcaccgagaagucaaacaucauccggggcuggaucuucggcaccacccuggacagcaagacacagagccugcugaucgugaacaacgccaccaacguggugaucaaggugugcgaguuucaguucugcaacgaccccuuccugggcguguacuaccacaagaacaacaagagcuggauggagagcgaguuccgggucuacagcagcgcuaacaauugcaccuucgaguacgugagccagcccuuccugauggaccucgagggcaagcagggcaacuucaagaaccugcgggaguucguguucaagaacaucgauggcuacuucaagaucuacagcaagcacacccccaucaaccuggugcgggaccugccccagggauucagcgcccuggagccucugguggaccugcccaucggcaucaacaucaccagguuccagacccugcuggcccugcaccggagcuaccugacccccggcgacagcagcagcggcuggaccgccggcgccgccgcauacuacgugggcuaccugcagccacggaccuuccugcugaaguacaacgagaacggcaccaucaccgacgccguggacugcgcccuggacccccugagcgagaccaagugcacccuaaagagcuucaccguggagaagggcaucuaccagaccagcaacuuccgggugcagcccacugagagcaucgugcgguuccccaacauuaccaaccugugucccuucggcgagguguucaacgccacccgguucgccagcguguacgccuggaaccggaagcggaucagcaacugcguggccgacuacagcgugcuguacaacagcgccagcuucagcaccuucaagugcuacggcgugagcccuaccaagcugaacgaccugugcuucaccaacguguacgcugacagcuucgugauccggggcgacgaggugcggcagaucgcccccggccagaccggcaagaucgccgacuacaacuacaagcugcccgacgacuucaccggcugcgugaucgccuggaacagcaacaaccuggacagcaaggugggcggcaacuacaacuaccuguaccggcuguuccguaagagcaaccugaagccauucgagcgggacaucagcaccgagaucuaccaggccggcagcacccccugcaacgguguggagggcuuuaacugcuacuucccccugcagagcuacggcuuccagcccaccaacggcgugggcuaccagcccuaccgggugguggugcugagcuucgagcugcugcacgcccccgccaccgugugcggcccuaaaaagagcaccaaccuggugaagaacaagugcgugaacuucaauuucaacggccugaccggcaccggcgugcugaccgagagcaacaagaaguuccugcccuuccagcaguucggccgggauaucgccgacaccaccgacgcagugcgggacccccagacccuggagauccuggacaucaccccaugcagcuucggcggcgugagcgucaucacccccggcacaaacaccagcaaccagguggccgugcuguaccagggagugaacugcaccgaggugcccguggccauccacgccgaccagcugacccccaccuggcggguguacagcaccggcagcaacguguuccagacccgggccggcugccugaucggcgccgagcacgugaacaacuccuacgagugcgacauccccaucggcgcuggcaucugcgccagcuaccagacccagaccaacagcccccggcgggcccggagcguggccagccagagcaucaucgccuacaccaugagcuuaggcgccgagaacagcguggccuacagcaacaacagcaucgcgaucccuaccaacuucaccaucagcgugaccaccgagauacugcccgugagcaugaccaagaccagcguggacuguaccauguacaucugcggcgacagcaccgagugcagcaaccugcugcugcaguacggcagcuucugcacccagcugaaccgggcccugaccggcaucgccguggagcaggacaagaacacccaagagguguucgcccaggugaagcagaucuacaagacucccccaaucaaggacuucggcggcuucaacuucagccagauccugcccgaccccagcaagcccagcaagcggagcuucaucgaggaccugcuguucaacaaggugacccuggccgacgccggcuucaucaagcaguacggcgacugccugggggauaucgccgcucgggaccugaucugcgcccagaaguucaacggccugaccgugcugcccccucugcugaccgacgagaugaucgcccaguacaccagcgcccugcuugccggcaccaucaccagcggcuggaccuucggcgccggcgcagcccugcagauccccuucgccaugcagauggccuaccgguucaacggcaucggcgugacccagaacgugcuguacgagaaccagaagcugaucgccaaccaguucaacagcgccaucggcaagauccaggacagccugagcagcaccgccagcgcccugggcaagcugcaggacguggugaaccagaacgcucaggcccugaacacccuggugaagcagcugagcagcaacuucggcgccaucagcucagugcugaaugacauccugagcaggcuggacaagguggaggccgaggugcagaucgaccggcugaucaccggccggcugcagagccugcagaccuacgugacccagcagcugauccgggccgccgagauccgggccagcgccaaccuggcagccaccaagaugagcgagugcgugcugggccagagcaagcggguggacuuuugcggcaagggcuaccaccugaugagcuucccccagagcgccccacacggcgugguguuccuccacgucacauacgugcccgcccaggagaagaacuucaccaccgcccccgccauuugccacgacggcaaggcucacuucccccgggagggaguguucgugagcaacggcacccacugguucgugacccagcggaacuucuacgagccccagaucaucaccaccgacaacaccuucgugagcggcaacugcgacguggugaucggcaucgugaacaacaccguguacgacccccugcagccugagcuggacagcuucaaggaggagcuggacaaguacuucaagaaccacaccagccccgacguggaucugggcgacaucagcggcaucaacgccagcguggugaacauccagaaggagaucgaccggcugaacgagguggccaagaaccugaacgagagccugaucgaccugcaggagcugggcaaguacgagcaguacaucaaguggcccugguacaucuggcugggcuucaucgccggccugaucgccaucgugaucgugaccaucaugcugugcugcaugaccagcugcuguagcugccugaagggcugcugcagcugcggcagcugcugcaaguucgacgaggacgacagcgagccagugcugaagggcgugaagcugcacuacaccugaugacucgagcugguacugcaugcacgcaaugcuagcugccccuuucccguccuggguaccccgagucucccccgaccucgggucccagguaugcucccaccuccaccugccccacucaccaccucugcuaguuccagacaccucccaagcacgcagcaaugcagcucaaaacgcuuagccuagccacacccccacgggaaacagcagugauuaaccuuuagcaauaaacgaaaguuuaacuaagcuauacuaaccccaggguuggucaauuucgugccagccacacccuggagcuagcaaaaaaaaaaaaaaaaaaaaaaaaaaaaaagcauaugacuaaaaaaaaaaaaaaaaaaaaaaaaaaaaaaaaaaaaaaaaaaaaaaaaaaaaaaaaaaaaaaaaaaaaaa

SEQ ID NO: 26773 - RNA, 4277 nt, Artificial Sequence
  SARS-CoV-2/Wuhan/WIV05/2019__EPI_ISL_402128 spike protein mRNA gc (1-1273)(H69del_V70del_A222V_Y453F_S477N_D614G_I692V)
agaauaaacuaguauucuucugguccccacagacucagagagaacccgccaccauguucguguuccuggugcugcugccccuggugagcagccagugcgugaaccugaccacccggacccagcugcccccugccuacaccaacagcuucacccggggcguguacuaccccgacaagguguuccggagcagcgugcugcacagcacccaggaccuguuccugcccuucuucagcaacgugaccugguuccacgccaucagcggcaccaacggcaccaagcgguucgacaacccagugcugcccuucaacgacggcguguacuucgccagcaccgagaagucaaacaucauccggggcuggaucuucggcaccacccuggacagcaagacacagagccugcugaucgugaacaacgccaccaacguggugaucaaggugugcgaguuucaguucugcaacgaccccuuccugggcguguacuaccacaagaacaacaagagcuggauggagagcgaguuccggguguacagcagcgcuaacaauugcaccuucgaguacgucagccagcccuuccugauggaccucgagggcaagcagggcaacuucaagaaccugcgggaguucguguucaagaacaucgauggcuacuucaagaucuacagcaagcacacccccaucaaccuggugcgggaccugccccagggauucagcgugcuggagccucugguggaccugcccaucggcaucaacaucaccagguuccagacccugcuggcccugcaccggagcuaccugacccccggcgacagcagcagcggcuggaccgccggcgccgccgccuacuacgugggcuaccugcagccacggaccuuccugcugaaguacaacgagaacggcaccaucaccgacgcaguggacugcgcccuggacccccugagcgagaccaagugcacccuaaagagcuucaccguggagaagggcaucuaccagaccagcaacuuccgggugcagcccacugagagcaucgugcgguuccccaacauuaccaaccugugucccuucggcgagguguucaacgccacccgguucgccagcguguacgccuggaaccggaagcggaucagcaacugcguggccgacuacagcgugcuguacaacagcgccagcuucagcaccuucaagugcuacggcgugagcccuaccaagcugaacgaccugugcuucaccaacguguacgccgacagcuucgugauccggggcgacgaggugcggcagaucgcucccggccagaccggcaagaucgccgacuacaacuacaagcugcccgacgacuucaccggcugcgugaucgccuggaacagcaacaaccuggacagcaaggugggcggcaacuacaacuaccuguuccggcuguuccguaagagcaaccugaagccauuugagcgggacaucagcaccgagaucuaccaggccggcaacacccccugcaacgguguggagggcuucaacugcuacuucccccugcagagcuacggcuuccagcccaccaacggcgugggcuaccagcccuaccgggugguggugcugagcuucgagcugcugcacgcccccgccaccgugugcggcccuaaaaagagcaccaaccuggugaagaacaagugcgugaauuucaacuucaacggccugaccggcaccggcgugcugaccgagagcaacaagaaguuccugcccuuccagcaguucggccgggauaucgccgacaccaccgacgccgugcgggacccccagacccuggagauccuggacaucaccccaugcagcuucggcggcgugagcgucaucacccccggcacaaacaccagcaaccagguggcagugcuguaccagggagugaacugcaccgaggugcccguggccauccacgccgaccagcugacccccaccuggcggguguacagcaccggcagcaacguguuccagacccgggccggcugccugaucggcgccgagcacgugaacaacagcuacgagugcgacauccccaucggcgccggcaucugcgcuuccuaccagacccagaccaacagcccccggcgggcccggagcguggccagccagagcgugaucgccuacaccaugagcuuaggcgccgagaacagcguggccuacagcaacaacagcaucgccaucccuaccaacuucaccaucagcgugaccaccgagauccugcccgugagcaugaccaagaccagcguggacuguaccauguacauaugcggcgacagcaccgagugcagcaaccugcugcugcaguacggcagcuucugcacccagcugaaccgggcgcugaccggcaucgccguggagcaggacaagaacacccaagagguguucgcccaggugaagcagaucuacaagacucccccaaucaaggacuucggcggcuucaacuucagccagauccugcccgaccccagcaagcccagcaagcggagcuucaucgaggaccugcuguucaacaaggugacccuggccgacgccggcuucaucaagcaguacggcgacugccugggggauaucgccgcccgggaccugaucugcgcucagaaguucaacggccugaccgugcugcccccucugcugaccgacgagaugaucgcccaguacaccagcgcccugcuugccggcaccaucaccagcggcuggaccuucggcgccggcgccgcacugcagauccccuucgccaugcagauggccuaccgguucaacggcaucggcgugacccagaacgugcuguacgagaaccagaagcugaucgccaaccaguucaacagcgccaucggcaagauccaggacagccugagcagcaccgccagcgcccugggcaagcugcaggacguggugaaccagaacgcccaggcucugaacacccuggugaagcagcugagcagcaauuuuggcgccaucagcagcgugcugaacgacauccugucaaggcuggacaagguggaggccgaggugcagaucgaccggcugaucaccggccggcugcagagccugcagaccuacgugacccagcagcugauccgggccgccgagauccgggccagcgccaaccuggccgcaaccaagaugagcgagugcgugcugggccagagcaagcggguggacuucugcggcaagggcuaccaccugaugagcuucccccagagcgccccacacggcguggucuuccuccacgugacauacgugcccgcccaggagaagaacuucaccaccgcccccgccaucugccacgacggcaaggcccacuucccccgggagggaguguucgugagcaacggcacccacugguucgugacccagcggaacuucuacgagccccagauuaucaccaccgacaacaccuucgugagcggcaacugcgacguggugaucggcaucgugaacaacaccguguacgacccccugcagccugagcuggacagcuucaaggaggagcuggacaaguacuucaagaaccacaccagccccgacguggaucugggcgacaucagcggcaucaacgcuagcguggugaacauccagaaggagaucgaccggcugaacgagguggccaagaaccugaacgagagccugaucgaccugcaggagcugggcaaguacgagcaguacaucaaguggcccugguacaucuggcugggcuucaucgccggccugaucgccaucgugauggugaccaucaugcugugcugcaugaccagcugcuguagcugccugaagggcugcugcagcugcggcagcugcugcaaguucgacgaggacgacagcgagccagugcugaagggcgugaagcugcacuacaccugaugacucgagcugguacugcaugcacgcaaugcuagcugccccuuucccguccuggguaccccgagucucccccgaccucgggucccagguaugcucccaccuccaccugccccacucaccaccucugcuaguuccagacaccucccaagcacgcagcaaugcagcucaaaacgcuuagccuagccacacccccacgggaaacagcagugauuaaccuuuagcaauaaacgaaaguuuaacuaagcuauacuaaccccaggguuggucaauuucgugccagccacacccuggagcuagcaaaaaaaaaaaaaaaaaaaaaaaaaaaaaagcauaugacuaaaaaaaaaaaaaaaaaaaaaaaaaaaaaaaaaaaaaaaaaaaaaaaaaaaaaaaaaaaaaaaaaaaaaa

SEQ ID NO: 26774 - RNA, 4277 nt, Artificial Sequence
  SARS-CoV-2/Wuhan/WIV05/2019__EPI_ISL_402128 spike protein mRNA gc (1-1273)(H69del_V70del_Y453F_D614G_I692V_M1229I)
agaauaaacuaguauucuucugguccccacagacucagagagaacccgccaccauguucguguuccuggugcugcugccccuggugagcagccagugcgugaaccugaccacccggacccagcugcccccugccuacaccaacagcuucacccggggcguguacuaccccgacaagguguuccggagcagcgugcugcacagcacccaggaccuguuccugcccuucuucagcaacgugaccugguuccacgccaucagcggcaccaacggcaccaagcgguucgacaacccagugcugcccuucaacgacggcguguacuucgccagcaccgagaagucaaacaucauccggggcuggaucuucggcaccacccuggacagcaagacacagagccugcugaucgugaacaacgccaccaacguggugaucaaggugugcgaguuucaguucugcaacgaccccuuccugggcguguacuaccacaagaacaacaagagcuggauggagagcgaguuccggguguacagcagcgcuaacaauugcaccuucgaguacgucagccagcccuuccugauggaccucgagggcaagcagggcaacuucaagaaccugcgggaguucguguucaagaacaucgauggcuacuucaagaucuacagcaagcacacccccaucaaccuggugcgggaccugccccagggauucagcgcccuggagccucugguggaccugcccaucggcaucaacaucaccagguuccagacccugcuggcccugcaccggagcuaccugacccccggcgacagcagcagcggcuggaccgccggcgccgccgcauacuacgugggcuaccugcagccacggaccuuccugcugaaguacaacgagaacggcaccaucaccgacgccguggacugcgcccuggacccccugagcgagaccaagugcacccuaaagagcuucaccguggagaagggcaucuaccagaccagcaacuuccgggugcagcccacugagagcaucgugcgguuccccaacauuaccaaccugugucccuucggcgagguguucaacgccacccgguucgccagcguguacgccuggaaccggaagcggaucagcaacugcguggccgacuacagcgugcuguacaacagcgccagcuucagcaccuucaagugcuacggcgugagcccuaccaagcugaacgaccugugcuucaccaacguguacgcugacagcuucgugauccggggcgacgaggugcggcagaucgcccccggccagaccggcaagaucgccgacuacaacuacaagcugcccgacgacuucaccggcugcgugaucgccuggaacagcaacaaccuggacagcaaggugggcggcaacuacaacuaccuguuccggcuguuccguaagagcaaccugaagccauuugagcgggacaucagcaccgagaucuaccaggccggcagcacccccugcaacgguguggagggcuucaacugcuacuucccccugcagagcuacggcuuccagcccaccaacggcgugggcuaccagcccuaccgggugguggugcugagcuucgagcugcugcacgcccccgccaccgugugcggcccuaaaaagagcaccaaccuggugaagaacaagugcgugaacuucaauuucaacggccugaccggcaccggcgugcugaccgagagcaacaagaaguuccugcccuuccagcaguucggccgggauaucgccgacaccaccgacgcagugcgggacccccagacccuggagauccuggacaucaccccaugcagcuucggcggcgugagcgugaucacccccggcacaaacaccagcaaccaggucgccgugcuguaccagggagugaacugcaccgaggugcccguggccauccacgccgaccagcugacccccaccuggcggguguacagcaccggcagcaacguguuccagacccgggccggcugccugaucggcgccgagcacgugaacaacuccuacgagugcgacauccccaucggcgcuggcaucugcgccagcuaccagacccagaccaacagcccccggcgggcccggagcguggccagccagagcgugaucgccuacaccaugagcuuaggcgccgagaacagcguggccuacagcaacaacagcaucgcgaucccuaccaacuucaccaucagcgugaccaccgagauccugcccgugagcaugaccaagaccagcguggacuguaccauguacauaugcggcgacagcaccgagugcagcaaccugcugcugcaguacggcagcuucugcacccagcugaaccgggcccugaccggcaucgccguggagcaggacaagaacacccaagagguguucgcccaggugaagcagaucuacaagacucccccaaucaaggacuucggcggcuucaacuucagccagauccugcccgaccccagcaagcccagcaagcggagcuucaucgaggaccugcuguucaacaaggugacccuggccgacgccggcuucaucaagcaguacggcgacugccugggggauaucgccgcucgggaccugaucugcgcccagaaguucaacggccugaccgugcugcccccucugcugaccgacgagaugaucgcccaguacaccagcgcccugcuugccggcaccaucaccagcggcuggaccuucggcgccggcgcagcccugcagauccccuucgccaugcagauggccuaccgguucaacggcaucggcgugacccagaacgugcuguacgagaaccagaagcugaucgccaaccaguucaacagcgccaucggcaagauccaggacagccugagcagcaccgccagcgcccugggcaagcugcaggacguggugaaccagaacgcucaggcccugaacacccuggugaagcagcugagcagcaacuuuggcgccaucagcucagugcugaaugacauccugagcaggcuggacaagguggaggccgaggugcagaucgaccggcugaucaccggccggcugcagagccugcagaccuacgugacccagcagcugauccgggccgccgagauccgggccagcgccaaccuggcagccaccaagaugagcgagugcgugcugggccagagcaagcggguggacuucugcggcaagggcuaccaccugaugagcuucccccagagcgccccacacggcgugguguuccuccacgucacauacgugcccgcccaggagaagaacuucaccaccgcccccgccaucugccacgacggcaaggcucacuucccccgggagggaguguucgugagcaacggcacccacugguucgugacccagcggaacuucuacgagccccagauuaucaccaccgacaacaccuucgugagcggcaacugcgacguggugaucggcaucgugaacaacaccguguacgacccccugcagccugagcuggacagcuucaaggaggagcuggacaaguacuucaagaaccacaccagccccgacguggaucugggcgacaucagcggcaucaacgccagcguggugaacauccagaaggagaucgaccggcugaacgagguggccaagaaccugaacgagagccugaucgaccugcaggagcugggcaaguacgagcaguacaucaaguggcccugguacaucuggcugggcuucaucgccggccugaucgccaucgugaucgugaccaucaugcugugcugcaugaccagcugcuguagcugccugaagggcugcugcagcugcggcagcugcugcaaguucgacgaggacgacagcgagccagugcugaagggcgugaagcugcacuacaccugaugacucgagcugguacugcaugcacgcaaugcuagcugccccuuucccguccuggguaccccgagucucccccgaccucgggucccagguaugcucccaccuccaccugccccacucaccaccucugcuaguuccagacaccucccaagcacgcagcaaugcagcucaaaacgcuuagccuagccacacccccacgggaaacagcagugauuaaccuuuagcaauaaacgaaaguuuaacuaagcuauacuaaccccaggguuggucaauuucgugccagccacacccuggagcuagcaaaaaaaaaaaaaaaaaaaaaaaaaaaaaagcauaugacuaaaaaaaaaaaaaaaaaaaaaaaaaaaaaaaaaaaaaaaaaaaaaaaaaaaaaaaaaaaaaaaaaaaaaa

SEQ ID NO: 26775 - RNA, 4274 nt, Artificial Sequence
  SARS-CoV-2/Wuhan/WIV05/2019__EPI_ISL_402128 spike protein mRNA gc (1-1273)(H69del_V70del_Y144del_N501Y_A570D_D614G_P681H_T716I_S982 A_D1118H)
agaauaaacuaguauucuucugguccccacagacucagagagaacccgccaccauguucguguuccuggugcugcugccccuggugagcagccagugcgugaaccugaccacccggacccagcugcccccugccuacaccaacagcuucacccggggcguguacuaccccgacaagguguuccggagcagcgugcugcacagcacccaggaccuguuccugcccuucuucagcaacgugaccugguuccacgccaucagcggcaccaacggcaccaagcgguucgacaacccagugcugcccuucaacgacggcguguacuucgccagcaccgagaagucaaacaucauccggggcuggaucuucggcaccacccuggacagcaagacacagagccugcugaucgugaacaacgccaccaacguggugaucaaggugugcgaguuucaguucugcaacgaccccuuccugggcguguaccacaagaacaacaagagcuggauggagagcgaguuccggguguacagcagcgcuaacaauugcaccuucgaguacgucagccagcccuuccugauggaccucgagggcaagcagggcaacuucaagaaccugcgggaguucguguucaagaacaucgauggcuacuucaagaucuacagcaagcacacccccaucaaccuggugcgggaccugccccagggauucagcgcccuggagccucugguggaccugcccaucggcaucaacaucaccagguuccagacccugcuggcccugcaccggagcuaccugacccccggcgacagcagcagcggcuggaccgccggcgccgccgcauacuacgugggcuaccugcagccacggaccuuccugcugaaguacaacgagaacggcaccaucaccgacgccguggacugcgcccuggacccccugagcgagaccaagugcacccuaaagagcuucaccguggagaagggcaucuaccagaccagcaacuuccgggugcagcccacugagagcaucgugcgguuccccaacauuaccaaccugugucccuucggcgagguguucaacgccacccgguucgccagcguguacgccuggaaccggaagcggaucagcaacugcguggccgacuacagcgugcuguacaacagcgccagcuucagcaccuucaagugcuacggcgugagcccuaccaagcugaacgaccugugcuucaccaacguguacgcugacagcuucgugauccggggcgacgaggugcggcagaucgcccccggccagaccggcaagaucgccgacuacaacuacaagcugcccgacgacuucaccggcugcgugaucgccuggaacagcaacaaccuggacagcaaggugggcggcaacuacaacuaccuguaccggcuguuccguaagagcaaccugaagccauucgagcgggacaucagcaccgagaucuaccaggccggcagcacccccugcaacgguguggagggcuuuaacugcuacuucccccugcagagcuacggcuuccagcccaccuacggcgugggcuaccagcccuaccgggugguggugcugagcuucgagcugcugcacgcccccgccaccgugugcggcccuaaaaagagcaccaaccuggugaagaacaagugcgugaacuucaacuucaauggccugaccggcaccggcgugcugaccgagagcaacaagaaguuccugcccuuccagcaguucggccgggauaucgacgacaccaccgacgccgugcgggacccccagacccuggagauccuggacaucaccccaugcagcuucggcggcgugagcgugaucacccccggcacaaacaccagcaaccaggucgcagugcuguaccagggagugaacugcaccgaggugcccguggccauccacgccgaccagcugacccccaccuggcggguguacagcaccggcagcaacguguuccagacccgggccggcugccugaucggcgccgagcacgugaacaacuccuacgagugcgacauccccaucggcgccggcaucugcgcuagcuaccagacccagaccaacagccaccggcgggcccggagcguggccagccagagcaucaucgccuacaccaugagcuuaggcgccgagaacagcguggccuacagcaacaacagcaucgccauccccaucaacuucaccauaagcgugaccaccgagauccugccugugagcaugaccaagaccagcguggacuguaccauguacaucugcggcgacagcaccgagugcagcaaccugcugcugcaguacggcagcuucugcacccagcugaaccgggcgcugaccggcaucgccguggagcaggacaagaacacccaagagguguucgcccaggugaagcagaucuacaagaccccacccaucaaggacuucggcggcuucaacuucagccagauccugcccgaccccagcaagcccagcaagcggagcuucaucgaggaccugcuguucaacaaggugacucuggccgacgccggcuucaucaagcaguacggcgauugccugggggacaucgccgcccgggaccugaucugcgcucagaaguucaacggccugaccgugcugccuccccugcugaccgacgagaugaucgcccaguacaccagcgcccugcuugccggcaccaucaccagcggcuggaccuucggcgccggcgccgcacugcagauccccuucgccaugcagauggccuaccgguucaacggcaucggcgugacccagaacgugcuguacgagaaccagaagcugaucgccaaccaguucaacagcgccaucggcaagauccaggacagccugagcagcaccgccagcgcccugggcaagcugcaggacguggugaaccagaacgcccaggcucugaacacccuggugaagcagcugagcagcaacuucggcgccaucagcucagugcugaacgacauccuggccaggcuggacaagguggaggccgaggugcagaucgaccggcugaucaccggccggcugcagagccugcagaccuacgugacccagcagcugauccgggccgccgagauucgggccagcgccaaucuggcagccaccaagaugagcgagugcgugcugggccagagcaagcggguggacuuuugcggcaagggcuaccaccugaugagcuucccccagagcgcuccccacggcgugguguuccuccacgugaccuacgucccagcccaggagaagaacuucacaaccgcccccgccaucugccacgacggcaaggcccacuucccccgggagggaguguucgugagcaacggcacccacugguucgugacccagcggaacuucuacgagccccagaucaucaccacccacaacaccuucgugagcggcaacugcgacguggugaucggcaucgugaacaacaccguguacgacccccugcagcccgagcuggacagcuucaaggaggagcuggacaaguacuucaagaaccacaccagcccugacguggaucugggcgacaucagcggcaucaacgccagcguggugaacauccagaaggagaucgaccggcugaacgagguggccaagaaccugaacgagagccugaucgaccugcaggagcugggcaaguacgagcaguacaucaaguggcccugguacaucuggcugggcuucaucgccggccugaucgccaucgugauggugaccaucaugcugugcugcaugaccagcugcuguagcugccugaagggcugcugcagcugcggcagcugcugcaaguucgacgaggacgacagcgagcccgugcugaagggcgugaagcugcacuacaccugaugacucgagcugguacugcaugcacgcaaugcuagcugccccuuucccguccuggguaccccgagucucccccgaccucgggucccagguaugcucccaccuccaccugccccacucaccaccucugcuaguuccagacaccucccaagcacgcagcaaugcagcucaaaacgcuuagccuagccacacccccacgggaaacagcagugauuaaccuuuagcaauaaacgaaaguuuaacuaagcuauacuaaccccaggguuggucaauuucgugccagccacacccuggagcuagcaaaaaaaaaaaaaaaaaaaaaaaaaaaaaagcauaugacuaaaaaaaaaaaaaaaaaaaaaaaaaaaaaaaaaaaaaaaaaaaaaaaaaaaaaaaaaaaaaaaaaaaaaa

SEQ ID NO: 26776 - RNA, 4283 nt, Artificial Sequence
  SARS-CoV-2/Wuhan/WIV05/2019__EPI_ISL_402128 spike protein mRNA gc (1-1273)(K417N_E484K_N501Y_D614G)
agaauaaacuaguauucuucugguccccacagacucagagagaacccgccaccauguucguguuccuggugcugcugccccuggugagcagccagugcgugaaccugaccacccggacccagcugcccccugccuacaccaacagcuucacccggggcguguacuaccccgacaagguguuccggagcagcgugcugcacagcacccaggaccuguuccugcccuucuucagcaacgugaccugguuccacgccauccacgugagcggcaccaacggcaccaagcgguucgacaacccagugcugcccuucaacgacggcguguacuucgccagcaccgagaagucaaacaucauccggggcuggaucuucggcaccacccuggacagcaagacacagagccugcugaucgugaacaacgccaccaacguggugaucaaggugugcgaguuucaguucugcaacgaccccuuccugggcguguacuaccacaagaacaacaagagcuggauggagagcgaguuccgggucuacagcagcgcuaacaauugcaccuucgaguacgugagccagcccuuccugauggaccucgagggcaagcagggcaacuucaagaaccugcgggaguucguguucaagaacaucgauggcuacuucaagaucuacagcaagcacacccccaucaaccuggugcgggaccugccccagggauucagcgcccuggagccucugguggaccugcccaucggcaucaacaucaccagguuccagacccugcuggcccugcaccggagcuaccugacccccggcgacagcagcagcggcuggaccgccggcgccgccgcauacuacgugggcuaccugcagccacggaccuuccugcugaaguacaacgagaacggcaccaucaccgacgccguggacugcgcccuggacccccugagcgagaccaagugcacccuaaagagcuucaccguggagaagggcaucuaccagaccagcaacuuccgggugcagcccacugagagcaucgugcgguuccccaacauuaccaaccugugucccuucggcgagguguucaacgccacccgguucgccagcguguacgccuggaaccggaagcggaucagcaacugcguggccgacuacagcgugcuguacaacagcgccagcuucagcaccuucaagugcuacggcgugagcccuaccaagcugaacgaccugugcuucaccaacguguacgcugacagcuucgugauccggggcgacgaggugcggcagaucgcccccggccagaccggcaacaucgccgacuacaacuacaagcugcccgacgacuucaccggcugcgugaucgccuggaacagcaacaaccuggacagcaaggugggcggcaacuacaacuaccuguaccggcuguuccguaagagcaaccugaagccauucgagcgggacaucagcaccgagaucuaccaggccggcagcacccccugcaacggugugaagggcuuuaacugcuacuucccccugcagagcuacggcuuccagcccaccuacggcgugggcuaccagcccuaccgggugguggugcugagcuucgagcugcugcacgcccccgccaccgugugcggcccuaaaaagagcaccaaccuggugaagaacaagugcgugaacuucaauuucaacggccugaccggcaccggcgugcugaccgagagcaacaagaaguuccugcccuuccagcaguucggccgggauaucgccgacaccaccgacgcagugcgggacccccagacccuggagauccuggacaucaccccaugcagcuucggcggcgugagcgucaucacccccggcacaaacaccagcaaccagguggccgugcuguaccagggagugaacugcaccgaggugcccguggccauccacgccgaccagcugacccccaccuggcggguguacagcaccggcagcaacguguuccagacccgggccggcugccugaucggcgccgagcacgugaacaacuccuacgagugcgacauccccaucggcgcuggcaucugcgccagcuaccagacccagaccaacagcccccggcgggcccggagcguggccagccagagcaucaucgccuacaccaugagcuuaggcgccgagaacagcguggccuacagcaacaacagcaucgcgaucccuaccaacuucaccaucagcgugaccaccgagauacugcccgugagcaugaccaagaccagcguggacuguaccauguacaucugcggcgacagcaccgagugcagcaaccugcugcugcaguacggcagcuucugcacccagcugaaccgggcccugaccggcaucgccguggagcaggacaagaacacccaagagguguucgcccaggugaagcagaucuacaagacucccccaaucaaggacuucggcggcuucaacuucagccagauccugcccgaccccagcaagcccagcaagcggagcuucaucgaggaccugcuguucaacaaggugacccuggccgacgccggcuucaucaagcaguacggcgacugccugggggauaucgccgcucgggaccugaucugcgcccagaaguucaacggccugaccgugcugcccccucugcugaccgacgagaugaucgcccaguacaccagcgcccugcuugccggcaccaucaccagcggcuggaccuucggcgccggcgcagcccugcagauccccuucgccaugcagauggccuaccgguucaacggcaucggcgugacccagaacgugcuguacgagaaccagaagcugaucgccaaccaguucaacagcgccaucggcaagauccaggacagccugagcagcaccgccagcgcccugggcaagcugcaggacguggugaaccagaacgcucaggcccugaacacccuggugaagcagcugagcagcaacuucggcgccaucagcucagugcugaaugacauccugagcaggcuggacaagguggaggccgaggugcagaucgaccggcugaucaccggccggcugcagagccugcagaccuacgugacccagcagcugauccgggccgccgagauccgggccagcgccaaccuggcagccaccaagaugagcgagugcgugcugggccagagcaagcggguggacuuuugcggcaagggcuaccaccugaugagcuucccccagagcgccccacacggcgugguguuccuccacgucacauacgugcccgcccaggagaagaacuucaccaccgcccccgccauuugccacgacggcaaggcucacuucccccgggagggaguguucgugagcaacggcacccacugguucgugacccagcggaacuucuacgagccccagaucaucaccaccgacaacaccuucgugagcggcaacugcgacguggugaucggcaucgugaacaacaccguguacgacccccugcagccugagcuggacagcuucaaggaggagcuggacaaguacuucaagaaccacaccagccccgacguggaucugggcgacaucagcggcaucaacgccagcguggugaacauccagaaggagaucgaccggcugaacgagguggccaagaaccugaacgagagccugaucgaccugcaggagcugggcaaguacgagcaguacaucaaguggcccugguacaucuggcugggcuucaucgccggccugaucgccaucgugauggugaccaucaugcugugcugcaugaccagcugcuguagcugccugaagggcugcugcagcugcggcagcugcugcaaguucgacgaggacgacagcgagccagugcugaagggcgugaagcugcacuacaccugaugacucgagcugguacugcaugcacgcaaugcuagcugccccuuucccguccuggguaccccgagucucccccgaccucgggucccagguaugcucccaccuccaccugccccacucaccaccucugcuaguuccagacaccucccaagcacgcagcaaugcagcucaaaacgcuuagccuagccacacccccacgggaaacagcagugauuaaccuuuagcaauaaacgaaaguuuaacuaagcuauacuaaccccaggguuggucaauuucgugccagccacacccuggagcuagcaaaaaaaaaaaaaaaaaaaaaaaaaaaaaagcauaugacuaaaaaaaaaaaaaaaaaaaaaaaaaaaaaaaaaaaaaaaaaaaaaaaaaaaaaaaaaaaaaaaaaaaaaa

SEQ ID NO: 26777 - RNA, 4274 nt, Artificial Sequence
  SARS-CoV-2/Wuhan/WIV05/2019__EPI_ISL_402128 spike protein mRNA gc (1-1273)(L18F_D80A_D215G_L242del_A243del_L244del_R246I_K417N_E484 K_N501Y_D614G_A701V)
agaauaaacuaguauucuucugguccccacagacucagagagaacccgccaccauguucguguuccuggugcugcugccccuggugagcagccagugcgugaacuucaccacccggacccagcugcccccugccuacaccaacagcuucacccggggcguguacuaccccgacaagguguuccggagcagcgugcugcacagcacccaggaccuguuccugcccuucuucagcaacgugaccugguuccacgccauccacgugagcggcaccaacggcaccaagcgguucgccaacccagugcugcccuucaacgacggcguguacuucgccagcaccgagaagucaaacaucauccggggcuggaucuuuggcaccacccuggacagcaagacacagagccugcugaucgugaacaacgcuaccaacguggugaucaaggugugcgaguuccaguucugcaacgaccccuuccugggcguguacuaccacaagaacaacaagagcuggauggagagcgaguuccgggucuacagcagcgccaacaauugcaccuucgaguacgugagccagcccuuccugauggaccuggagggcaagcagggcaacuucaagaaccuccgggaguucguguucaagaacaucgacggcuacuucaagaucuacagcaagcacacccccaucaaccuggugcggggacugccccagggcuucagcgcccuggagccucugguggaucugcccaucggcaucaacaucaccagguuccagacccugcacaucagcuaccugacccccggcgacagcagcagcggcuggaccgccggcgccgccgcauacuacgugggcuaccugcagccacggaccuuccugcugaaguacaacgagaacggcaccaucaccgacgccguggacugcgcccuggacccccugagcgagaccaagugcacccuuaagagcuucaccguggagaagggcaucuaccagaccagcaacuuccgggugcagcccacugagagcauugugcgguuccccaacaucaccaaccugugucccuucggcgagguguucaacgccacccgguucgccagcguguacgccuggaaccggaagcggaucagcaacugcguggccgacuacagcgugcuguacaacagcgccagcuucagcaccuucaagugcuacggcgugagcccuaccaagcugaacgaccugugcuucaccaacguguacgcugacagcuucgugauccggggcgacgaggugcggcagaucgcccccggccagaccggcaacaucgccgacuacaacuacaagcugcccgacgacuucaccggcugcgugaucgccuggaacagcaacaaccuggacagcaaggugggcggcaacuacaacuaccuguaccggcuauuccguaagagcaaccugaagccauuugagcgggacaucagcaccgagaucuaccaggccgguagcacccccugcaacggcgugaagggcuucaacugcuacuucccccugcagagcuacggcuuccagcccaccuacggcgugggcuaccagcccuaccgggugguggugcugagcuucgagcugcugcacgcccccgccaccgugugcggcccuaaaaagagcaccaaccuggugaagaacaagugcgugaacuucaauuucaacggccugaccggcaccggcgugcugaccgagagcaacaagaaguuccugcccuuccagcaguucggccgggacaucgccgacaccaccgaugcagugcgggacccccagacccuggagauccuggacaucaccccaugcagcuucggcggcgugagcgucaucacccccggaacaaacaccagcaaccagguggccgugcuguaccagggcgugaacugcaccgaggugcccguggccauccacgccgaccagcugacccccaccuggcggguguacagcaccggcagcaacguguuccagacccgggccggcugccugaucggcgccgagcacgugaacaacuccuacgagugcgacauccccaucggcgcuggcaucugcgccagcuaccagacccagaccaacagcccccggcgggcccggagcguggccagccagagcaucaucgccuacaccaugagccugggcguggagaacagcguggccuacagcaacaacagcaucgccaucccuaccaacuucaccauaagcgugaccaccgagauccugcccgugagcaugaccaagaccagcguggacuguaccauguacaucugcggcgacagcaccgagugcagcaaccuguuacugcaguacggcagcuucugcacccagcugaaccgggcgcugaccggcaucgccguggagcaggacaagaacacccaagagguguucgcccaggugaagcagaucuacaagacucccccaaucaaggacuucggcggcuucaacuucagccagauccugcccgaccccagcaagcccagcaagcggagcuucaucgaggaccugcuguucaacaaggugacccuggccgacgccggcuucaucaagcaguacggggacugccugggcgacaucgccgcccgggaccugaucugcgcucagaaguucaacggccugaccgugcugcccccucugcugaccgaugagaugaucgcccaguacaccagcgcccugcuggccggcaccaucaccagcggcuggaccuucggcgccggcgccgcacugcagauccccuucgccaugcagauggccuaccgguucaacggcaucggcgugacccagaacgugcuguacgagaaccagaagcugaucgccaaccaguucaacagcgccaucggcaagauccaggacagccugagcagcaccgccagcgcccugggcaagcugcaggacguggugaaccagaacgcccaggcucugaacacccuggugaagcagcugagcagcaacuuuggcgccaucagcucagugcugaaugacauccugagccggcuggacaagguggaggccgaggugcagaucgacaggcugaucaccggccggcugcagagccugcagaccuacgugacccagcagcugauccgggccgccgagauucgggccagcgccaaccuggccgcaaccaagaugagcgagugcgugcugggccagagcaagcggguggacuucugcggcaagggcuaccaccugaugagcuucccccagagcgccccacacggcguggucuuccugcacgugacauacgugcccgcccaggagaagaacuucaccaccgcccccgccaucugccacgacggaaaggcccacuucccccgggagggcguguucgugagcaacggcacccacugguucgugacccagcggaacuucuacgagccccagaucaucaccaccgacaacaccuucgugagcggcaacugcgacguggugaucggcaucgugaacaacaccguguacgacccccugcagccugagcuggacagcuucaaggaggagcucgacaaguacuucaagaaccacaccagccccgacguggaccugggcgacaucagcggcaucaacgcuagcguggugaacauccagaaggagaucgaucggcugaacgagguggccaagaaccugaacgagagccugaucgaccugcaggagcugggcaaguacgagcaguacaucaaguggcccugguacaucuggcugggcuucaucgccggccugaucgccaucgugauggugaccaucaugcugugcugcaugaccagcugcuguagcugccugaagggcugcugcagcugcggcagcugcugcaaguucgacgaggacgacagcgagccagugcugaagggcgugaagcugcacuacaccugaugacucgagcugguacugcaugcacgcaaugcuagcugccccuuucccguccuggguaccccgagucucccccgaccucgggucccagguaugcucccaccuccaccugccccacucaccaccucugcuaguuccagacaccucccaagcacgcagcaaugcagcucaaaacgcuuagccuagccacacccccacgggaaacagcagugauuaaccuuuagcaauaaacgaaaguuuaacuaagcuauacuaaccccaggguuggucaauuucgugccagccacacccuggagcuagcaaaaaaaaaaaaaaaaaaaaaaaaaaaaaagcauaugacuaaaaaaaaaaaaaaaaaaaaaaaaaaaaaaaaaaaaaaaaaaaaaaaaaaaaaaaaaaaaaaaaaaaaaa

SEQ ID NO: 26778 - RNA, 4283 nt, Artificial Sequence
  SARS-CoV-2/Wuhan/WIV05/2019__EPI_ISL_402128 spike protein mRNA gc (1-1273)(E484K_D614G)
agaauaaacuaguauucuucugguccccacagacucagagagaacccgccaccauguucguguuccuggugcugcugccccuggugagcagccagugcgugaaccugaccacccggacccagcugcccccugccuacaccaacagcuucacccggggcguguacuaccccgacaagguguuccggagcagcgugcugcacagcacccaggaccuguuccugcccuucuucagcaacgugaccugguuccacgccauccacgugagcggcaccaacggcaccaagcgguucgacaacccagugcugcccuucaacgacggcguguacuucgccagcaccgagaagucaaacaucauccggggcuggaucuucggcaccacccuggacagcaagacacagagccugcugaucgugaacaacgccaccaacguggugaucaaggugugcgaguuucaguucugcaacgaccccuuccugggcguguacuaccacaagaacaacaagagcuggauggagagcgaguuccgggucuacagcagcgcuaacaauugcaccuucgaguacgugagccagcccuuccugauggaccucgagggcaagcagggcaacuucaagaaccugcgggaguucguguucaagaacaucgauggcuacuucaagaucuacagcaagcacacccccaucaaccuggugcgggaccugccccagggauucagcgcccuggagccucugguggaccugcccaucggcaucaacaucaccagguuccagacccugcuggcccugcaccggagcuaccugacccccggcgacagcagcagcggcuggaccgccggcgccgccgcauacuacgugggcuaccugcagccacggaccuuccugcugaaguacaacgagaacggcaccaucaccgacgccguggacugcgcccuggacccccugagcgagaccaagugcacccuaaagagcuucaccguggagaagggcaucuaccagaccagcaacuuccgggugcagcccacugagagcaucgugcgguuccccaacauuaccaaccugugucccuucggcgagguguucaacgccacccgguucgccagcguguacgccuggaaccggaagcggaucagcaacugcguggccgacuacagcgugcuguacaacagcgccagcuucagcaccuucaagugcuacggcgugagcccuaccaagcugaacgaccugugcuucaccaacguguacgcugacagcuucgugauccggggcgacgaggugcggcagaucgcccccggccagaccggcaagaucgccgacuacaacuacaagcugcccgacgacuucaccggcugcgugaucgccuggaacagcaacaaccuggacagcaaggugggcggcaacuacaacuaccuguaccggcuguuccguaagagcaaccugaagccauucgagcgggacaucagcaccgagaucuaccaggccggcagcacccccugcaacggugugaagggcuuuaacugcuacuucccccugcagagcuacggcuuccagcccaccaacggcgugggcuaccagcccuaccgggugguggugcugagcuucgagcugcugcacgcccccgccaccgugugcggcccuaaaaagagcaccaaccuggugaagaacaagugcgugaacuucaauuucaacggccugaccggcaccggcgugcugaccgagagcaacaagaaguuccugcccuuccagcaguucggccgggauaucgccgacaccaccgacgcagugcgggacccccagacccuggagauccuggacaucaccccaugcagcuucggcggcgugagcgucaucacccccggcacaaacaccagcaaccagguggccgugcuguaccagggagugaacugcaccgaggugcccguggccauccacgccgaccagcugacccccaccuggcggguguacagcaccggcagcaacguguuccagacccgggccggcugccugaucggcgccgagcacgugaacaacuccuacgagugcgacauccccaucggcgcuggcaucugcgccagcuaccagacccagaccaacagcccccggcgggcccggagcguggccagccagagcaucaucgccuacaccaugagcuuaggcgccgagaacagcguggccuacagcaacaacagcaucgcgaucccuaccaacuucaccaucagcgugaccaccgagauacugcccgugagcaugaccaagaccagcguggacuguaccauguacaucugcggcgacagcaccgagugcagcaaccugcugcugcaguacggcagcuucugcacccagcugaaccgggcccugaccggcaucgccguggagcaggacaagaacacccaagagguguucgcccaggugaagcagaucuacaagacucccccaaucaaggacuucggcggcuucaacuucagccagauccugcccgaccccagcaagcccagcaagcggagcuucaucgaggaccugcuguucaacaaggugacccuggccgacgccggcuucaucaagcaguacggcgacugccugggggauaucgccgcucgggaccugaucugcgcccagaaguucaacggccugaccgugcugcccccucugcugaccgacgagaugaucgcccaguacaccagcgcccugcuugccggcaccaucaccagcggcuggaccuucggcgccggcgcagcccugcagauccccuucgccaugcagauggccuaccgguucaacggcaucggcgugacccagaacgugcuguacgagaaccagaagcugaucgccaaccaguucaacagcgccaucggcaagauccaggacagccugagcagcaccgccagcgcccugggcaagcugcaggacguggugaaccagaacgcucaggcccugaacacccuggugaagcagcugagcagcaacuucggcgccaucagcucagugcugaaugacauccugagcaggcuggacaagguggaggccgaggugcagaucgaccggcugaucaccggccggcugcagagccugcagaccuacgugacccagcagcugauccgggccgccgagauccgggccagcgccaaccuggcagccaccaagaugagcgagugcgugcugggccagagcaagcggguggacuuuugcggcaagggcuaccaccugaugagcuucccccagagcgccccacacggcgugguguuccuccacgucacauacgugcccgcccaggagaagaacuucaccaccgcccccgccauuugccacgacggcaaggcucacuucccccgggagggaguguucgugagcaacggcacccacugguucgugacccagcggaacuucuacgagccccagaucaucaccaccgacaacaccuucgugagcggcaacugcgacguggugaucggcaucgugaacaacaccguguacgacccccugcagccugagcuggacagcuucaaggaggagcuggacaaguacuucaagaaccacaccagccccgacguggaucugggcgacaucagcggcaucaacgccagcguggugaacauccagaaggagaucgaccggcugaacgagguggccaagaaccugaacgagagccugaucgaccugcaggagcugggcaaguacgagcaguacaucaaguggcccugguacaucuggcugggcuucaucgccggccugaucgccaucgugauggugaccaucaugcugugcugcaugaccagcugcuguagcugccugaagggcugcugcagcugcggcagcugcugcaaguucgacgaggacgacagcgagccagugcugaagggcgugaagcugcacuacaccugaugacucgagcugguacugcaugcacgcaaugcuagcugccccuuucccguccuggguaccccgagucucccccgaccucgggucccagguaugcucccaccuccaccugccccacucaccaccucugcuaguuccagacaccucccaagcacgcagcaaugcagcucaaaacgcuuagccuagccacacccccacgggaaacagcagugauuaaccuuuagcaauaaacgaaaguuuaacuaagcuauacuaaccccaggguuggucaauuucgugccagccacacccuggagcuagcaaaaaaaaaaaaaaaaaaaaaaaaaaaaaagcauaugacuaaaaaaaaaaaaaaaaaaaaaaaaaaaaaaaaaaaaaaaaaaaaaaaaaaaaaaaaaaaaaaaaaaaaaa

SEQ ID NO: 26779 - RNA, 4283 nt, Artificial Sequence
  SARS-CoV-2/Wuhan/WIV05/2019__EPI_ISL_402128 spike protein mRNA gc (1-1273)(L18F_T20N_P26S_D138Y_R190S_K417T_E484K_N501Y_D614G_H655Y _T1027I)
agaauaaacuaguauucuucugguccccacagacucagagagaacccgccaccauguucguguuccuggugcugcugccccuggugagcagccagugcgugaacuucaccaaccggacccagcugcccagcgccuacaccaacagcuucacccggggcguguacuacccugacaagguguuccggagcagcgugcugcacagcacccaggaccuguuccugcccuucuucagcaacgugaccugguuccacgccauccacgugagcggcaccaacggcaccaagcgguucgacaaccccgugcugccauucaacgacggcguguacuucgccagcaccgagaagucaaacaucauccggggcuggaucuuuggcaccacccuggacagcaagacccagagccugcugaucgugaacaacgccacaaacguggugaucaaggugugcgaguuccaguucugcaacuaccccuuccugggcguguacuaccacaagaacaacaagagcuggauggagagcgaguuccgggucuacagcagcgcuaauaacugcaccuucgaguacgugagccagcccuuccugauggaccuggagggcaagcagggcaacuucaagaaccucagcgaguucguguucaagaacaucgacggcuacuucaagaucuacagcaagcacacccccaucaaccuggugcgggaucugccccagggauucagcgcccuggagccccugguggaccugccuaucggcaucaacaucacccgguuccagacccugcuggcccugcacaggagcuaccugacccccggcgacagcagcagcggcuggaccgccggcgccgccgcauacuacgugggcuaccugcagccccggaccuuccugcugaaguacaacgagaacggcaccaucaccgacgccguggacugcgcccuggacccacugagcgagaccaagugcacccuaaagagcuucaccguggagaagggcaucuaccagaccagcaacuuccgggugcagcccaccgagagcaucgugcgguuccccaacauuacuaaccugugucccuucggcgagguguucaacgccacccgguucgccagcguguacgccuggaaccggaagcggaucagcaacugcguggccgacuacagcgugcuguacaacagcgccagcuucagcaccuucaagugcuacggcgugagccccaccaagcugaacgaccugugcuucaccaacguguacgcugacagcuucgugauccggggcgacgaggugcggcagaucgccccuggccagaccggcaccaucgccgacuacaacuacaagcugcccgacgacuucaccggcugcgugaucgccuggaacagcaacaaccuggacagcaaggugggcggcaacuacaacuaccuguaccggcuguuccguaagagcaaccugaagcccuuugagcgggacaucagcaccgagaucuaccaggccggcagcaccccaugcaacggugugaagggcuucaacugcuacuucccccugcagagcuacggcuuccagcccaccuacggcgugggcuaccagcccuaccgggugguggugcugagcuucgagcugcugcacgcccccgccaccgugugcggccccaaaaagagcaccaaccuggugaagaacaagugcgugaacuucaauuucaacggccugaccggcaccggcgugcugaccgagagcaacaagaaguuccugccuuuccagcaguucggccgggacaucgccgauaccaccgacgcagugcgggacccccagacccuggagauccuggacaucacccccugcagcuucggcggcgugagcgucaucaccccaggcacaaacaccagcaaccagguggccgugcuguaccagggagugaacugcaccgaggugcccguggccauccacgccgaccagcugacccccaccuggcggguguacuccaccggcagcaacguguuccagacccgggccggcugccugaucggcgccgaguacgugaacaacagcuacgagugcgacauccccaucggcgcuggcaucugcgccagcuaccagacccagaccaacagcccccggcgggcccggagcguggccagccagagcaucaucgccuacaccaugagccugggcgccgagaacagcguggccuacagcaacaacagcaucgcgauccccaccaacuucaccaucagcgugaccaccgagauauuaccugugagcaugaccaagaccagcguggacuguaccauguacaucugcggcgacagcaccgagugcagcaaccugcugcugcaguacggcagcuucugcacccagcugaaccgggcccugaccggcaucgccguggagcaggacaagaacacccaagagguguucgcccaggugaagcagaucuacaagacuccacccaucaaggacuucggcggcuucaacuucagccagauccugcccgaccccagcaagcccagcaagcggagcuucaucgaggaccugcuguucaacaaggugacccuggccgacgccggcuucaucaagcaguacggcgacugccugggggacaucgccgcucgggaucugaucugcgcccagaaguucaacggccugaccgugcugccuccccugcugaccgacgagaugaucgcccaguacaccagcgcccugcuggccggcaccaucaccagcggcuggaccuucggcgccggcgcagcccuucagauccccuucgccaugcagauggccuaccgguucaacggcaucggcgugacccagaacgugcuguacgagaaccagaagcugaucgccaaccaguucaacagcgccaucggcaagauccaggacagccugagcagcaccgccagcgcccugggcaagcugcaggacguggugaaccagaacgcucaggcccugaacacccuggugaagcagcugagcucaaacuuuggcgccaucagcagcgugcugaaugacauccugagccggcuggacaagguggaggccgaggugcagaucgacaggcugaucaccggccggcugcagagccugcagaccuacgugacccagcagcugauccgggccgccgagauccgggccagcgccaaccuggcagccauuaagaugagcgagugcgugcugggccagagcaagcggguggacuucugcggcaagggcuaccaccugaugagcuucccccagagcgcuccccacggcgugguguuccugcacgucaccuacgugccagcccaggagaagaacuucacaaccgcccccgccaucugccacgacggcaaggcccacuucccccgggagggaguguucgugagcaacggcacccacugguucgugacccagcggaacuucuacgagccccagaucaucaccaccgacaacaccuucgugagcggcaacugcgacguggugaucggcaucgugaacaacaccguguacgacccccuccagcccgagcuggacagcuucaaggaggagcuggacaaguacuucaagaaccacaccagcccugacguggaccugggcgauaucagcggcaucaacgccagcguggugaacauccagaaggagaucgaccggcugaacgagguggccaagaaccugaacgagagccugaucgaccugcaggagcugggcaaguacgagcaguacaucaaguggcccugguacaucuggcugggcuucaucgccggccugaucgccaucgugauggugaccaucaugcugugcugcaugaccagcugcuguagcugccugaagggcugcugcagcugcggcagcugcugcaaguucgacgaggacgacagcgagcccgugcugaagggcgugaagcugcacuacaccugaugacucgagcugguacugcaugcacgcaaugcuagcugccccuuucccguccuggguaccccgagucucccccgaccucgggucccagguaugcucccaccuccaccugccccacucaccaccucugcuaguuccagacaccucccaagcacgcagcaaugcagcucaaaacgcuuagccuagccacacccccacgggaaacagcagugauuaaccuuuagcaauaaacgaaaguuuaacuaagcuauacuaaccccaggguuggucaauuucgugccagccacacccuggagcuagcaaaaaaaaaaaaaaaaaaaaaaaaaaaaaagcauaugacuaaaaaaaaaaaaaaaaaaaaaaaaaaaaaaaaaaaaaaaaaaaaaaaaaaaaaaaaaaaaaaaaaaaaaa

SEQ ID NO: 26780 - RNA, 4283 nt, Artificial Sequence
  SARS-CoV-2/Wuhan/WIV05/2019__EPI_ISL_402128 spike protein mRNA gc (1-1273)(S13I_W152C_L452R_D614G)
agaauaaacuaguauucuucugguccccacagacucagagagaacccgccaccauguucguguuccuggugcugcugccccuggugagcauccagugcgugaaccugaccacccggacccagcugcccccugccuacaccaacagcuucacccggggcguguacuaccccgacaagguguuccggagcagcgugcugcacagcacccaggaccuguuccugcccuucuucagcaacgugaccugguuccacgccauccacgugagcggcaccaacggcaccaagcgguucgacaacccagugcugcccuucaacgacggcguguacuucgccagcaccgagaagucaaacaucauccggggcuggaucuucggcaccacccuggacagcaagacacagagccugcugaucgugaacaacgccaccaacguggugaucaaggugugcgaguuucaguucugcaacgaccccuuccugggcguguacuaccacaagaacaacaagagcugcauggagagcgaguuccgggucuacagcagcgcuaacaauugcaccuucgaguacgugagccagcccuuccugauggaccucgagggcaagcagggcaacuucaagaaccugcgggaguucguguucaagaacaucgauggcuacuucaagaucuacagcaagcacacccccaucaaccuggugcgggaccugccccagggauucagcgcccuggagccucugguggaccugcccaucggcaucaacaucaccagguuccagacccugcuggcccugcaccggagcuaccugacccccggcgacagcagcagcggcuggaccgccggcgccgccgcauacuacgugggcuaccugcagccacggaccuuccugcugaaguacaacgagaacggcaccaucaccgacgccguggacugcgcccuggacccccugagcgagaccaaguguacccuaaagagcuucaccguggagaagggcaucuaccagaccagcaacuuccgggugcagcccacugagagcauugugcgguuccccaacaucaccaaccugugccccuucggcgagguguucaacgccacccgguucgccagcguguacgccuggaaccggaagcggaucagcaacugcguggccgacuacagcgugcuguacaacagcgccagcuucagcaccuucaagugcuacggcgugagcccuaccaagcugaacgaccugugcuucaccaacguguacgcugacagcuucgugauccggggcgacgaggugcggcagaucgcccccggccagaccggcaagaucgccgacuacaacuacaagcugcccgacgacuucaccggcugcgugaucgccuggaacagcaacaaccuggacagcaaggugggcggcaacuacaacuaccgguaccggcuguuccguaagagcaaccugaagccauucgagcgggacaucagcaccgagaucuaccaggccggcagcacccccugcaacgguguggagggcuuuaacugcuacuucccccugcagagcuacggcuuccagcccaccaacggcgugggcuaccagcccuaccgggugguggugcugagcuucgagcugcugcacgcccccgccaccgugugcggcccuaaaaagagcaccaaccuggugaagaacaagugcgugaacuucaauuucaacggccugaccggcaccggcgugcugaccgagagcaacaagaaguuccugcccuuccagcaguucggccgggauaucgccgacaccaccgacgcagugcgggacccccagacccuggagauccuggacaucaccccaugcagcuucggcggcgugagcgucaucacccccggcacaaacaccagcaaccagguggccgugcuguaccagggagugaacugcaccgaggugcccguggccauccacgccgaccagcugacccccaccuggcggguguacagcaccggcagcaacguguuccagacccgggccggcugccugaucggcgccgagcacgugaacaacagcuacgagugcgacauccccaucggcgcuggcaucugugccuccuaccagacccagaccaacagcccccggcgggcccggagcguggccagccagagcaucaucgccuacaccaugagccugggcgccgagaacagcguggccuacagcaacaacagcaucgcgaucccuaccaacuucaccauaagcgugaccaccgagaucuuacccgugagcaugaccaagaccagcguggacugcaccauguacaucugcggcgacagcaccgagugcagcaaccugcugcugcaguacggcagcuucugcacccagcugaaccgggcccugaccggcaucgccguggagcaggacaagaacacccaagagguguucgcccaggugaagcagaucuacaagacucccccaaucaaggacuucggcggcuucaacuucagccagauccugcccgaccccagcaagcccagcaagcggagcuucaucgaggaccugcuguucaacaaggugacccuggccgacgccggcuucaucaagcaguacggcgacugccugggggauaucgccgcucgggaccugaucugcgcccagaaguucaacggccugaccgugcugcccccucugcugaccgacgagaugaucgcccaguacaccagcgcccugcuggccggcaccaucaccagcggcuggaccuucggcgccggcgcagcccuucagauccccuucgccaugcagauggccuacagguucaacggcaucggcgugacccagaacgugcuguacgagaaccagaagcugaucgccaaccaguucaacagcgccaucggcaagauccaggacagccugagcagcaccgccagcgcccugggcaagcugcaggacguggugaaccagaacgcucaggcccugaacacccuggugaagcagcugagcagcaacuucggcgccaucagcagcgugcugaaugacauccugucacggcuggacaagguggaggccgaggugcagaucgaccggcugaucaccggccggcugcagagccugcagaccuacgugacccagcagcugauccgggccgccgagauucgggccagcgccaaccuggcagccaccaagaugagcgagugcgugcugggccagagcaagcggguggacuuuugcggcaagggcuaccaccugaugagcuucccccagagcgccccacacggcgugguguuccugcacgucacauacgugcccgcccaggagaagaacuucaccaccgcccccgccaucugccacgacggcaaggcucacuucccccgggagggaguguucgugagcaacggcacccacugguucgugacccagcggaacuucuacgagccccagaucaucaccaccgacaacaccuucgugagcggcaacugcgacguggugaucggcaucgugaacaacaccguguacgacccccuccagccugagcuggacagcuucaaggaggagcuggacaaguacuucaagaaccacaccagccccgacguggaucugggcgacaucagcggcaucaacgccagcguggugaacauccagaaggagaucgaccggcugaacgagguggccaagaaccugaacgagagccugaucgaccugcaggagcugggcaaguacgagcaguacaucaaguggcccugguacaucuggcugggcuucaucgccggccugaucgccaucgugauggugaccaucaugcugugcugcaugaccagcuguugcagcugccugaagggcugcugcagcugcggcagcugcugcaaguucgacgaggacgacagcgagccagugcugaagggcgugaagcugcacuacaccugaugacucgagcugguacugcaugcacgcaaugcuagcugccccuuucccguccuggguaccccgagucucccccgaccucgggucccagguaugcucccaccuccaccugccccacucaccaccucugcuaguuccagacaccucccaagcacgcagcaaugcagcucaaaacgcuuagccuagccacacccccacgggaaacagcagugauuaaccuuuagcaauaaacgaaaguuuaacuaagcuauacuaaccccaggguuggucaauuucgugccagccacacccuggagcuagcaaaaaaaaaaaaaaaaaaaaaaaaaaaaaagcauaugacuaaaaaaaaaaaaaaaaaaaaaaaaaaaaaaaaaaaaaaaaaaaaaaaaaaaaaaaaaaaaaaaaaaaaaa

SEQ ID NO: 26781 - RNA, 4283 nt, Artificial Sequence
  SARS-CoV-2/Wuhan/WIV05/2019__EPI_ISL_402128 spike protein mRNA gc mod (1-1273)
agaauaaacuaguauucuucugguccccacagacucagagagaacccgccaccauguucguguuucuggugcugcugccccugguguccagccagugugugaaccugaccaccagaacacagcugccuccagccuacaccaacagcuucaccagaggcguguacuaccccgacaagguguucagauccagcgugcugcacucuacccaggaccuguuccugccuuucuucagcaacgugaccugguuccacgccauccacguguccggcaccaauggcaccaagagauucgacaaccccgugcugcccuucaacgacgggguguacuuugccagcaccgagaaguccaacaucaucagaggcuggaucuucggcaccacacuggacagcaagacccagagccugcugaucgugaacaacgccaccaacguggucaucaaagugugcgaguuccaguucugcaacgaccccuuccugggcgucuacuaccacaagaacaacaagagcuggauggaaagcgaguuccggguguacagcagcgccaacaacugcaccuucgaguacgugucccagccuuuccugauggaccuggaaggcaagcagggcaacuucaagaaccugcgcgaguucguguucaagaacaucgacggcuacuucaaaaucuacagcaagcacaccccuaucaaccucgugcgggaucugccucagggcuucucugcucuggaaccccugguggaucugcccaucggcaucaacaucacccgguuucagacacugcuggcccugcacagaagcuaccugacaccuggcgauagcagcagcggauggacagcuggugccgccgcuuacuaugugggcuaccugcagccuagaaccuuccugcugaaguacaacgagaacggcaccaucaccgacgccguggauugugcucuggauccucugagcgagacaaagugcacccugaaguccuucaccguggaaaagggcaucuaccagaccagcaacuuccgggugcagcccaccgaauccaucgugcgguuccccaauaucaccaaucugugccccuucggcgagguguucaaugccaccagauucgccucuguguacgccuggaaccggaagcggaucagcaauugcguggccgacuacuccgugcuguacaacuccgccagcuucagcaccuucaagugcuacggcguguccccuaccaagcugaacgaccugugcuucacaaacguguacgccgacagcuucgugauccggggagaugaagugcggcagauugccccuggacagacaggcaagaucgccgacuacaacuacaagcugcccgacgacuucaccggcugugugauugccuggaacagcaacaaccuggacuccaaagucggcggcaacuacaauuaccuguaccggcuguuccggaaguccaaucugaagcccuucgagcgggacaucagcaccgaaaucuaucaggccggcagcaccccuugcaacggcguggaaggcuucaacugcuacuucccacugcaguccuacggcuuucagcccacaaauggcgugggcuaucagcccuacagagugguggugcugagcuucgaacugcugcaugcuccugccacagugugcggcccuaagaaaagcaccaaucucgugaagaacaaaugcgugaacuucaacuucaacggccugaccggcaccggcgugcugacagagagcaacaagaaguuccugccauuccagcaguuuggccgggauaucgccgauaccacagacgccguuagagauccccagacacuggaaauccuggacaucaccccaugcagcuucggcggagugucugugaucaccccuggcaccaacaccagcaaucagguggcagugcuguaccaggacgugaacuguaccgaagugcccguggccauucacgccgaucagcugacaccuacauggcggguguacuccaccggcagcaauguguuucagaccagagccggcugucugaucggagccgagcacgugaacaauagcuacgagugcgacauccccaucggcgcuggcaucugugccagcuaccagacacagacaaacagccccagacgggcuagaagcguggccagccagagcaucauugccuacacaaugucucugggcgccgagaacagcguggccuacuccaacaacucuaucgcuauccccaccaacuucaccaucagcgugaccaccgagauccugccuguguccaugaccaagaccagcguggacugcaccauguacaucugcggcgauuccaccgagugcuccaaccugcugcugcaguacggcagcuucugcacccagcugaauagagcccugacagggaucgccguggaacaggacaagaacacccaagagguguucgcccaagugaagcaaaucuacaagaccccuccuaucaaggacuucggcggcuucaauuucagccagauucugcccgauccuagcaagcccagcaagcggagcuucaucgaggaccugcuguucaacaaagugacacuggccgacgccggcuucaucaagcaguauggcgauugucugggcgacauugccgccagggaucugauuugcgcccagaaguuuaacggacugacagugcugccuccucugcugaccgaugagaugaucgcccaguacacaucugcccugcuggccggcacaaucacaagcggcuggacauuuggagcuggcgccgcucugcagauccccuuugcuaugcagauggccuaccgguucaacggcaucggagugacccagaaugugcuguacgagaaccagaagcugaucgccaaccaguucaacagcgccaucggcaagauccaggacagccugagcagcacagcaagcgcccugggaaagcugcaggacguggucaaccagaaugcccaggcacugaacacccuggucaagcagcuguccuccaacuucggcgccaucagcucugugcugaacgauauccugagcagacuggacaaggucgaggccgaggugcagaucgacagacugaucacaggcagacugcagagccuccagacauacgugacccagcagcugaucagagccgccgagauuagagccucugccaaucuggccgccaccaagaugucugagugugugcugggccagagcaagagaguggacuuuugcggcaagggcuaccaccugaugagcuucccucagucugccccucacggcgugguguuucugcacgugacauaugugcccgcucaagagaagaauuucaccaccgcuccagccaucugccacgacggcaaagcccacuuuccuagagaaggcguguucguguccaacggcacccauugguucgugacacagcggaacuucuacgagccccagaucaucaccaccgacaacaccuucgugucuggcaacugcgacguugugaucggcauugugaacaauaccguguacgacccucugcagcccgagcuggacagcuucaaagaggaacuggacaaguacuuuaagaaccacacaagccccgacguggaccugggcgauaucagcggaaucaaugccagcgucgugaacauccagaaagagaucgaccggcugaacgagguggccaagaaucugaacgagagccugaucgaccugcaagaacuggggaaguacgagcaguacaucaaguggcccugguacaucuggcugggcuuuaucgccggacugauugccaucgugauggucacaaucaugcuguguugcaugaccagcugcuguagcugccugaagggcuguuguagcuguggcagcugcugcaaguucgacgaggacgauucugagcccgugcugaagggcgugaaacugcacuacaccugaugacucgagcugguacugcaugcacgcaaugcuagcugccccuuucccguccuggguaccccgagucucccccgaccucgggucccagguaugcucccaccuccaccugccccacucaccaccucugcuaguuccagacaccucccaagcacgcagcaaugcagcucaaaacgcuuagccuagccacacccccacgggaaacagcagugauuaaccuuuagcaauaaacgaaaguuuaacuaagcuauacuaaccccaggguuggucaauuucgugccagccacacccuggagcuagcaaaaaaaaaaaaaaaaaaaaaaaaaaaaaagcauaugacuaaaaaaaaaaaaaaaaaaaaaaaaaaaaaaaaaaaaaaaaaaaaaaaaaaaaaaaaaaaaaaaaaaaaaa

SEQ ID NO: 26782 - RNA, 4283 nt, Artificial Sequence
  SARS-CoV-2/Wuhan/WIV05/2019__EPI_ISL_402128 spike protein mRNA gc mod (1-1273)(D614G)
agaauaaacuaguauucuucugguccccacagacucagagagaacccgccaccauguucguguuucuggugcugcugccccugguguccagccagugugugaaccugaccaccagaacacagcugccuccagccuacaccaacagcuucaccagaggcguguacuaccccgacaagguguucagauccagcgugcugcacucuacccaggaccuguuccugccuuucuucagcaacgugaccugguuccacgccauccacguguccggcaccaauggcaccaagagauucgacaaccccgugcugcccuucaacgacgggguguacuuugccagcaccgagaaguccaacaucaucagaggcuggaucuucggcaccacacuggacagcaagacccagagccugcugaucgugaacaacgccaccaacguggucaucaaagugugcgaguuccaguucugcaacgaccccuuccugggcgucuacuaccacaagaacaacaagagcuggauggaaagcgaguuccggguguacagcagcgccaacaacugcaccuucgaguacgugucccagccuuuccugauggaccuggaaggcaagcagggcaacuucaagaaccugcgcgaguucguguucaagaacaucgacggcuacuucaaaaucuacagcaagcacaccccuaucaaccucgugcgggaucugccucagggcuucucugcucuggaaccccugguggaucugcccaucggcaucaacaucacccgguuucagacacugcuggcccugcacagaagcuaccugacaccuggcgauagcagcagcggauggacagcuggugccgccgcuuacuaugugggcuaccugcagccuagaaccuuccugcugaaguacaacgagaacggcaccaucaccgacgccguggauugugcucuggauccucugagcgagacaaagugcacccugaaguccuucaccguggaaaagggcaucuaccagaccagcaacuuccgggugcagcccaccgaauccaucgugcgguuccccaauaucaccaaucugugccccuucggcgagguguucaaugccaccagauucgccucuguguacgccuggaaccggaagcggaucagcaauugcguggccgacuacuccgugcuguacaacuccgccagcuucagcaccuucaagugcuacggcguguccccuaccaagcugaacgaccugugcuucacaaacguguacgccgacagcuucgugauccggggagaugaagugcggcagauugccccuggacagacaggcaagaucgccgacuacaacuacaagcugcccgacgacuucaccggcugugugauugccuggaacagcaacaaccuggacuccaaagucggcggcaacuacaauuaccuguaccggcuguuccggaaguccaaucugaagcccuucgagcgggacaucagcaccgaaaucuaucaggccggcagcaccccuugcaacggcguggaaggcuucaacugcuacuucccacugcaguccuacggcuuucagcccacaaauggcgugggcuaucagcccuacagagugguggugcugagcuucgaacugcugcaugcuccugccacagugugcggcccuaagaaaagcaccaaucucgugaagaacaaaugcgugaacuucaacuucaacggccugaccggcaccggcgugcugacagagagcaacaagaaguuccugccauuccagcaguuuggccgggauaucgccgauaccacagacgccguuagagauccccagacacuggaaauccuggacaucaccccaugcagcuucggcggagugucugugaucaccccuggcaccaacaccagcaaucagguggcagugcuguaccagggcgugaacuguaccgaagugcccguggccauucacgccgaucagcugacaccuacauggcggguguacuccaccggcagcaauguguuucagaccagagccggcugucugaucggagccgagcacgugaacaauagcuacgagugcgacauccccaucggcgcuggcaucugugccagcuaccagacacagacaaacagccccagacgggcuagaagcguggccagccagagcaucauugccuacacaaugucucugggcgccgagaacagcguggccuacuccaacaacucuaucgcuauccccaccaacuucaccaucagcgugaccaccgagauccugccuguguccaugaccaagaccagcguggacugcaccauguacaucugcggcgauuccaccgagugcuccaaccugcugcugcaguacggcagcuucugcacccagcugaauagagcccugacagggaucgccguggaacaggacaagaacacccaagagguguucgcccaagugaagcaaaucuacaagaccccuccuaucaaggacuucggcggcuucaauuucagccagauucugcccgauccuagcaagcccagcaagcggagcuucaucgaggaccugcuguucaacaaagugacacuggccgacgccggcuucaucaagcaguauggcgauugucugggcgacauugccgccagggaucugauuugcgcccagaaguuuaacggacugacagugcugccuccucugcugaccgaugagaugaucgcccaguacacaucugcccugcuggccggcacaaucacaagcggcuggacauuuggagcuggcgccgcucugcagauccccuuugcuaugcagauggccuaccgguucaacggcaucggagugacccagaaugugcuguacgagaaccagaagcugaucgccaaccaguucaacagcgccaucggcaagauccaggacagccugagcagcacagcaagcgcccugggaaagcugcaggacguggucaaccagaaugcccaggcacugaacacccuggucaagcagcuguccuccaacuucggcgccaucagcucugugcugaacgauauccugagcagacuggacaaggucgaggccgaggugcagaucgacagacugaucacaggcagacugcagagccuccagacauacgugacccagcagcugaucagagccgccgagauuagagccucugccaaucuggccgccaccaagaugucugagugugugcugggccagagcaagagaguggacuuuugcggcaagggcuaccaccugaugagcuucccucagucugccccucacggcgugguguuucugcacgugacauaugugcccgcucaagagaagaauuucaccaccgcuccagccaucugccacgacggcaaagcccacuuuccuagagaaggcguguucguguccaacggcacccauugguucgugacacagcggaacuucuacgagccccagaucaucaccaccgacaacaccuucgugucuggcaacugcgacguugugaucggcauugugaacaauaccguguacgacccucugcagcccgagcuggacagcuucaaagaggaacuggacaaguacuuuaagaaccacacaagccccgacguggaccugggcgauaucagcggaaucaaugccagcgucgugaacauccagaaagagaucgaccggcugaacgagguggccaagaaucugaacgagagccugaucgaccugcaagaacuggggaaguacgagcaguacaucaaguggcccugguacaucuggcugggcuuuaucgccggacugauugccaucgugauggucacaaucaugcuguguugcaugaccagcugcuguagcugccugaagggcuguuguagcuguggcagcugcugcaaguucgacgaggacgauucugagcccgugcugaagggcgugaaacugcacuacaccugaugacucgagcugguacugcaugcacgcaaugcuagcugccccuuucccguccuggguaccccgagucucccccgaccucgggucccagguaugcucccaccuccaccugccccacucaccaccucugcuaguuccagacaccucccaagcacgcagcaaugcagcucaaaacgcuuagccuagccacacccccacgggaaacagcagugauuaaccuuuagcaauaaacgaaaguuuaacuaagcuauacuaaccccaggguuggucaauuucgugccagccacacccuggagcuagcaaaaaaaaaaaaaaaaaaaaaaaaaaaaaagcauaugacuaaaaaaaaaaaaaaaaaaaaaaaaaaaaaaaaaaaaaaaaaaaaaaaaaaaaaaaaaaaaaaaaaaaaaa

SEQ ID NO: 26783 - RNA, 4283 nt, Artificial Sequence
  SARS-CoV-2/Wuhan/WIV05/2019__EPI_ISL_402128 spike protein mRNA gc mod (1-1273)(A222V_D614G)
agaauaaacuaguauucuucugguccccacagacucagagagaacccgccaccauguucguguuucuggugcugcugccccugguguccagccagugugugaaccugaccaccagaacacagcugccuccagccuacaccaacagcuucaccagaggcguguacuaccccgacaagguguucagauccagcgugcugcacucuacccaggaccuguuccugccuuucuucagcaacgugaccugguuccacgccauccacguguccggcaccaauggcaccaagagauucgacaaccccgugcugcccuucaacgacgggguguacuuugccagcaccgagaaguccaacaucaucagaggcuggaucuucggcaccacacuggacagcaagacccagagccugcugaucgugaacaacgccaccaacguggucaucaaagugugcgaguuccaguucugcaacgaccccuuccugggcgucuacuaccacaagaacaacaagagcuggauggaaagcgaguuccggguguacagcagcgccaacaacugcaccuucgaguacgugucccagccuuuccugauggaccuggaaggcaagcagggcaacuucaagaaccugcgcgaguucguguucaagaacaucgacggcuacuucaaaaucuacagcaagcacaccccuaucaaccucgugcgggaucugccucagggcuucucugugcuggaaccccugguggaucugcccaucggcaucaacaucacccgguuucagacacugcuggcccugcacagaagcuaccugacaccuggcgauagcagcagcggauggacagcuggugccgccgcuuacuaugugggcuaccugcagccuagaaccuuccugcugaaguacaacgagaacggcaccaucaccgacgccguggauugugcucuggauccucugagcgagacaaagugcacccugaaguccuucaccguggaaaagggcaucuaccagaccagcaacuuccgggugcagcccaccgaauccaucgugcgguuccccaauaucaccaaucugugccccuucggcgagguguucaaugccaccagauucgccucuguguacgccuggaaccggaagcggaucagcaauugcguggccgacuacuccgugcuguacaacuccgccagcuucagcaccuucaagugcuacggcguguccccuaccaagcugaacgaccugugcuucacaaacguguacgccgacagcuucgugauccggggagaugaagugcggcagauugccccuggacagacaggcaagaucgccgacuacaacuacaagcugcccgacgacuucaccggcugugugauugccuggaacagcaacaaccuggacuccaaagucggcggcaacuacaauuaccuguaccggcuguuccggaaguccaaucugaagcccuucgagcgggacaucagcaccgaaaucuaucaggccggcagcaccccuugcaacggcguggaaggcuucaacugcuacuucccacugcaguccuacggcuuucagcccacaaauggcgugggcuaucagcccuacagagugguggugcugagcuucgaacugcugcaugcuccugccacagugugcggcccuaagaaaagcaccaaucucgugaagaacaaaugcgugaacuucaacuucaacggccugaccggcaccggcgugcugacagagagcaacaagaaguuccugccauuccagcaguuuggccgggauaucgccgauaccacagacgccguuagagauccccagacacuggaaauccuggacaucaccccaugcagcuucggcggagugucugugaucaccccuggcaccaacaccagcaaucagguggcagugcuguaccagggcgugaacuguaccgaagugcccguggccauucacgccgaucagcugacaccuacauggcggguguacuccaccggcagcaauguguuucagaccagagccggcugucugaucggagccgagcacgugaacaauagcuacgagugcgacauccccaucggcgcuggcaucugugccagcuaccagacacagacaaacagccccagacgggcuagaagcguggccagccagagcaucauugccuacacaaugucucugggcgccgagaacagcguggccuacuccaacaacucuaucgcuauccccaccaacuucaccaucagcgugaccaccgagauccugccuguguccaugaccaagaccagcguggacugcaccauguacaucugcggcgauuccaccgagugcuccaaccugcugcugcaguacggcagcuucugcacccagcugaauagagcccugacagggaucgccguggaacaggacaagaacacccaagagguguucgcccaagugaagcaaaucuacaagaccccuccuaucaaggacuucggcggcuucaauuucagccagauucugcccgauccuagcaagcccagcaagcggagcuucaucgaggaccugcuguucaacaaagugacacuggccgacgccggcuucaucaagcaguauggcgauugucugggcgacauugccgccagggaucugauuugcgcccagaaguuuaacggacugacagugcugccuccucugcugaccgaugagaugaucgcccaguacacaucugcccugcuggccggcacaaucacaagcggcuggacauuuggagcuggcgccgcucugcagauccccuuugcuaugcagauggccuaccgguucaacggcaucggagugacccagaaugugcuguacgagaaccagaagcugaucgccaaccaguucaacagcgccaucggcaagauccaggacagccugagcagcacagcaagcgcccugggaaagcugcaggacguggucaaccagaaugcccaggcacugaacacccuggucaagcagcuguccuccaacuucggcgccaucagcucugugcugaacgauauccugagcagacuggacaaggucgaggccgaggugcagaucgacagacugaucacaggcagacugcagagccuccagacauacgugacccagcagcugaucagagccgccgagauuagagccucugccaaucuggccgccaccaagaugucugagugugugcugggccagagcaagagaguggacuuuugcggcaagggcuaccaccugaugagcuucccucagucugccccucacggcgugguguuucugcacgugacauaugugcccgcucaagagaagaauuucaccaccgcuccagccaucugccacgacggcaaagcccacuuuccuagagaaggcguguucguguccaacggcacccauugguucgugacacagcggaacuucuacgagccccagaucaucaccaccgacaacaccuucgugucuggcaacugcgacguugugaucggcauugugaacaauaccguguacgacccucugcagcccgagcuggacagcuucaaagaggaacuggacaaguacuuuaagaaccacacaagccccgacguggaccugggcgauaucagcggaaucaaugccagcgucgugaacauccagaaagagaucgaccggcugaacgagguggccaagaaucugaacgagagccugaucgaccugcaagaacuggggaaguacgagcaguacaucaaguggcccugguacaucuggcugggcuuuaucgccggacugauugccaucgugauggucacaaucaugcuguguugcaugaccagcugcuguagcugccugaagggcuguuguagcuguggcagcugcugcaaguucgacgaggacgauucugagcccgugcugaagggcgugaaacugcacuacaccugaugacucgagcugguacugcaugcacgcaaugcuagcugccccuuucccguccuggguaccccgagucucccccgaccucgggucccagguaugcucccaccuccaccugccccacucaccaccucugcuaguuccagacaccucccaagcacgcagcaaugcagcucaaaacgcuuagccuagccacacccccacgggaaacagcagugauuaaccuuuagcaauaaacgaaaguuuaacuaagcuauacuaaccccaggguuggucaauuucgugccagccacacccuggagcuagcaaaaaaaaaaaaaaaaaaaaaaaaaaaaaagcauaugacuaaaaaaaaaaaaaaaaaaaaaaaaaaaaaaaaaaaaaaaaaaaaaaaaaaaaaaaaaaaaaaaaaaaaaa

SEQ ID NO: 26784 - RNA, 4283 nt, Artificial Sequence
  SARS-CoV-2/Wuhan/WIV05/2019__EPI_ISL_402128 spike protein mRNA gc mod (1-1273)(N439K_D614G)
agaauaaacuaguauucuucugguccccacagacucagagagaacccgccaccauguucguguuucuggugcugcugccccugguguccagccagugugugaaccugaccaccagaacacagcugccuccagccuacaccaacagcuucaccagaggcguguacuaccccgacaagguguucagauccagcgugcugcacucuacccaggaccuguuccugccuuucuucagcaacgugaccugguuccacgccauccacguguccggcaccaauggcaccaagagauucgacaaccccgugcugcccuucaacgacgggguguacuuugccagcaccgagaaguccaacaucaucagaggcuggaucuucggcaccacacuggacagcaagacccagagccugcugaucgugaacaacgccaccaacguggucaucaaagugugcgaguuccaguucugcaacgaccccuuccugggcgucuacuaccacaagaacaacaagagcuggauggaaagcgaguuccggguguacagcagcgccaacaacugcaccuucgaguacgugucccagccuuuccugauggaccuggaaggcaagcagggcaacuucaagaaccugcgcgaguucguguucaagaacaucgacggcuacuucaaaaucuacagcaagcacaccccuaucaaccucgugcgggaucugccucagggcuucucugcucuggaaccccugguggaucugcccaucggcaucaacaucacccgguuucagacacugcuggcccugcacagaagcuaccugacaccuggcgauagcagcagcggauggacagcuggugccgccgcuuacuaugugggcuaccugcagccuagaaccuuccugcugaaguacaacgagaacggcaccaucaccgacgccguggauugugcucuggauccucugagcgagacaaagugcacccugaaguccuucaccguggaaaagggcaucuaccagaccagcaacuuccgggugcagcccaccgaauccaucgugcgguuccccaauaucaccaaucugugccccuucggcgagguguucaaugccaccagauucgccucuguguacgccuggaaccggaagcggaucagcaauugcguggccgacuacuccgugcuguacaacuccgccagcuucagcaccuucaagugcuacggcguguccccuaccaagcugaacgaccugugcuucacaaacguguacgccgacagcuucgugauccggggagaugaagugcggcagauugccccuggacagacaggcaagaucgccgacuacaacuacaagcugcccgacgacuucaccggcugugugauugccuggaacagcaagaaccuggacuccaaagucggcggcaacuacaauuaccuguaccggcuguuccggaaguccaaucugaagcccuucgagcgggacaucagcaccgaaaucuaucaggccggcagcaccccuugcaacggcguggaaggcuucaacugcuacuucccacugcaguccuacggcuuucagcccacaaauggcgugggcuaucagcccuacagagugguggugcugagcuucgaacugcugcaugcuccugccacagugugcggcccuaagaaaagcaccaaucucgugaagaacaaaugcgugaacuucaacuucaacggccugaccggcaccggcgugcugacagagagcaacaagaaguuccugccauuccagcaguuuggccgggauaucgccgauaccacagacgccguuagagauccccagacacuggaaauccuggacaucaccccaugcagcuucggcggagugucugugaucaccccuggcaccaacaccagcaaucagguggcagugcuguaccagggcgugaacuguaccgaagugcccguggccauucacgccgaucagcugacaccuacauggcggguguacuccaccggcagcaauguguuucagaccagagccggcugucugaucggagccgagcacgugaacaauagcuacgagugcgacauccccaucggcgcuggcaucugugccagcuaccagacacagacaaacagccccagacgggcuagaagcguggccagccagagcaucauugccuacacaaugucucugggcgccgagaacagcguggccuacuccaacaacucuaucgcuauccccaccaacuucaccaucagcgugaccaccgagauccugccuguguccaugaccaagaccagcguggacugcaccauguacaucugcggcgauuccaccgagugcuccaaccugcugcugcaguacggcagcuucugcacccagcugaauagagcccugacagggaucgccguggaacaggacaagaacacccaagagguguucgcccaagugaagcaaaucuacaagaccccuccuaucaaggacuucggcggcuucaauuucagccagauucugcccgauccuagcaagcccagcaagcggagcuucaucgaggaccugcuguucaacaaagugacacuggccgacgccggcuucaucaagcaguauggcgauugucugggcgacauugccgccagggaucugauuugcgcccagaaguuuaacggacugacagugcugccuccucugcugaccgaugagaugaucgcccaguacacaucugcccugcuggccggcacaaucacaagcggcuggacauuuggagcuggcgccgcucugcagauccccuuugcuaugcagauggccuaccgguucaacggcaucggagugacccagaaugugcuguacgagaaccagaagcugaucgccaaccaguucaacagcgccaucggcaagauccaggacagccugagcagcacagcaagcgcccugggaaagcugcaggacguggucaaccagaaugcccaggcacugaacacccuggucaagcagcuguccuccaacuucggcgccaucagcucugugcugaacgauauccugagcagacuggacaaggucgaggccgaggugcagaucgacagacugaucacaggcagacugcagagccuccagacauacgugacccagcagcugaucagagccgccgagauuagagccucugccaaucuggccgccaccaagaugucugagugugugcugggccagagcaagagaguggacuuuugcggcaagggcuaccaccugaugagcuucccucagucugccccucacggcgugguguuucugcacgugacauaugugcccgcucaagagaagaauuucaccaccgcuccagccaucugccacgacggcaaagcccacuuuccuagagaaggcguguucguguccaacggcacccauugguucgugacacagcggaacuucuacgagccccagaucaucaccaccgacaacaccuucgugucuggcaacugcgacguugugaucggcauugugaacaauaccguguacgacccucugcagcccgagcuggacagcuucaaagaggaacuggacaaguacuuuaagaaccacacaagccccgacguggaccugggcgauaucagcggaaucaaugccagcgucgugaacauccagaaagagaucgaccggcugaacgagguggccaagaaucugaacgagagccugaucgaccugcaagaacuggggaaguacgagcaguacaucaaguggcccugguacaucuggcugggcuuuaucgccggacugauugccaucgugauggucacaaucaugcuguguugcaugaccagcugcuguagcugccugaagggcuguuguagcuguggcagcugcugcaaguucgacgaggacgauucugagcccgugcugaagggcgugaaacugcacuacaccugaugacucgagcugguacugcaugcacgcaaugcuagcugccccuuucccguccuggguaccccgagucucccccgaccucgggucccagguaugcucccaccuccaccugccccacucaccaccucugcuaguuccagacaccucccaagcacgcagcaaugcagcucaaaacgcuuagccuagccacacccccacgggaaacagcagugauuaaccuuuagcaauaaacgaaaguuuaacuaagcuauacuaaccccaggguuggucaauuucgugccagccacacccuggagcuagcaaaaaaaaaaaaaaaaaaaaaaaaaaaaaagcauaugacuaaaaaaaaaaaaaaaaaaaaaaaaaaaaaaaaaaaaaaaaaaaaaaaaaaaaaaaaaaaaaaaaaaaaaa

SEQ ID NO: 26785 - RNA, 4283 nt, Artificial Sequence
  SARS-CoV-2/Wuhan/WIV05/2019__EPI_ISL_402128 spike protein mRNA gc mod (1-1273)(S477N_D614G)
agaauaaacuaguauucuucugguccccacagacucagagagaacccgccaccauguucguguuucuggugcugcugccccugguguccagccagugugugaaccugaccaccagaacacagcugccuccagccuacaccaacagcuucaccagaggcguguacuaccccgacaagguguucagauccagcgugcugcacucuacccaggaccuguuccugccuuucuucagcaacgugaccugguuccacgccauccacguguccggcaccaauggcaccaagagauucgacaaccccgugcugcccuucaacgacgggguguacuuugccagcaccgagaaguccaacaucaucagaggcuggaucuucggcaccacacuggacagcaagacccagagccugcugaucgugaacaacgccaccaacguggucaucaaagugugcgaguuccaguucugcaacgaccccuuccugggcgucuacuaccacaagaacaacaagagcuggauggaaagcgaguuccggguguacagcagcgccaacaacugcaccuucgaguacgugucccagccuuuccugauggaccuggaaggcaagcagggcaacuucaagaaccugcgcgaguucguguucaagaacaucgacggcuacuucaaaaucuacagcaagcacaccccuaucaaccucgugcgggaucugccucagggcuucucugcucuggaaccccugguggaucugcccaucggcaucaacaucacccgguuucagacacugcuggcccugcacagaagcuaccugacaccuggcgauagcagcagcggauggacagcuggugccgccgcuuacuaugugggcuaccugcagccuagaaccuuccugcugaaguacaacgagaacggcaccaucaccgacgccguggauugugcucuggauccucugagcgagacaaagugcacccugaaguccuucaccguggaaaagggcaucuaccagaccagcaacuuccgggugcagcccaccgaauccaucgugcgguuccccaauaucaccaaucugugccccuucggcgagguguucaaugccaccagauucgccucuguguacgccuggaaccggaagcggaucagcaauugcguggccgacuacuccgugcuguacaacuccgccagcuucagcaccuucaagugcuacggcguguccccuaccaagcugaacgaccugugcuucacaaacguguacgccgacagcuucgugauccggggagaugaagugcggcagauugccccuggacagacaggcaagaucgccgacuacaacuacaagcugcccgacgacuucaccggcugugugauugccuggaacagcaacaaccuggacuccaaagucggcggcaacuacaauuaccuguaccggcuguuccggaaguccaaucugaagcccuucgagcgggacaucagcaccgaaaucuaucaggccggcaacaccccuugcaacggcguggaaggcuucaacugcuacuucccacugcaguccuacggcuuucagcccacaaauggcgugggcuaucagcccuacagagugguggugcugagcuucgaacugcugcaugcuccugccacagugugcggcccuaagaaaagcaccaaucucgugaagaacaaaugcgugaacuucaacuucaacggccugaccggcaccggcgugcugacagagagcaacaagaaguuccugccauuccagcaguuuggccgggauaucgccgauaccacagacgccguuagagauccccagacacuggaaauccuggacaucaccccaugcagcuucggcggagugucugugaucaccccuggcaccaacaccagcaaucagguggcagugcuguaccagggcgugaacuguaccgaagugcccguggccauucacgccgaucagcugacaccuacauggcggguguacuccaccggcagcaauguguuucagaccagagccggcugucugaucggagccgagcacgugaacaauagcuacgagugcgacauccccaucggcgcuggcaucugugccagcuaccagacacagacaaacagccccagacgggcuagaagcguggccagccagagcaucauugccuacacaaugucucugggcgccgagaacagcguggccuacuccaacaacucuaucgcuauccccaccaacuucaccaucagcgugaccaccgagauccugccuguguccaugaccaagaccagcguggacugcaccauguacaucugcggcgauuccaccgagugcuccaaccugcugcugcaguacggcagcuucugcacccagcugaauagagcccugacagggaucgccguggaacaggacaagaacacccaagagguguucgcccaagugaagcaaaucuacaagaccccuccuaucaaggacuucggcggcuucaauuucagccagauucugcccgauccuagcaagcccagcaagcggagcuucaucgaggaccugcuguucaacaaagugacacuggccgacgccggcuucaucaagcaguauggcgauugucugggcgacauugccgccagggaucugauuugcgcccagaaguuuaacggacugacagugcugccuccucugcugaccgaugagaugaucgcccaguacacaucugcccugcuggccggcacaaucacaagcggcuggacauuuggagcuggcgccgcucugcagauccccuuugcuaugcagauggccuaccgguucaacggcaucggagugacccagaaugugcuguacgagaaccagaagcugaucgccaaccaguucaacagcgccaucggcaagauccaggacagccugagcagcacagcaagcgcccugggaaagcugcaggacguggucaaccagaaugcccaggcacugaacacccuggucaagcagcuguccuccaacuucggcgccaucagcucugugcugaacgauauccugagcagacuggacaaggucgaggccgaggugcagaucgacagacugaucacaggcagacugcagagccuccagacauacgugacccagcagcugaucagagccgccgagauuagagccucugccaaucuggccgccaccaagaugucugagugugugcugggccagagcaagagaguggacuuuugcggcaagggcuaccaccugaugagcuucccucagucugccccucacggcgugguguuucugcacgugacauaugugcccgcucaagagaagaauuucaccaccgcuccagccaucugccacgacggcaaagcccacuuuccuagagaaggcguguucguguccaacggcacccauugguucgugacacagcggaacuucuacgagccccagaucaucaccaccgacaacaccuucgugucuggcaacugcgacguugugaucggcauugugaacaauaccguguacgacccucugcagcccgagcuggacagcuucaaagaggaacuggacaaguacuuuaagaaccacacaagccccgacguggaccugggcgauaucagcggaaucaaugccagcgucgugaacauccagaaagagaucgaccggcugaacgagguggccaagaaucugaacgagagccugaucgaccugcaagaacuggggaaguacgagcaguacaucaaguggcccugguacaucuggcugggcuuuaucgccggacugauugccaucgugauggucacaaucaugcuguguugcaugaccagcugcuguagcugccugaagggcuguuguagcuguggcagcugcugcaaguucgacgaggacgauucugagcccgugcugaagggcgugaaacugcacuacaccugaugacucgagcugguacugcaugcacgcaaugcuagcugccccuuucccguccuggguaccccgagucucccccgaccucgggucccagguaugcucccaccuccaccugccccacucaccaccucugcuaguuccagacaccucccaagcacgcagcaaugcagcucaaaacgcuuagccuagccacacccccacgggaaacagcagugauuaaccuuuagcaauaaacgaaaguuuaacuaagcuauacuaaccccaggguuggucaauuucgugccagccacacccuggagcuagcaaaaaaaaaaaaaaaaaaaaaaaaaaaaaagcauaugacuaaaaaaaaaaaaaaaaaaaaaaaaaaaaaaaaaaaaaaaaaaaaaaaaaaaaaaaaaaaaaaaaaaaaaa

SEQ ID NO: 26786 - RNA, 4283 nt, Artificial Sequence
  SARS-CoV-2/Wuhan/WIV05/2019__EPI_ISL_402128 spike protein mRNA gc mod (1-1273)(N501Y_D614G)
agaauaaacuaguauucuucugguccccacagacucagagagaacccgccaccauguucguguuucuggugcugcugccccugguguccagccagugugugaaccugaccaccagaacacagcugccuccagccuacaccaacagcuucaccagaggcguguacuaccccgacaagguguucagauccagcgugcugcacucuacccaggaccuguuccugccuuucuucagcaacgugaccugguuccacgccauccacguguccggcaccaauggcaccaagagauucgacaaccccgugcugcccuucaacgacgggguguacuuugccagcaccgagaaguccaacaucaucagaggcuggaucuucggcaccacacuggacagcaagacccagagccugcugaucgugaacaacgccaccaacguggucaucaaagugugcgaguuccaguucugcaacgaccccuuccugggcgucuacuaccacaagaacaacaagagcuggauggaaagcgaguuccggguguacagcagcgccaacaacugcaccuucgaguacgugucccagccuuuccugauggaccuggaaggcaagcagggcaacuucaagaaccugcgcgaguucguguucaagaacaucgacggcuacuucaaaaucuacagcaagcacaccccuaucaaccucgugcgggaucugccucagggcuucucugcucuggaaccccugguggaucugcccaucggcaucaacaucacccgguuucagacacugcuggcccugcacagaagcuaccugacaccuggcgauagcagcagcggauggacagcuggugccgccgcuuacuaugugggcuaccugcagccuagaaccuuccugcugaaguacaacgagaacggcaccaucaccgacgccguggauugugcucuggauccucugagcgagacaaagugcacccugaaguccuucaccguggaaaagggcaucuaccagaccagcaacuuccgggugcagcccaccgaauccaucgugcgguuccccaauaucaccaaucugugccccuucggcgagguguucaaugccaccagauucgccucuguguacgccuggaaccggaagcggaucagcaauugcguggccgacuacuccgugcuguacaacuccgccagcuucagcaccuucaagugcuacggcguguccccuaccaagcugaacgaccugugcuucacaaacguguacgccgacagcuucgugauccggggagaugaagugcggcagauugccccuggacagacaggcaagaucgccgacuacaacuacaagcugcccgacgacuucaccggcugugugauugccuggaacagcaacaaccuggacuccaaagucggcggcaacuacaauuaccuguaccggcuguuccggaaguccaaucugaagcccuucgagcgggacaucagcaccgaaaucuaucaggccggcagcaccccuugcaacggcguggaaggcuucaacugcuacuucccacugcaguccuacggcuuucagcccacauacggcgugggcuaucagcccuacagagugguggugcugagcuucgaacugcugcaugcuccugccacagugugcggcccuaagaaaagcaccaaucucgugaagaacaaaugcgugaacuucaacuucaacggccugaccggcaccggcgugcugacagagagcaacaagaaguuccugccauuccagcaguuuggccgggauaucgccgauaccacagacgccguuagagauccccagacacuggaaauccuggacaucaccccaugcagcuucggcggagugucugugaucaccccuggcaccaacaccagcaaucagguggcagugcuguaccagggcgugaacuguaccgaagugcccguggccauucacgccgaucagcugacaccuacauggcggguguacuccaccggcagcaauguguuucagaccagagccggcugucugaucggagccgagcacgugaacaauagcuacgagugcgacauccccaucggcgcuggcaucugugccagcuaccagacacagacaaacagccccagacgggcuagaagcguggccagccagagcaucauugccuacacaaugucucugggcgccgagaacagcguggccuacuccaacaacucuaucgcuauccccaccaacuucaccaucagcgugaccaccgagauccugccuguguccaugaccaagaccagcguggacugcaccauguacaucugcggcgauuccaccgagugcuccaaccugcugcugcaguacggcagcuucugcacccagcugaauagagcccugacagggaucgccguggaacaggacaagaacacccaagagguguucgcccaagugaagcaaaucuacaagaccccuccuaucaaggacuucggcggcuucaauuucagccagauucugcccgauccuagcaagcccagcaagcggagcuucaucgaggaccugcuguucaacaaagugacacuggccgacgccggcuucaucaagcaguauggcgauugucugggcgacauugccgccagggaucugauuugcgcccagaaguuuaacggacugacagugcugccuccucugcugaccgaugagaugaucgcccaguacacaucugcccugcuggccggcacaaucacaagcggcuggacauuuggagcuggcgccgcucugcagauccccuuugcuaugcagauggccuaccgguucaacggcaucggagugacccagaaugugcuguacgagaaccagaagcugaucgccaaccaguucaacagcgccaucggcaagauccaggacagccugagcagcacagcaagcgcccugggaaagcugcaggacguggucaaccagaaugcccaggcacugaacacccuggucaagcagcuguccuccaacuucggcgccaucagcucugugcugaacgauauccugagcagacuggacaaggucgaggccgaggugcagaucgacagacugaucacaggcagacugcagagccuccagacauacgugacccagcagcugaucagagccgccgagauuagagccucugccaaucuggccgccaccaagaugucugagugugugcugggccagagcaagagaguggacuuuugcggcaagggcuaccaccugaugagcuucccucagucugccccucacggcgugguguuucugcacgugacauaugugcccgcucaagagaagaauuucaccaccgcuccagccaucugccacgacggcaaagcccacuuuccuagagaaggcguguucguguccaacggcacccauugguucgugacacagcggaacuucuacgagccccagaucaucaccaccgacaacaccuucgugucuggcaacugcgacguugugaucggcauugugaacaauaccguguacgacccucugcagcccgagcuggacagcuucaaagaggaacuggacaaguacuuuaagaaccacacaagccccgacguggaccugggcgauaucagcggaaucaaugccagcgucgugaacauccagaaagagaucgaccggcugaacgagguggccaagaaucugaacgagagccugaucgaccugcaagaacuggggaaguacgagcaguacaucaaguggcccugguacaucuggcugggcuuuaucgccggacugauugccaucgugauggucacaaucaugcuguguugcaugaccagcugcuguagcugccugaagggcuguuguagcuguggcagcugcugcaaguucgacgaggacgauucugagcccgugcugaagggcgugaaacugcacuacaccugaugacucgagcugguacugcaugcacgcaaugcuagcugccccuuucccguccuggguaccccgagucucccccgaccucgggucccagguaugcucccaccuccaccugccccacucaccaccucugcuaguuccagacaccucccaagcacgcagcaaugcagcucaaaacgcuuagccuagccacacccccacgggaaacagcagugauuaaccuuuagcaauaaacgaaaguuuaacuaagcuauacuaaccccaggguuggucaauuucgugccagccacacccuggagcuagcaaaaaaaaaaaaaaaaaaaaaaaaaaaaaagcauaugacuaaaaaaaaaaaaaaaaaaaaaaaaaaaaaaaaaaaaaaaaaaaaaaaaaaaaaaaaaaaaaaaaaaaaaa

SEQ ID NO: 26787 - RNA, 4277 nt, Artificial Sequence
  SARS-CoV-2/Wuhan/WIV05/2019__EPI_ISL_402128 spike protein mRNA gc mod (1-1273)(H69del_V70del_D614G)
agaauaaacuaguauucuucugguccccacagacucagagagaacccgccaccauguucguguuucuggugcugcugccccugguguccagccagugugugaaccugaccaccagaacacagcugccuccagccuacaccaacagcuucaccagaggcguguacuaccccgacaagguguucagauccagcgugcugcacucuacccaggaccuguuccugccuuucuucagcaacgugaccugguuccacgccaucuccggcaccaauggcaccaagagauucgacaaccccgugcugcccuucaacgacgggguguacuuugccagcaccgagaaguccaacaucaucagaggcuggaucuucggcaccacacuggacagcaagacccagagccugcugaucgugaacaacgccaccaacguggucaucaaagugugcgaguuccaguucugcaacgaccccuuccugggcgucuacuaccacaagaacaacaagagcuggauggaaagcgaguuccggguguacagcagcgccaacaacugcaccuucgaguacgugucccagccuuuccugauggaccuggaaggcaagcagggcaacuucaagaaccugcgcgaguucguguucaagaacaucgacggcuacuucaaaaucuacagcaagcacaccccuaucaaccucgugcgggaucugccucagggcuucucugcucuggaaccccugguggaucugcccaucggcaucaacaucacccgguuucagacacugcuggcccugcacagaagcuaccugacaccuggcgauagcagcagcggauggacagcuggugccgccgcuuacuaugugggcuaccugcagccuagaaccuuccugcugaaguacaacgagaacggcaccaucaccgacgccguggauugugcucuggauccucugagcgagacaaagugcacccugaaguccuucaccguggaaaagggcaucuaccagaccagcaacuuccgggugcagcccaccgaauccaucgugcgguuccccaauaucaccaaucugugccccuucggcgagguguucaaugccaccagauucgccucuguguacgccuggaaccggaagcggaucagcaauugcguggccgacuacuccgugcuguacaacuccgccagcuucagcaccuucaagugcuacggcguguccccuaccaagcugaacgaccugugcuucacaaacguguacgccgacagcuucgugauccggggagaugaagugcggcagauugccccuggacagacaggcaagaucgccgacuacaacuacaagcugcccgacgacuucaccggcugugugauugccuggaacagcaacaaccuggacuccaaagucggcggcaacuacaauuaccuguaccggcuguuccggaaguccaaucugaagcccuucgagcgggacaucagcaccgaaaucuaucaggccggcagcaccccuugcaacggcguggaaggcuucaacugcuacuucccacugcaguccuacggcuuucagcccacaaauggcgugggcuaucagcccuacagagugguggugcugagcuucgaacugcugcaugcuccugccacagugugcggcccuaagaaaagcaccaaucucgugaagaacaaaugcgugaacuucaacuucaacggccugaccggcaccggcgugcugacagagagcaacaagaaguuccugccauuccagcaguuuggccgggauaucgccgauaccacagacgccguuagagauccccagacacuggaaauccuggacaucaccccaugcagcuucggcggagugucugugaucaccccuggcaccaacaccagcaaucagguggcagugcuguaccagggcgugaacuguaccgaagugcccguggccauucacgccgaucagcugacaccuacauggcggguguacuccaccggcagcaauguguuucagaccagagccggcugucugaucggagccgagcacgugaacaauagcuacgagugcgacauccccaucggcgcuggcaucugugccagcuaccagacacagacaaacagccccagacgggcuagaagcguggccagccagagcaucauugccuacacaaugucucugggcgccgagaacagcguggccuacuccaacaacucuaucgcuauccccaccaacuucaccaucagcgugaccaccgagauccugccuguguccaugaccaagaccagcguggacugcaccauguacaucugcggcgauuccaccgagugcuccaaccugcugcugcaguacggcagcuucugcacccagcugaauagagcccugacagggaucgccguggaacaggacaagaacacccaagagguguucgcccaagugaagcaaaucuacaagaccccuccuaucaaggacuucggcggcuucaauuucagccagauucugcccgauccuagcaagcccagcaagcggagcuucaucgaggaccugcuguucaacaaagugacacuggccgacgccggcuucaucaagcaguauggcgauugucugggcgacauugccgccagggaucugauuugcgcccagaaguuuaacggacugacagugcugccuccucugcugaccgaugagaugaucgcccaguacacaucugcccugcuggccggcacaaucacaagcggcuggacauuuggagcuggcgccgcucugcagauccccuuugcuaugcagauggccuaccgguucaacggcaucggagugacccagaaugugcuguacgagaaccagaagcugaucgccaaccaguucaacagcgccaucggcaagauccaggacagccugagcagcacagcaagcgcccugggaaagcugcaggacguggucaaccagaaugcccaggcacugaacacccuggucaagcagcuguccuccaacuucggcgccaucagcucugugcugaacgauauccugagcagacuggacaaggucgaggccgaggugcagaucgacagacugaucacaggcagacugcagagccuccagacauacgugacccagcagcugaucagagccgccgagauuagagccucugccaaucuggccgccaccaagaugucugagugugugcugggccagagcaagagaguggacuuuugcggcaagggcuaccaccugaugagcuucccucagucugccccucacggcgugguguuucugcacgugacauaugugcccgcucaagagaagaauuucaccaccgcuccagccaucugccacgacggcaaagcccacuuuccuagagaaggcguguucguguccaacggcacccauugguucgugacacagcggaacuucuacgagccccagaucaucaccaccgacaacaccuucgugucuggcaacugcgacguugugaucggcauugugaacaauaccguguacgacccucugcagcccgagcuggacagcuucaaagaggaacuggacaaguacuuuaagaaccacacaagccccgacguggaccugggcgauaucagcggaaucaaugccagcgucgugaacauccagaaagagaucgaccggcugaacgagguggccaagaaucugaacgagagccugaucgaccugcaagaacuggggaaguacgagcaguacaucaaguggcccugguacaucuggcugggcuuuaucgccggacugauugccaucgugauggucacaaucaugcuguguugcaugaccagcugcuguagcugccugaagggcuguuguagcuguggcagcugcugcaaguucgacgaggacgauucugagcccgugcugaagggcgugaaacugcacuacaccugaugacucgagcugguacugcaugcacgcaaugcuagcugccccuuucccguccuggguaccccgagucucccccgaccucgggucccagguaugcucccaccuccaccugccccacucaccaccucugcuaguuccagacaccucccaagcacgcagcaaugcagcucaaaacgcuuagccuagccacacccccacgggaaacagcagugauuaaccuuuagcaauaaacgaaaguuuaacuaagcuauacuaaccccaggguuggucaauuucgugccagccacacccuggagcuagcaaaaaaaaaaaaaaaaaaaaaaaaaaaaaagcauaugacuaaaaaaaaaaaaaaaaaaaaaaaaaaaaaaaaaaaaaaaaaaaaaaaaaaaaaaaaaaaaaaaaaaaaaa

SEQ ID NO: 26788 - RNA, 4283 nt, Artificial Sequence
  SARS-CoV-2/Wuhan/WIV05/2019__EPI_ISL_402128 spike protein mRNA gc mod (1-1273)(Y453F_D614G)
agaauaaacuaguauucuucugguccccacagacucagagagaacccgccaccauguucguguuucuggugcugcugccccugguguccagccagugugugaaccugaccaccagaacacagcugccuccagccuacaccaacagcuucaccagaggcguguacuaccccgacaagguguucagauccagcgugcugcacucuacccaggaccuguuccugccuuucuucagcaacgugaccugguuccacgccauccacguguccggcaccaauggcaccaagagauucgacaaccccgugcugcccuucaacgacgggguguacuuugccagcaccgagaaguccaacaucaucagaggcuggaucuucggcaccacacuggacagcaagacccagagccugcugaucgugaacaacgccaccaacguggucaucaaagugugcgaguuccaguucugcaacgaccccuuccugggcgucuacuaccacaagaacaacaagagcuggauggaaagcgaguuccggguguacagcagcgccaacaacugcaccuucgaguacgugucccagccuuuccugauggaccuggaaggcaagcagggcaacuucaagaaccugcgcgaguucguguucaagaacaucgacggcuacuucaaaaucuacagcaagcacaccccuaucaaccucgugcgggaucugccucagggcuucucugcucuggaaccccugguggaucugcccaucggcaucaacaucacccgguuucagacacugcuggcccugcacagaagcuaccugacaccuggcgauagcagcagcggauggacagcuggugccgccgcuuacuaugugggcuaccugcagccuagaaccuuccugcugaaguacaacgagaacggcaccaucaccgacgccguggauugugcucuggauccucugagcgagacaaagugcacccugaaguccuucaccguggaaaagggcaucuaccagaccagcaacuuccgggugcagcccaccgaauccaucgugcgguuccccaauaucaccaaucugugccccuucggcgagguguucaaugccaccagauucgccucuguguacgccuggaaccggaagcggaucagcaauugcguggccgacuacuccgugcuguacaacuccgccagcuucagcaccuucaagugcuacggcguguccccuaccaagcugaacgaccugugcuucacaaacguguacgccgacagcuucgugauccggggagaugaagugcggcagauugccccuggacagacaggcaagaucgccgacuacaacuacaagcugcccgacgacuucaccggcugugugauugccuggaacagcaacaaccuggacuccaaagucggcggcaacuacaauuaccuguuccggcuguuccggaaguccaaucugaagcccuucgagcgggacaucagcaccgaaaucuaucaggccggcagcaccccuugcaacggcguggaaggcuucaacugcuacuucccacugcaguccuacggcuuucagcccacaaauggcgugggcuaucagcccuacagagugguggugcugagcuucgaacugcugcaugcuccugccacagugugcggcccuaagaaaagcaccaaucucgugaagaacaaaugcgugaacuucaacuucaacggccugaccggcaccggcgugcugacagagagcaacaagaaguuccugccauuccagcaguuuggccgggauaucgccgauaccacagacgccguuagagauccccagacacuggaaauccuggacaucaccccaugcagcuucggcggagugucugugaucaccccuggcaccaacaccagcaaucagguggcagugcuguaccagggcgugaacuguaccgaagugcccguggccauucacgccgaucagcugacaccuacauggcggguguacuccaccggcagcaauguguuucagaccagagccggcugucugaucggagccgagcacgugaacaauagcuacgagugcgacauccccaucggcgcuggcaucugugccagcuaccagacacagacaaacagccccagacgggcuagaagcguggccagccagagcaucauugccuacacaaugucucugggcgccgagaacagcguggccuacuccaacaacucuaucgcuauccccaccaacuucaccaucagcgugaccaccgagauccugccuguguccaugaccaagaccagcguggacugcaccauguacaucugcggcgauuccaccgagugcuccaaccugcugcugcaguacggcagcuucugcacccagcugaauagagcccugacagggaucgccguggaacaggacaagaacacccaagagguguucgcccaagugaagcaaaucuacaagaccccuccuaucaaggacuucggcggcuucaauuucagccagauucugcccgauccuagcaagcccagcaagcggagcuucaucgaggaccugcuguucaacaaagugacacuggccgacgccggcuucaucaagcaguauggcgauugucugggcgacauugccgccagggaucugauuugcgcccagaaguuuaacggacugacagugcugccuccucugcugaccgaugagaugaucgcccaguacacaucugcccugcuggccggcacaaucacaagcggcuggacauuuggagcuggcgccgcucugcagauccccuuugcuaugcagauggccuaccgguucaacggcaucggagugacccagaaugugcuguacgagaaccagaagcugaucgccaaccaguucaacagcgccaucggcaagauccaggacagccugagcagcacagcaagcgcccugggaaagcugcaggacguggucaaccagaaugcccaggcacugaacacccuggucaagcagcuguccuccaacuucggcgccaucagcucugugcugaacgauauccugagcagacuggacaaggucgaggccgaggugcagaucgacagacugaucacaggcagacugcagagccuccagacauacgugacccagcagcugaucagagccgccgagauuagagccucugccaaucuggccgccaccaagaugucugagugugugcugggccagagcaagagaguggacuuuugcggcaagggcuaccaccugaugagcuucccucagucugccccucacggcgugguguuucugcacgugacauaugugcccgcucaagagaagaauuucaccaccgcuccagccaucugccacgacggcaaagcccacuuuccuagagaaggcguguucguguccaacggcacccauugguucgugacacagcggaacuucuacgagccccagaucaucaccaccgacaacaccuucgugucuggcaacugcgacguugugaucggcauugugaacaauaccguguacgacccucugcagcccgagcuggacagcuucaaagaggaacuggacaaguacuuuaagaaccacacaagccccgacguggaccugggcgauaucagcggaaucaaugccagcgucgugaacauccagaaagagaucgaccggcugaacgagguggccaagaaucugaacgagagccugaucgaccugcaagaacuggggaaguacgagcaguacaucaaguggcccugguacaucuggcugggcuuuaucgccggacugauugccaucgugauggucacaaucaugcuguguugcaugaccagcugcuguagcugccugaagggcuguuguagcuguggcagcugcugcaaguucgacgaggacgauucugagcccgugcugaagggcgugaaacugcacuacaccugaugacucgagcugguacugcaugcacgcaaugcuagcugccccuuucccguccuggguaccccgagucucccccgaccucgggucccagguaugcucccaccuccaccugccccacucaccaccucugcuaguuccagacaccucccaagcacgcagcaaugcagcucaaaacgcuuagccuagccacacccccacgggaaacagcagugauuaaccuuuagcaauaaacgaaaguuuaacuaagcuauacuaaccccaggguuggucaauuucgugccagccacacccuggagcuagcaaaaaaaaaaaaaaaaaaaaaaaaaaaaaagcauaugacuaaaaaaaaaaaaaaaaaaaaaaaaaaaaaaaaaaaaaaaaaaaaaaaaaaaaaaaaaaaaaaaaaaaaaa

SEQ ID NO: 26789 - RNA, 4283 nt, Artificial Sequence
  SARS-CoV-2/Wuhan/WIV05/2019__EPI_ISL_402128 spike protein mRNA gc mod (1-1273)(D614G_I692V)
agaauaaacuaguauucuucugguccccacagacucagagagaacccgccaccauguucguguuucuggugcugcugccccugguguccagccagugugugaaccugaccaccagaacacagcugccuccagccuacaccaacagcuucaccagaggcguguacuaccccgacaagguguucagauccagcgugcugcacucuacccaggaccuguuccugccuuucuucagcaacgugaccugguuccacgccauccacguguccggcaccaauggcaccaagagauucgacaaccccgugcugcccuucaacgacgggguguacuuugccagcaccgagaaguccaacaucaucagaggcuggaucuucggcaccacacuggacagcaagacccagagccugcugaucgugaacaacgccaccaacguggucaucaaagugugcgaguuccaguucugcaacgaccccuuccugggcgucuacuaccacaagaacaacaagagcuggauggaaagcgaguuccggguguacagcagcgccaacaacugcaccuucgaguacgugucccagccuuuccugauggaccuggaaggcaagcagggcaacuucaagaaccugcgcgaguucguguucaagaacaucgacggcuacuucaaaaucuacagcaagcacaccccuaucaaccucgugcgggaucugccucagggcuucucugcucuggaaccccugguggaucugcccaucggcaucaacaucacccgguuucagacacugcuggcccugcacagaagcuaccugacaccuggcgauagcagcagcggauggacagcuggugccgccgcuuacuaugugggcuaccugcagccuagaaccuuccugcugaaguacaacgagaacggcaccaucaccgacgccguggauugugcucuggauccucugagcgagacaaagugcacccugaaguccuucaccguggaaaagggcaucuaccagaccagcaacuuccgggugcagcccaccgaauccaucgugcgguuccccaauaucaccaaucugugccccuucggcgagguguucaaugccaccagauucgccucuguguacgccuggaaccggaagcggaucagcaauugcguggccgacuacuccgugcuguacaacuccgccagcuucagcaccuucaagugcuacggcguguccccuaccaagcugaacgaccugugcuucacaaacguguacgccgacagcuucgugauccggggagaugaagugcggcagauugccccuggacagacaggcaagaucgccgacuacaacuacaagcugcccgacgacuucaccggcugugugauugccuggaacagcaacaaccuggacuccaaagucggcggcaacuacaauuaccuguaccggcuguuccggaaguccaaucugaagcccuucgagcgggacaucagcaccgaaaucuaucaggccggcagcaccccuugcaacggcguggaaggcuucaacugcuacuucccacugcaguccuacggcuuucagcccacaaauggcgugggcuaucagcccuacagagugguggugcugagcuucgaacugcugcaugcuccugccacagugugcggcccuaagaaaagcaccaaucucgugaagaacaaaugcgugaacuucaacuucaacggccugaccggcaccggcgugcugacagagagcaacaagaaguuccugccauuccagcaguuuggccgggauaucgccgauaccacagacgccguuagagauccccagacacuggaaauccuggacaucaccccaugcagcuucggcggagugucugugaucaccccuggcaccaacaccagcaaucagguggcagugcuguaccagggcgugaacuguaccgaagugcccguggccauucacgccgaucagcugacaccuacauggcggguguacuccaccggcagcaauguguuucagaccagagccggcugucugaucggagccgagcacgugaacaauagcuacgagugcgacauccccaucggcgcuggcaucugugccagcuaccagacacagacaaacagccccagacgggcuagaagcguggccagccagagcgugauugccuacacaaugucucugggcgccgagaacagcguggccuacuccaacaacucuaucgcuauccccaccaacuucaccaucagcgugaccaccgagauccugccuguguccaugaccaagaccagcguggacugcaccauguacaucugcggcgauuccaccgagugcuccaaccugcugcugcaguacggcagcuucugcacccagcugaauagagcccugacagggaucgccguggaacaggacaagaacacccaagagguguucgcccaagugaagcaaaucuacaagaccccuccuaucaaggacuucggcggcuucaauuucagccagauucugcccgauccuagcaagcccagcaagcggagcuucaucgaggaccugcuguucaacaaagugacacuggccgacgccggcuucaucaagcaguauggcgauugucugggcgacauugccgccagggaucugauuugcgcccagaaguuuaacggacugacagugcugccuccucugcugaccgaugagaugaucgcccaguacacaucugcccugcuggccggcacaaucacaagcggcuggacauuuggagcuggcgccgcucugcagauccccuuugcuaugcagauggccuaccgguucaacggcaucggagugacccagaaugugcuguacgagaaccagaagcugaucgccaaccaguucaacagcgccaucggcaagauccaggacagccugagcagcacagcaagcgcccugggaaagcugcaggacguggucaaccagaaugcccaggcacugaacacccuggucaagcagcuguccuccaacuucggcgccaucagcucugugcugaacgauauccugagcagacuggacaaggucgaggccgaggugcagaucgacagacugaucacaggcagacugcagagccuccagacauacgugacccagcagcugaucagagccgccgagauuagagccucugccaaucuggccgccaccaagaugucugagugugugcugggccagagcaagagaguggacuuuugcggcaagggcuaccaccugaugagcuucccucagucugccccucacggcgugguguuucugcacgugacauaugugcccgcucaagagaagaauuucaccaccgcuccagccaucugccacgacggcaaagcccacuuuccuagagaaggcguguucguguccaacggcacccauugguucgugacacagcggaacuucuacgagccccagaucaucaccaccgacaacaccuucgugucuggcaacugcgacguugugaucggcauugugaacaauaccguguacgacccucugcagcccgagcuggacagcuucaaagaggaacuggacaaguacuuuaagaaccacacaagccccgacguggaccugggcgauaucagcggaaucaaugccagcgucgugaacauccagaaagagaucgaccggcugaacgagguggccaagaaucugaacgagagccugaucgaccugcaagaacuggggaaguacgagcaguacaucaaguggcccugguacaucuggcugggcuuuaucgccggacugauugccaucgugauggucacaaucaugcuguguugcaugaccagcugcuguagcugccugaagggcuguuguagcuguggcagcugcugcaaguucgacgaggacgauucugagcccgugcugaagggcgugaaacugcacuacaccugaugacucgagcugguacugcaugcacgcaaugcuagcugccccuuucccguccuggguaccccgagucucccccgaccucgggucccagguaugcucccaccuccaccugccccacucaccaccucugcuaguuccagacaccucccaagcacgcagcaaugcagcucaaaacgcuuagccuagccacacccccacgggaaacagcagugauuaaccuuuagcaauaaacgaaaguuuaacuaagcuauacuaaccccaggguuggucaauuucgugccagccacacccuggagcuagcaaaaaaaaaaaaaaaaaaaaaaaaaaaaaagcauaugacuaaaaaaaaaaaaaaaaaaaaaaaaaaaaaaaaaaaaaaaaaaaaaaaaaaaaaaaaaaaaaaaaaaaaaa

SEQ ID NO: 26790 - RNA, 4283 nt, Artificial Sequence
  SARS-CoV-2/Wuhan/WIV05/2019__EPI_ISL_402128 spike protein mRNA gc mod (1-1273)(D614G_M1229I)
agaauaaacuaguauucuucugguccccacagacucagagagaacccgccaccauguucguguuucuggugcugcugccccugguguccagccagugugugaaccugaccaccagaacacagcugccuccagccuacaccaacagcuucaccagaggcguguacuaccccgacaagguguucagauccagcgugcugcacucuacccaggaccuguuccugccuuucuucagcaacgugaccugguuccacgccauccacguguccggcaccaauggcaccaagagauucgacaaccccgugcugcccuucaacgacgggguguacuuugccagcaccgagaaguccaacaucaucagaggcuggaucuucggcaccacacuggacagcaagacccagagccugcugaucgugaacaacgccaccaacguggucaucaaagugugcgaguuccaguucugcaacgaccccuuccugggcgucuacuaccacaagaacaacaagagcuggauggaaagcgaguuccggguguacagcagcgccaacaacugcaccuucgaguacgugucccagccuuuccugauggaccuggaaggcaagcagggcaacuucaagaaccugcgcgaguucguguucaagaacaucgacggcuacuucaaaaucuacagcaagcacaccccuaucaaccucgugcgggaucugccucagggcuucucugcucuggaaccccugguggaucugcccaucggcaucaacaucacccgguuucagacacugcuggcccugcacagaagcuaccugacaccuggcgauagcagcagcggauggacagcuggugccgccgcuuacuaugugggcuaccugcagccuagaaccuuccugcugaaguacaacgagaacggcaccaucaccgacgccguggauugugcucuggauccucugagcgagacaaagugcacccugaaguccuucaccguggaaaagggcaucuaccagaccagcaacuuccgggugcagcccaccgaauccaucgugcgguuccccaauaucaccaaucugugccccuucggcgagguguucaaugccaccagauucgccucuguguacgccuggaaccggaagcggaucagcaauugcguggccgacuacuccgugcuguacaacuccgccagcuucagcaccuucaagugcuacggcguguccccuaccaagcugaacgaccugugcuucacaaacguguacgccgacagcuucgugauccggggagaugaagugcggcagauugccccuggacagacaggcaagaucgccgacuacaacuacaagcugcccgacgacuucaccggcugugugauugccuggaacagcaacaaccuggacuccaaagucggcggcaacuacaauuaccuguaccggcuguuccggaaguccaaucugaagcccuucgagcgggacaucagcaccgaaaucuaucaggccggcagcaccccuugcaacggcguggaaggcuucaacugcuacuucccacugcaguccuacggcuuucagcccacaaauggcgugggcuaucagcccuacagagugguggugcugagcuucgaacugcugcaugcuccugccacagugugcggcccuaagaaaagcaccaaucucgugaagaacaaaugcgugaacuucaacuucaacggccugaccggcaccggcgugcugacagagagcaacaagaaguuccugccauuccagcaguuuggccgggauaucgccgauaccacagacgccguuagagauccccagacacuggaaauccuggacaucaccccaugcagcuucggcggagugucugugaucaccccuggcaccaacaccagcaaucagguggcagugcuguaccagggcgugaacuguaccgaagugcccguggccauucacgccgaucagcugacaccuacauggcggguguacuccaccggcagcaauguguuucagaccagagccggcugucugaucggagccgagcacgugaacaauagcuacgagugcgacauccccaucggcgcuggcaucugugccagcuaccagacacagacaaacagccccagacgggcuagaagcguggccagccagagcaucauugccuacacaaugucucugggcgccgagaacagcguggccuacuccaacaacucuaucgcuauccccaccaacuucaccaucagcgugaccaccgagauccugccuguguccaugaccaagaccagcguggacugcaccauguacaucugcggcgauuccaccgagugcuccaaccugcugcugcaguacggcagcuucugcacccagcugaauagagcccugacagggaucgccguggaacaggacaagaacacccaagagguguucgcccaagugaagcaaaucuacaagaccccuccuaucaaggacuucggcggcuucaauuucagccagauucugcccgauccuagcaagcccagcaagcggagcuucaucgaggaccugcuguucaacaaagugacacuggccgacgccggcuucaucaagcaguauggcgauugucugggcgacauugccgccagggaucugauuugcgcccagaaguuuaacggacugacagugcugccuccucugcugaccgaugagaugaucgcccaguacacaucugcccugcuggccggcacaaucacaagcggcuggacauuuggagcuggcgccgcucugcagauccccuuugcuaugcagauggccuaccgguucaacggcaucggagugacccagaaugugcuguacgagaaccagaagcugaucgccaaccaguucaacagcgccaucggcaagauccaggacagccugagcagcacagcaagcgcccugggaaagcugcaggacguggucaaccagaaugcccaggcacugaacacccuggucaagcagcuguccuccaacuucggcgccaucagcucugugcugaacgauauccugagcagacuggacaaggucgaggccgaggugcagaucgacagacugaucacaggcagacugcagagccuccagacauacgugacccagcagcugaucagagccgccgagauuagagccucugccaaucuggccgccaccaagaugucugagugugugcugggccagagcaagagaguggacuuuugcggcaagggcuaccaccugaugagcuucccucagucugccccucacggcgugguguuucugcacgugacauaugugcccgcucaagagaagaauuucaccaccgcuccagccaucugccacgacggcaaagcccacuuuccuagagaaggcguguucguguccaacggcacccauugguucgugacacagcggaacuucuacgagccccagaucaucaccaccgacaacaccuucgugucuggcaacugcgacguugugaucggcauugugaacaauaccguguacgacccucugcagcccgagcuggacagcuucaaagaggaacuggacaaguacuuuaagaaccacacaagccccgacguggaccugggcgauaucagcggaaucaaugccagcgucgugaacauccagaaagagaucgaccggcugaacgagguggccaagaaucugaacgagagccugaucgaccugcaagaacuggggaaguacgagcaguacaucaaguggcccugguacaucuggcugggcuuuaucgccggacugauugccaucgugaucgucacaaucaugcuguguugcaugaccagcugcuguagcugccugaagggcuguuguagcuguggcagcugcugcaaguucgacgaggacgauucugagcccgugcugaagggcgugaaacugcacuacaccugaugacucgagcugguacugcaugcacgcaaugcuagcugccccuuucccguccuggguaccccgagucucccccgaccucgggucccagguaugcucccaccuccaccugccccacucaccaccucugcuaguuccagacaccucccaagcacgcagcaaugcagcucaaaacgcuuagccuagccacacccccacgggaaacagcagugauuaaccuuuagcaauaaacgaaaguuuaacuaagcuauacuaaccccaggguuggucaauuucgugccagccacacccuggagcuagcaaaaaaaaaaaaaaaaaaaaaaaaaaaaaagcauaugacuaaaaaaaaaaaaaaaaaaaaaaaaaaaaaaaaaaaaaaaaaaaaaaaaaaaaaaaaaaaaaaaaaaaaaa

SEQ ID NO: 26791 - RNA, 4277 nt, Artificial Sequence
  SARS-CoV-2/Wuhan/WIV05/2019__EPI_ISL_402128 spike protein mRNA gc mod (1-1273)(H69del_V70del_A222V_Y453F_S477N_D614G_I692V)
agaauaaacuaguauucuucugguccccacagacucagagagaacccgccaccauguucguguuucuggugcugcugccccugguguccagccagugugugaaccugaccaccagaacacagcugccuccagccuacaccaacagcuucaccagaggcguguacuaccccgacaagguguucagauccagcgugcugcacucuacccaggaccuguuccugccuuucuucagcaacgugaccugguuccacgccaucuccggcaccaauggcaccaagagauucgacaaccccgugcugcccuucaacgacgggguguacuuugccagcaccgagaaguccaacaucaucagaggcuggaucuucggcaccacacuggacagcaagacccagagccugcugaucgugaacaacgccaccaacguggucaucaaagugugcgaguuccaguucugcaacgaccccuuccugggcgucuacuaccacaagaacaacaagagcuggauggaaagcgaguuccggguguacagcagcgccaacaacugcaccuucgaguacgugucccagccuuuccugauggaccuggaaggcaagcagggcaacuucaagaaccugcgcgaguucguguucaagaacaucgacggcuacuucaaaaucuacagcaagcacaccccuaucaaccucgugcgggaucugccucagggcuucucugugcuggaaccccugguggaucugcccaucggcaucaacaucacccgguuucagacacugcuggcccugcacagaagcuaccugacaccuggcgauagcagcagcggauggacagcuggugccgccgcuuacuaugugggcuaccugcagccuagaaccuuccugcugaaguacaacgagaacggcaccaucaccgacgccguggauugugcucuggauccucugagcgagacaaagugcacccugaaguccuucaccguggaaaagggcaucuaccagaccagcaacuuccgggugcagcccaccgaauccaucgugcgguuccccaauaucaccaaucugugccccuucggcgagguguucaaugccaccagauucgccucuguguacgccuggaaccggaagcggaucagcaauugcguggccgacuacuccgugcuguacaacuccgccagcuucagcaccuucaagugcuacggcguguccccuaccaagcugaacgaccugugcuucacaaacguguacgccgacagcuucgugauccggggagaugaagugcggcagauugccccuggacagacaggcaagaucgccgacuacaacuacaagcugcccgacgacuucaccggcugugugauugccuggaacagcaacaaccuggacuccaaagucggcggcaacuacaauuaccuguuccggcuguuccggaaguccaaucugaagcccuucgagcgggacaucagcaccgaaaucuaucaggccggcaacaccccuugcaacggcguggaaggcuucaacugcuacuucccacugcaguccuacggcuuucagcccacaaauggcgugggcuaucagcccuacagagugguggugcugagcuucgaacugcugcaugcuccugccacagugugcggcccuaagaaaagcaccaaucucgugaagaacaaaugcgugaacuucaacuucaacggccugaccggcaccggcgugcugacagagagcaacaagaaguuccugccauuccagcaguuuggccgggauaucgccgauaccacagacgccguuagagauccccagacacuggaaauccuggacaucaccccaugcagcuucggcggagugucugugaucaccccuggcaccaacaccagcaaucagguggcagugcuguaccagggcgugaacuguaccgaagugcccguggccauucacgccgaucagcugacaccuacauggcggguguacuccaccggcagcaauguguuucagaccagagccggcugucugaucggagccgagcacgugaacaauagcuacgagugcgacauccccaucggcgcuggcaucugugccagcuaccagacacagacaaacagccccagacgggcuagaagcguggccagccagagcgugauugccuacacaaugucucugggcgccgagaacagcguggccuacuccaacaacucuaucgcuauccccaccaacuucaccaucagcgugaccaccgagauccugccuguguccaugaccaagaccagcguggacugcaccauguacaucugcggcgauuccaccgagugcuccaaccugcugcugcaguacggcagcuucugcacccagcugaauagagcccugacagggaucgccguggaacaggacaagaacacccaagagguguucgcccaagugaagcaaaucuacaagaccccuccuaucaaggacuucggcggcuucaauuucagccagauucugcccgauccuagcaagcccagcaagcggagcuucaucgaggaccugcuguucaacaaagugacacuggccgacgccggcuucaucaagcaguauggcgauugucugggcgacauugccgccagggaucugauuugcgcccagaaguuuaacggacugacagugcugccuccucugcugaccgaugagaugaucgcccaguacacaucugcccugcuggccggcacaaucacaagcggcuggacauuuggagcuggcgccgcucugcagauccccuuugcuaugcagauggccuaccgguucaacggcaucggagugacccagaaugugcuguacgagaaccagaagcugaucgccaaccaguucaacagcgccaucggcaagauccaggacagccugagcagcacagcaagcgcccugggaaagcugcaggacguggucaaccagaaugcccaggcacugaacacccuggucaagcagcuguccuccaacuucggcgccaucagcucugugcugaacgauauccugagcagacuggacaaggucgaggccgaggugcagaucgacagacugaucacaggcagacugcagagccuccagacauacgugacccagcagcugaucagagccgccgagauuagagccucugccaaucuggccgccaccaagaugucugagugugugcugggccagagcaagagaguggacuuuugcggcaagggcuaccaccugaugagcuucccucagucugccccucacggcgugguguuucugcacgugacauaugugcccgcucaagagaagaauuucaccaccgcuccagccaucugccacgacggcaaagcccacuuuccuagagaaggcguguucguguccaacggcacccauugguucgugacacagcggaacuucuacgagccccagaucaucaccaccgacaacaccuucgugucuggcaacugcgacguugugaucggcauugugaacaauaccguguacgacccucugcagcccgagcuggacagcuucaaagaggaacuggacaaguacuuuaagaaccacacaagccccgacguggaccugggcgauaucagcggaaucaaugccagcgucgugaacauccagaaagagaucgaccggcugaacgagguggccaagaaucugaacgagagccugaucgaccugcaagaacuggggaaguacgagcaguacaucaaguggcccugguacaucuggcugggcuuuaucgccggacugauugccaucgugauggucacaaucaugcuguguugcaugaccagcugcuguagcugccugaagggcuguuguagcuguggcagcugcugcaaguucgacgaggacgauucugagcccgugcugaagggcgugaaacugcacuacaccugaugacucgagcugguacugcaugcacgcaaugcuagcugccccuuucccguccuggguaccccgagucucccccgaccucgggucccagguaugcucccaccuccaccugccccacucaccaccucugcuaguuccagacaccucccaagcacgcagcaaugcagcucaaaacgcuuagccuagccacacccccacgggaaacagcagugauuaaccuuuagcaauaaacgaaaguuuaacuaagcuauacuaaccccaggguuggucaauuucgugccagccacacccuggagcuagcaaaaaaaaaaaaaaaaaaaaaaaaaaaaaagcauaugacuaaaaaaaaaaaaaaaaaaaaaaaaaaaaaaaaaaaaaaaaaaaaaaaaaaaaaaaaaaaaaaaaaaaaaa

SEQ ID NO: 26792 - RNA, 4277 nt, Artificial Sequence
  SARS-CoV-2/Wuhan/WIV05/2019__EPI_ISL_402128 spike protein mRNA gc mod (1-1273)(H69del_V70del_Y453F_D614G_I692V_M1229I)
agaauaaacuaguauucuucugguccccacagacucagagagaacccgccaccauguucguguuucuggugcugcugccccugguguccagccagugugugaaccugaccaccagaacacagcugccuccagccuacaccaacagcuucaccagaggcguguacuaccccgacaagguguucagauccagcgugcugcacucuacccaggaccuguuccugccuuucuucagcaacgugaccugguuccacgccaucuccggcaccaauggcaccaagagauucgacaaccccgugcugcccuucaacgacgggguguacuuugccagcaccgagaaguccaacaucaucagaggcuggaucuucggcaccacacuggacagcaagacccagagccugcugaucgugaacaacgccaccaacguggucaucaaagugugcgaguuccaguucugcaacgaccccuuccugggcgucuacuaccacaagaacaacaagagcuggauggaaagcgaguuccggguguacagcagcgccaacaacugcaccuucgaguacgugucccagccuuuccugauggaccuggaaggcaagcagggcaacuucaagaaccugcgcgaguucguguucaagaacaucgacggcuacuucaaaaucuacagcaagcacaccccuaucaaccucgugcgggaucugccucagggcuucucugcucuggaaccccugguggaucugcccaucggcaucaacaucacccgguuucagacacugcuggcccugcacagaagcuaccugacaccuggcgauagcagcagcggauggacagcuggugccgccgcuuacuaugugggcuaccugcagccuagaaccuuccugcugaaguacaacgagaacggcaccaucaccgacgccguggauugugcucuggauccucugagcgagacaaagugcacccugaaguccuucaccguggaaaagggcaucuaccagaccagcaacuuccgggugcagcccaccgaauccaucgugcgguuccccaauaucaccaaucugugccccuucggcgagguguucaaugccaccagauucgccucuguguacgccuggaaccggaagcggaucagcaauugcguggccgacuacuccgugcuguacaacuccgccagcuucagcaccuucaagugcuacggcguguccccuaccaagcugaacgaccugugcuucacaaacguguacgccgacagcuucgugauccggggagaugaagugcggcagauugccccuggacagacaggcaagaucgccgacuacaacuacaagcugcccgacgacuucaccggcugugugauugccuggaacagcaacaaccuggacuccaaagucggcggcaacuacaauuaccuguuccggcuguuccggaaguccaaucugaagcccuucgagcgggacaucagcaccgaaaucuaucaggccggcagcaccccuugcaacggcguggaaggcuucaacugcuacuucccacugcaguccuacggcuuucagcccacaaauggcgugggcuaucagcccuacagagugguggugcugagcuucgaacugcugcaugcuccugccacagugugcggcccuaagaaaagcaccaaucucgugaagaacaaaugcgugaacuucaacuucaacggccugaccggcaccggcgugcugacagagagcaacaagaaguuccugccauuccagcaguuuggccgggauaucgccgauaccacagacgccguuagagauccccagacacuggaaauccuggacaucaccccaugcagcuucggcggagugucugugaucaccccuggcaccaacaccagcaaucagguggcagugcuguaccagggcgugaacuguaccgaagugcccguggccauucacgccgaucagcugacaccuacauggcggguguacuccaccggcagcaauguguuucagaccagagccggcugucugaucggagccgagcacgugaacaauagcuacgagugcgacauccccaucggcgcuggcaucugugccagcuaccagacacagacaaacagccccagacgggcuagaagcguggccagccagagcgugauugccuacacaaugucucugggcgccgagaacagcguggccuacuccaacaacucuaucgcuauccccaccaacuucaccaucagcgugaccaccgagauccugccuguguccaugaccaagaccagcguggacugcaccauguacaucugcggcgauuccaccgagugcuccaaccugcugcugcaguacggcagcuucugcacccagcugaauagagcccugacagggaucgccguggaacaggacaagaacacccaagagguguucgcccaagugaagcaaaucuacaagaccccuccuaucaaggacuucggcggcuucaauuucagccagauucugcccgauccuagcaagcccagcaagcggagcuucaucgaggaccugcuguucaacaaagugacacuggccgacgccggcuucaucaagcaguauggcgauugucugggcgacauugccgccagggaucugauuugcgcccagaaguuuaacggacugacagugcugccuccucugcugaccgaugagaugaucgcccaguacacaucugcccugcuggccggcacaaucacaagcggcuggacauuuggagcuggcgccgcucugcagauccccuuugcuaugcagauggccuaccgguucaacggcaucggagugacccagaaugugcuguacgagaaccagaagcugaucgccaaccaguucaacagcgccaucggcaagauccaggacagccugagcagcacagcaagcgcccugggaaagcugcaggacguggucaaccagaaugcccaggcacugaacacccuggucaagcagcuguccuccaacuucggcgccaucagcucugugcugaacgauauccugagcagacuggacaaggucgaggccgaggugcagaucgacagacugaucacaggcagacugcagagccuccagacauacgugacccagcagcugaucagagccgccgagauuagagccucugccaaucuggccgccaccaagaugucugagugugugcugggccagagcaagagaguggacuuuugcggcaagggcuaccaccugaugagcuucccucagucugccccucacggcgugguguuucugcacgugacauaugugcccgcucaagagaagaauuucaccaccgcuccagccaucugccacgacggcaaagcccacuuuccuagagaaggcguguucguguccaacggcacccauugguucgugacacagcggaacuucuacgagccccagaucaucaccaccgacaacaccuucgugucuggcaacugcgacguugugaucggcauugugaacaauaccguguacgacccucugcagcccgagcuggacagcuucaaagaggaacuggacaaguacuuuaagaaccacacaagccccgacguggaccugggcgauaucagcggaaucaaugccagcgucgugaacauccagaaagagaucgaccggcugaacgagguggccaagaaucugaacgagagccugaucgaccugcaagaacuggggaaguacgagcaguacaucaaguggcccugguacaucuggcugggcuuuaucgccggacugauugccaucgugaucgucacaaucaugcuguguugcaugaccagcugcuguagcugccugaagggcuguuguagcuguggcagcugcugcaaguucgacgaggacgauucugagcccgugcugaagggcgugaaacugcacuacaccugaugacucgagcugguacugcaugcacgcaaugcuagcugccccuuucccguccuggguaccccgagucucccccgaccucgggucccagguaugcucccaccuccaccugccccacucaccaccucugcuaguuccagacaccucccaagcacgcagcaaugcagcucaaaacgcuuagccuagccacacccccacgggaaacagcagugauuaaccuuuagcaauaaacgaaaguuuaacuaagcuauacuaaccccaggguuggucaauuucgugccagccacacccuggagcuagcaaaaaaaaaaaaaaaaaaaaaaaaaaaaaagcauaugacuaaaaaaaaaaaaaaaaaaaaaaaaaaaaaaaaaaaaaaaaaaaaaaaaaaaaaaaaaaaaaaaaaaaaaa

SEQ ID NO: 26793 - RNA, 4274 nt, Artificial Sequence
  SARS-CoV-2/Wuhan/WIV05/2019__EPI_ISL_402128 spike protein mRNA gc mod (1-1273)(H69del_V70del_Y144del_N501Y_A570D_D614G_P681H_T716I_S982 A_D1118H)
agaauaaacuaguauucuucugguccccacagacucagagagaacccgccaccauguucguguuucuggugcugcugccccugguguccagccagugugugaaccugaccaccagaacacagcugccuccagccuacaccaacagcuucaccagaggcguguacuaccccgacaagguguucagauccagcgugcugcacucuacccaggaccuguuccugccuuucuucagcaacgugaccugguuccacgccaucuccggcaccaauggcaccaagagauucgacaaccccgugcugcccuucaacgacgggguguacuuugccagcaccgagaaguccaacaucaucagaggcuggaucuucggcaccacacuggacagcaagacccagagccugcugaucgugaacaacgccaccaacguggucaucaaagugugcgaguuccaguucugcaacgaccccuuccugggcgucuaccacaagaacaacaagagcuggauggaaagcgaguuccggguguacagcagcgccaacaacugcaccuucgaguacgugucccagccuuuccugauggaccuggaaggcaagcagggcaacuucaagaaccugcgcgaguucguguucaagaacaucgacggcuacuucaaaaucuacagcaagcacaccccuaucaaccucgugcgggaucugccucagggcuucucugcucuggaaccccugguggaucugcccaucggcaucaacaucacccgguuucagacacugcuggcccugcacagaagcuaccugacaccuggcgauagcagcagcggauggacagcuggugccgccgcuuacuaugugggcuaccugcagccuagaaccuuccugcugaaguacaacgagaacggcaccaucaccgacgccguggauugugcucuggauccucugagcgagacaaagugcacccugaaguccuucaccguggaaaagggcaucuaccagaccagcaacuuccgggugcagcccaccgaauccaucgugcgguuccccaauaucaccaaucugugccccuucggcgagguguucaaugccaccagauucgccucuguguacgccuggaaccggaagcggaucagcaauugcguggccgacuacuccgugcuguacaacuccgccagcuucagcaccuucaagugcuacggcguguccccuaccaagcugaacgaccugugcuucacaaacguguacgccgacagcuucgugauccggggagaugaagugcggcagauugccccuggacagacaggcaagaucgccgacuacaacuacaagcugcccgacgacuucaccggcugugugauugccuggaacagcaacaaccuggacuccaaagucggcggcaacuacaauuaccuguaccggcuguuccggaaguccaaucugaagcccuucgagcgggacaucagcaccgaaaucuaucaggccggcagcaccccuugcaacggcguggaaggcuucaacugcuacuucccacugcaguccuacggcuuucagcccacauacggcgugggcuaucagcccuacagagugguggugcugagcuucgaacugcugcaugcuccugccacagugugcggcccuaagaaaagcaccaaucucgugaagaacaaaugcgugaacuucaacuucaacggccugaccggcaccggcgugcugacagagagcaacaagaaguuccugccauuccagcaguuuggccgggauaucgacgauaccacagacgccguuagagauccccagacacuggaaauccuggacaucaccccaugcagcuucggcggagugucugugaucaccccuggcaccaacaccagcaaucagguggcagugcuguaccagggcgugaacuguaccgaagugcccguggccauucacgccgaucagcugacaccuacauggcggguguacuccaccggcagcaauguguuucagaccagagccggcugucugaucggagccgagcacgugaacaauagcuacgagugcgacauccccaucggcgcuggcaucugugccagcuaccagacacagacaaacagccacagacgggcuagaagcguggccagccagagcaucauugccuacacaaugucucugggcgccgagaacagcguggccuacuccaacaacucuaucgcuauccccaucaacuucaccaucagcgugaccaccgagauccugccuguguccaugaccaagaccagcguggacugcaccauguacaucugcggcgauuccaccgagugcuccaaccugcugcugcaguacggcagcuucugcacccagcugaauagagcccugacagggaucgccguggaacaggacaagaacacccaagagguguucgcccaagugaagcaaaucuacaagaccccuccuaucaaggacuucggcggcuucaauuucagccagauucugcccgauccuagcaagcccagcaagcggagcuucaucgaggaccugcuguucaacaaagugacacuggccgacgccggcuucaucaagcaguauggcgauugucugggcgacauugccgccagggaucugauuugcgcccagaaguuuaacggacugacagugcugccuccucugcugaccgaugagaugaucgcccaguacacaucugcccugcuggccggcacaaucacaagcggcuggacauuuggagcuggcgccgcucugcagauccccuuugcuaugcagauggccuaccgguucaacggcaucggagugacccagaaugugcuguacgagaaccagaagcugaucgccaaccaguucaacagcgccaucggcaagauccaggacagccugagcagcacagcaagcgcccugggaaagcugcaggacguggucaaccagaaugcccaggcacugaacacccuggucaagcagcuguccuccaacuucggcgccaucagcucugugcugaacgauauccuggccagacuggacaaggucgaggccgaggugcagaucgacagacugaucacaggcagacugcagagccuccagacauacgugacccagcagcugaucagagccgccgagauuagagccucugccaaucuggccgccaccaagaugucugagugugugcugggccagagcaagagaguggacuuuugcggcaagggcuaccaccugaugagcuucccucagucugccccucacggcgugguguuucugcacgugacauaugugcccgcucaagagaagaauuucaccaccgcuccagccaucugccacgacggcaaagcccacuuuccuagagaaggcguguucguguccaacggcacccauugguucgugacacagcggaacuucuacgagccccagaucaucaccacccacaacaccuucgugucuggcaacugcgacguugugaucggcauugugaacaauaccguguacgacccucugcagcccgagcuggacagcuucaaagaggaacuggacaaguacuuuaagaaccacacaagccccgacguggaccugggcgauaucagcggaaucaaugccagcgucgugaacauccagaaagagaucgaccggcugaacgagguggccaagaaucugaacgagagccugaucgaccugcaagaacuggggaaguacgagcaguacaucaaguggcccugguacaucuggcugggcuuuaucgccggacugauugccaucgugauggucacaaucaugcuguguugcaugaccagcugcuguagcugccugaagggcuguuguagcuguggcagcugcugcaaguucgacgaggacgauucugagcccgugcugaagggcgugaaacugcacuacaccugaugacucgagcugguacugcaugcacgcaaugcuagcugccccuuucccguccuggguaccccgagucucccccgaccucgggucccagguaugcucccaccuccaccugccccacucaccaccucugcuaguuccagacaccucccaagcacgcagcaaugcagcucaaaacgcuuagccuagccacacccccacgggaaacagcagugauuaaccuuuagcaauaaacgaaaguuuaacuaagcuauacuaaccccaggguuggucaauuucgugccagccacacccuggagcuagcaaaaaaaaaaaaaaaaaaaaaaaaaaaaaagcauaugacuaaaaaaaaaaaaaaaaaaaaaaaaaaaaaaaaaaaaaaaaaaaaaaaaaaaaaaaaaaaaaaaaaaaaaa

SEQ ID NO: 26794 - RNA, 4283 nt, Artificial Sequence
  SARS-CoV-2/Wuhan/WIV05/2019__EPI_ISL_402128 spike protein mRNA gc mod (1-1273)(K417N_E484K_N501Y_D614G)
agaauaaacuaguauucuucugguccccacagacucagagagaacccgccaccauguucguguuucuggugcugcugccccugguguccagccagugugugaaccugaccaccagaacacagcugccuccagccuacaccaacagcuucaccagaggcguguacuaccccgacaagguguucagauccagcgugcugcacucuacccaggaccuguuccugccuuucuucagcaacgugaccugguuccacgccauccacguguccggcaccaauggcaccaagagauucgacaaccccgugcugcccuucaacgacgggguguacuuugccagcaccgagaaguccaacaucaucagaggcuggaucuucggcaccacacuggacagcaagacccagagccugcugaucgugaacaacgccaccaacguggucaucaaagugugcgaguuccaguucugcaacgaccccuuccugggcgucuacuaccacaagaacaacaagagcuggauggaaagcgaguuccggguguacagcagcgccaacaacugcaccuucgaguacgugucccagccuuuccugauggaccuggaaggcaagcagggcaacuucaagaaccugcgcgaguucguguucaagaacaucgacggcuacuucaaaaucuacagcaagcacaccccuaucaaccucgugcgggaucugccucagggcuucucugcucuggaaccccugguggaucugcccaucggcaucaacaucacccgguuucagacacugcuggcccugcacagaagcuaccugacaccuggcgauagcagcagcggauggacagcuggugccgccgcuuacuaugugggcuaccugcagccuagaaccuuccugcugaaguacaacgagaacggcaccaucaccgacgccguggauugugcucuggauccucugagcgagacaaagugcacccugaaguccuucaccguggaaaagggcaucuaccagaccagcaacuuccgggugcagcccaccgaauccaucgugcgguuccccaauaucaccaaucugugccccuucggcgagguguucaaugccaccagauucgccucuguguacgccuggaaccggaagcggaucagcaauugcguggccgacuacuccgugcuguacaacuccgccagcuucagcaccuucaagugcuacggcguguccccuaccaagcugaacgaccugugcuucacaaacguguacgccgacagcuucgugauccggggagaugaagugcggcagauugccccuggacagacaggcaacaucgccgacuacaacuacaagcugcccgacgacuucaccggcugugugauugccuggaacagcaacaaccuggacuccaaagucggcggcaacuacaauuaccuguaccggcuguuccggaaguccaaucugaagcccuucgagcgggacaucagcaccgaaaucuaucaggccggcagcaccccuugcaacggcgugaagggcuucaacugcuacuucccacugcaguccuacggcuuucagcccacauacggcgugggcuaucagcccuacagagugguggugcugagcuucgaacugcugcaugcuccugccacagugugcggcccuaagaaaagcaccaaucucgugaagaacaaaugcgugaacuucaacuucaacggccugaccggcaccggcgugcugacagagagcaacaagaaguuccugccauuccagcaguuuggccgggauaucgccgauaccacagacgccguuagagauccccagacacuggaaauccuggacaucaccccaugcagcuucggcggagugucugugaucaccccuggcaccaacaccagcaaucagguggcagugcuguaccagggcgugaacuguaccgaagugcccguggccauucacgccgaucagcugacaccuacauggcggguguacuccaccggcagcaauguguuucagaccagagccggcugucugaucggagccgagcacgugaacaauagcuacgagugcgacauccccaucggcgcuggcaucugugccagcuaccagacacagacaaacagccccagacgggcuagaagcguggccagccagagcaucauugccuacacaaugucucugggcgccgagaacagcguggccuacuccaacaacucuaucgcuauccccaccaacuucaccaucagcgugaccaccgagauccugccuguguccaugaccaagaccagcguggacugcaccauguacaucugcggcgauuccaccgagugcuccaaccugcugcugcaguacggcagcuucugcacccagcugaauagagcccugacagggaucgccguggaacaggacaagaacacccaagagguguucgcccaagugaagcaaaucuacaagaccccuccuaucaaggacuucggcggcuucaauuucagccagauucugcccgauccuagcaagcccagcaagcggagcuucaucgaggaccugcuguucaacaaagugacacuggccgacgccggcuucaucaagcaguauggcgauugucugggcgacauugccgccagggaucugauuugcgcccagaaguuuaacggacugacagugcugccuccucugcugaccgaugagaugaucgcccaguacacaucugcccugcuggccggcacaaucacaagcggcuggacauuuggagcuggcgccgcucugcagauccccuuugcuaugcagauggccuaccgguucaacggcaucggagugacccagaaugugcuguacgagaaccagaagcugaucgccaaccaguucaacagcgccaucggcaagauccaggacagccugagcagcacagcaagcgcccugggaaagcugcaggacguggucaaccagaaugcccaggcacugaacacccuggucaagcagcuguccuccaacuucggcgccaucagcucugugcugaacgauauccugagcagacuggacaaggucgaggccgaggugcagaucgacagacugaucacaggcagacugcagagccuccagacauacgugacccagcagcugaucagagccgccgagauuagagccucugccaaucuggccgccaccaagaugucugagugugugcugggccagagcaagagaguggacuuuugcggcaagggcuaccaccugaugagcuucccucagucugccccucacggcgugguguuucugcacgugacauaugugcccgcucaagagaagaauuucaccaccgcuccagccaucugccacgacggcaaagcccacuuuccuagagaaggcguguucguguccaacggcacccauugguucgugacacagcggaacuucuacgagccccagaucaucaccaccgacaacaccuucgugucuggcaacugcgacguugugaucggcauugugaacaauaccguguacgacccucugcagcccgagcuggacagcuucaaagaggaacuggacaaguacuuuaagaaccacacaagccccgacguggaccugggcgauaucagcggaaucaaugccagcgucgugaacauccagaaagagaucgaccggcugaacgagguggccaagaaucugaacgagagccugaucgaccugcaagaacuggggaaguacgagcaguacaucaaguggcccugguacaucuggcugggcuuuaucgccggacugauugccaucgugauggucacaaucaugcuguguugcaugaccagcugcuguagcugccugaagggcuguuguagcuguggcagcugcugcaaguucgacgaggacgauucugagcccgugcugaagggcgugaaacugcacuacaccugaugacucgagcugguacugcaugcacgcaaugcuagcugccccuuucccguccuggguaccccgagucucccccgaccucgggucccagguaugcucccaccuccaccugccccacucaccaccucugcuaguuccagacaccucccaagcacgcagcaaugcagcucaaaacgcuuagccuagccacacccccacgggaaacagcagugauuaaccuuuagcaauaaacgaaaguuuaacuaagcuauacuaaccccaggguuggucaauuucgugccagccacacccuggagcuagcaaaaaaaaaaaaaaaaaaaaaaaaaaaaaagcauaugacuaaaaaaaaaaaaaaaaaaaaaaaaaaaaaaaaaaaaaaaaaaaaaaaaaaaaaaaaaaaaaaaaaaaaaa

SEQ ID NO: 26795 - RNA, 4274 nt, Artificial Sequence
  SARS-CoV-2/Wuhan/WIV05/2019__EPI_ISL_402128 spike protein mRNA gc mod (1-1273)(L18F_D80A_D215G_L242del_A243del_L244del_R246I_K417N_E484 K_N501Y_D614G_A701V)
agaauaaacuaguauucuucugguccccacagacucagagagaacccgccaccauguucguguuucuggugcugcugccccugguguccagccagugugugaacuucaccaccagaacacagcugccuccagccuacaccaacagcuucaccagaggcguguacuaccccgacaagguguucagauccagcgugcugcacucuacccaggaccuguuccugccuuucuucagcaacgugaccugguuccacgccauccacguguccggcaccaauggcaccaagagauucgccaaccccgugcugcccuucaacgacgggguguacuuugccagcaccgagaaguccaacaucaucagaggcuggaucuucggcaccacacuggacagcaagacccagagccugcugaucgugaacaacgccaccaacguggucaucaaagugugcgaguuccaguucugcaacgaccccuuccugggcgucuacuaccacaagaacaacaagagcuggauggaaagcgaguuccggguguacagcagcgccaacaacugcaccuucgaguacgugucccagccuuuccugauggaccuggaaggcaagcagggcaacuucaagaaccugcgcgaguucguguucaagaacaucgacggcuacuucaaaaucuacagcaagcacaccccuaucaaccucgugcggggccugccucagggcuucucugcucuggaaccccugguggaucugcccaucggcaucaacaucacccgguuucagacacugcacaucagcuaccugacaccuggcgauagcagcagcggauggacagcuggugccgccgcuuacuaugugggcuaccugcagccuagaaccuuccugcugaaguacaacgagaacggcaccaucaccgacgccguggauugugcucuggauccucugagcgagacaaagugcacccugaaguccuucaccguggaaaagggcaucuaccagaccagcaacuuccgggugcagcccaccgaauccaucgugcgguuccccaauaucaccaaucugugccccuucggcgagguguucaaugccaccagauucgccucuguguacgccuggaaccggaagcggaucagcaauugcguggccgacuacuccgugcuguacaacuccgccagcuucagcaccuucaagugcuacggcguguccccuaccaagcugaacgaccugugcuucacaaacguguacgccgacagcuucgugauccggggagaugaagugcggcagauugccccuggacagacaggcaacaucgccgacuacaacuacaagcugcccgacgacuucaccggcugugugauugccuggaacagcaacaaccuggacuccaaagucggcggcaacuacaauuaccuguaccggcuguuccggaaguccaaucugaagcccuucgagcgggacaucagcaccgaaaucuaucaggccggcagcaccccuugcaacggcgugaagggcuucaacugcuacuucccacugcaguccuacggcuuucagcccacauacggcgugggcuaucagcccuacagagugguggugcugagcuucgaacugcugcaugcuccugccacagugugcggcccuaagaaaagcaccaaucucgugaagaacaaaugcgugaacuucaacuucaacggccugaccggcaccggcgugcugacagagagcaacaagaaguuccugccauuccagcaguuuggccgggauaucgccgauaccacagacgccguuagagauccccagacacuggaaauccuggacaucaccccaugcagcuucggcggagugucugugaucaccccuggcaccaacaccagcaaucagguggcagugcuguaccagggcgugaacuguaccgaagugcccguggccauucacgccgaucagcugacaccuacauggcggguguacuccaccggcagcaauguguuucagaccagagccggcugucugaucggagccgagcacgugaacaauagcuacgagugcgacauccccaucggcgcuggcaucugugccagcuaccagacacagacaaacagccccagacgggcuagaagcguggccagccagagcaucauugccuacacaaugucucugggcguggagaacagcguggccuacuccaacaacucuaucgcuauccccaccaacuucaccaucagcgugaccaccgagauccugccuguguccaugaccaagaccagcguggacugcaccauguacaucugcggcgauuccaccgagugcuccaaccugcugcugcaguacggcagcuucugcacccagcugaauagagcccugacagggaucgccguggaacaggacaagaacacccaagagguguucgcccaagugaagcaaaucuacaagaccccuccuaucaaggacuucggcggcuucaauuucagccagauucugcccgauccuagcaagcccagcaagcggagcuucaucgaggaccugcuguucaacaaagugacacuggccgacgccggcuucaucaagcaguauggcgauugucugggcgacauugccgccagggaucugauuugcgcccagaaguuuaacggacugacagugcugccuccucugcugaccgaugagaugaucgcccaguacacaucugcccugcuggccggcacaaucacaagcggcuggacauuuggagcuggcgccgcucugcagauccccuuugcuaugcagauggccuaccgguucaacggcaucggagugacccagaaugugcuguacgagaaccagaagcugaucgccaaccaguucaacagcgccaucggcaagauccaggacagccugagcagcacagcaagcgcccugggaaagcugcaggacguggucaaccagaaugcccaggcacugaacacccuggucaagcagcuguccuccaacuucggcgccaucagcucugugcugaacgauauccugagcagacuggacaaggucgaggccgaggugcagaucgacagacugaucacaggcagacugcagagccuccagacauacgugacccagcagcugaucagagccgccgagauuagagccucugccaaucuggccgccaccaagaugucugagugugugcugggccagagcaagagaguggacuuuugcggcaagggcuaccaccugaugagcuucccucagucugccccucacggcgugguguuucugcacgugacauaugugcccgcucaagagaagaauuucaccaccgcuccagccaucugccacgacggcaaagcccacuuuccuagagaaggcguguucguguccaacggcacccauugguucgugacacagcggaacuucuacgagccccagaucaucaccaccgacaacaccuucgugucuggcaacugcgacguugugaucggcauugugaacaauaccguguacgacccucugcagcccgagcuggacagcuucaaagaggaacuggacaaguacuuuaagaaccacacaagccccgacguggaccugggcgauaucagcggaaucaaugccagcgucgugaacauccagaaagagaucgaccggcugaacgagguggccaagaaucugaacgagagccugaucgaccugcaagaacuggggaaguacgagcaguacaucaaguggcccugguacaucuggcugggcuuuaucgccggacugauugccaucgugauggucacaaucaugcuguguugcaugaccagcugcuguagcugccugaagggcuguuguagcuguggcagcugcugcaaguucgacgaggacgauucugagcccgugcugaagggcgugaaacugcacuacaccugaugacucgagcugguacugcaugcacgcaaugcuagcugccccuuucccguccuggguaccccgagucucccccgaccucgggucccagguaugcucccaccuccaccugccccacucaccaccucugcuaguuccagacaccucccaagcacgcagcaaugcagcucaaaacgcuuagccuagccacacccccacgggaaacagcagugauuaaccuuuagcaauaaacgaaaguuuaacuaagcuauacuaaccccaggguuggucaauuucgugccagccacacccuggagcuagcaaaaaaaaaaaaaaaaaaaaaaaaaaaaaagcauaugacuaaaaaaaaaaaaaaaaaaaaaaaaaaaaaaaaaaaaaaaaaaaaaaaaaaaaaaaaaaaaaaaaaaaaaa

SEQ ID NO: 26796 - RNA, 4283 nt, Artificial Sequence
  SARS-CoV-2/Wuhan/WIV05/2019__EPI_ISL_402128 spike protein mRNA gc mod (1-1273)(E484K_D614G)
agaauaaacuaguauucuucugguccccacagacucagagagaacccgccaccauguucguguuucuggugcugcugccccugguguccagccagugugugaaccugaccaccagaacacagcugccuccagccuacaccaacagcuucaccagaggcguguacuaccccgacaagguguucagauccagcgugcugcacucuacccaggaccuguuccugccuuucuucagcaacgugaccugguuccacgccauccacguguccggcaccaauggcaccaagagauucgacaaccccgugcugcccuucaacgacgggguguacuuugccagcaccgagaaguccaacaucaucagaggcuggaucuucggcaccacacuggacagcaagacccagagccugcugaucgugaacaacgccaccaacguggucaucaaagugugcgaguuccaguucugcaacgaccccuuccugggcgucuacuaccacaagaacaacaagagcuggauggaaagcgaguuccggguguacagcagcgccaacaacugcaccuucgaguacgugucccagccuuuccugauggaccuggaaggcaagcagggcaacuucaagaaccugcgcgaguucguguucaagaacaucgacggcuacuucaaaaucuacagcaagcacaccccuaucaaccucgugcgggaucugccucagggcuucucugcucuggaaccccugguggaucugcccaucggcaucaacaucacccgguuucagacacugcuggcccugcacagaagcuaccugacaccuggcgauagcagcagcggauggacagcuggugccgccgcuuacuaugugggcuaccugcagccuagaaccuuccugcugaaguacaacgagaacggcaccaucaccgacgccguggauugugcucuggauccucugagcgagacaaagugcacccugaaguccuucaccguggaaaagggcaucuaccagaccagcaacuuccgggugcagcccaccgaauccaucgugcgguuccccaauaucaccaaucugugccccuucggcgagguguucaaugccaccagauucgccucuguguacgccuggaaccggaagcggaucagcaauugcguggccgacuacuccgugcuguacaacuccgccagcuucagcaccuucaagugcuacggcguguccccuaccaagcugaacgaccugugcuucacaaacguguacgccgacagcuucgugauccggggagaugaagugcggcagauugccccuggacagacaggcaagaucgccgacuacaacuacaagcugcccgacgacuucaccggcugugugauugccuggaacagcaacaaccuggacuccaaagucggcggcaacuacaauuaccuguaccggcuguuccggaaguccaaucugaagcccuucgagcgggacaucagcaccgaaaucuaucaggccggcagcaccccuugcaacggcgugaagggcuucaacugcuacuucccacugcaguccuacggcuuucagcccacaaauggcgugggcuaucagcccuacagagugguggugcugagcuucgaacugcugcaugcuccugccacagugugcggcccuaagaaaagcaccaaucucgugaagaacaaaugcgugaacuucaacuucaacggccugaccggcaccggcgugcugacagagagcaacaagaaguuccugccauuccagcaguuuggccgggauaucgccgauaccacagacgccguuagagauccccagacacuggaaauccuggacaucaccccaugcagcuucggcggagugucugugaucaccccuggcaccaacaccagcaaucagguggcagugcuguaccagggcgugaacuguaccgaagugcccguggccauucacgccgaucagcugacaccuacauggcggguguacuccaccggcagcaauguguuucagaccagagccggcugucugaucggagccgagcacgugaacaauagcuacgagugcgacauccccaucggcgcuggcaucugugccagcuaccagacacagacaaacagccccagacgggcuagaagcguggccagccagagcaucauugccuacacaaugucucugggcgccgagaacagcguggccuacuccaacaacucuaucgcuauccccaccaacuucaccaucagcgugaccaccgagauccugccuguguccaugaccaagaccagcguggacugcaccauguacaucugcggcgauuccaccgagugcuccaaccugcugcugcaguacggcagcuucugcacccagcugaauagagcccugacagggaucgccguggaacaggacaagaacacccaagagguguucgcccaagugaagcaaaucuacaagaccccuccuaucaaggacuucggcggcuucaauuucagccagauucugcccgauccuagcaagcccagcaagcggagcuucaucgaggaccugcuguucaacaaagugacacuggccgacgccggcuucaucaagcaguauggcgauugucugggcgacauugccgccagggaucugauuugcgcccagaaguuuaacggacugacagugcugccuccucugcugaccgaugagaugaucgcccaguacacaucugcccugcuggccggcacaaucacaagcggcuggacauuuggagcuggcgccgcucugcagauccccuuugcuaugcagauggccuaccgguucaacggcaucggagugacccagaaugugcuguacgagaaccagaagcugaucgccaaccaguucaacagcgccaucggcaagauccaggacagccugagcagcacagcaagcgcccugggaaagcugcaggacguggucaaccagaaugcccaggcacugaacacccuggucaagcagcuguccuccaacuucggcgccaucagcucugugcugaacgauauccugagcagacuggacaaggucgaggccgaggugcagaucgacagacugaucacaggcagacugcagagccuccagacauacgugacccagcagcugaucagagccgccgagauuagagccucugccaaucuggccgccaccaagaugucugagugugugcugggccagagcaagagaguggacuuuugcggcaagggcuaccaccugaugagcuucccucagucugccccucacggcgugguguuucugcacgugacauaugugcccgcucaagagaagaauuucaccaccgcuccagccaucugccacgacggcaaagcccacuuuccuagagaaggcguguucguguccaacggcacccauugguucgugacacagcggaacuucuacgagccccagaucaucaccaccgacaacaccuucgugucuggcaacugcgacguugugaucggcauugugaacaauaccguguacgacccucugcagcccgagcuggacagcuucaaagaggaacuggacaaguacuuuaagaaccacacaagccccgacguggaccugggcgauaucagcggaaucaaugccagcgucgugaacauccagaaagagaucgaccggcugaacgagguggccaagaaucugaacgagagccugaucgaccugcaagaacuggggaaguacgagcaguacaucaaguggcccugguacaucuggcugggcuuuaucgccggacugauugccaucgugauggucacaaucaugcuguguugcaugaccagcugcuguagcugccugaagggcuguuguagcuguggcagcugcugcaaguucgacgaggacgauucugagcccgugcugaagggcgugaaacugcacuacaccugaugacucgagcugguacugcaugcacgcaaugcuagcugccccuuucccguccuggguaccccgagucucccccgaccucgggucccagguaugcucccaccuccaccugccccacucaccaccucugcuaguuccagacaccucccaagcacgcagcaaugcagcucaaaacgcuuagccuagccacacccccacgggaaacagcagugauuaaccuuuagcaauaaacgaaaguuuaacuaagcuauacuaaccccaggguuggucaauuucgugccagccacacccuggagcuagcaaaaaaaaaaaaaaaaaaaaaaaaaaaaaagcauaugacuaaaaaaaaaaaaaaaaaaaaaaaaaaaaaaaaaaaaaaaaaaaaaaaaaaaaaaaaaaaaaaaaaaaaaa

SEQ ID NO: 26797 - RNA, 4283 nt, Artificial Sequence
  SARS-CoV-2/Wuhan/WIV05/2019__EPI_ISL_402128 spike protein mRNA gc mod (1-1273)(L18F_T20N_P26S_D138Y_R190S_K417T_E484K_N501Y_D614G_H655Y _T1027I)
agaauaaacuaguauucuucugguccccacagacucagagagaacccgccaccauguucguguuucuggugcugcugccccugguguccagccagugugugaacuucaccaacagaacacagcugccuagcgccuacaccaacagcuucaccagaggcguguacuaccccgacaagguguucagauccagcgugcugcacucuacccaggaccuguuccugccuuucuucagcaacgugaccugguuccacgccauccacguguccggcaccaauggcaccaagagauucgacaaccccgugcugcccuucaacgacgggguguacuuugccagcaccgagaaguccaacaucaucagaggcuggaucuucggcaccacacuggacagcaagacccagagccugcugaucgugaacaacgccaccaacguggucaucaaagugugcgaguuccaguucugcaacuaccccuuccugggcgucuacuaccacaagaacaacaagagcuggauggaaagcgaguuccggguguacagcagcgccaacaacugcaccuucgaguacgugucccagccuuuccugauggaccuggaaggcaagcagggcaacuucaagaaccugagcgaguucguguucaagaacaucgacggcuacuucaaaaucuacagcaagcacaccccuaucaaccucgugcgggaucugccucagggcuucucugcucuggaaccccugguggaucugcccaucggcaucaacaucacccgguuucagacacugcuggcccugcacagaagcuaccugacaccuggcgauagcagcagcggauggacagcuggugccgccgcuuacuaugugggcuaccugcagccuagaaccuuccugcugaaguacaacgagaacggcaccaucaccgacgccguggauugugcucuggauccucugagcgagacaaagugcacccugaaguccuucaccguggaaaagggcaucuaccagaccagcaacuuccgggugcagcccaccgaauccaucgugcgguuccccaauaucaccaaucugugccccuucggcgagguguucaaugccaccagauucgccucuguguacgccuggaaccggaagcggaucagcaauugcguggccgacuacuccgugcuguacaacuccgccagcuucagcaccuucaagugcuacggcguguccccuaccaagcugaacgaccugugcuucacaaacguguacgccgacagcuucgugauccggggagaugaagugcggcagauugccccuggacagacaggcaccaucgccgacuacaacuacaagcugcccgacgacuucaccggcugugugauugccuggaacagcaacaaccuggacuccaaagucggcggcaacuacaauuaccuguaccggcuguuccggaaguccaaucugaagcccuucgagcgggacaucagcaccgaaaucuaucaggccggcagcaccccuugcaacggcgugaagggcuucaacugcuacuucccacugcaguccuacggcuuucagcccacauacggcgugggcuaucagcccuacagagugguggugcugagcuucgaacugcugcaugcuccugccacagugugcggcccuaagaaaagcaccaaucucgugaagaacaaaugcgugaacuucaacuucaacggccugaccggcaccggcgugcugacagagagcaacaagaaguuccugccauuccagcaguuuggccgggauaucgccgauaccacagacgccguuagagauccccagacacuggaaauccuggacaucaccccaugcagcuucggcggagugucugugaucaccccuggcaccaacaccagcaaucagguggcagugcuguaccagggcgugaacuguaccgaagugcccguggccauucacgccgaucagcugacaccuacauggcggguguacuccaccggcagcaauguguuucagaccagagccggcugucugaucggagccgaguacgugaacaauagcuacgagugcgacauccccaucggcgcuggcaucugugccagcuaccagacacagacaaacagccccagacgggcuagaagcguggccagccagagcaucauugccuacacaaugucucugggcgccgagaacagcguggccuacuccaacaacucuaucgcuauccccaccaacuucaccaucagcgugaccaccgagauccugccuguguccaugaccaagaccagcguggacugcaccauguacaucugcggcgauuccaccgagugcuccaaccugcugcugcaguacggcagcuucugcacccagcugaauagagcccugacagggaucgccguggaacaggacaagaacacccaagagguguucgcccaagugaagcaaaucuacaagaccccuccuaucaaggacuucggcggcuucaauuucagccagauucugcccgauccuagcaagcccagcaagcggagcuucaucgaggaccugcuguucaacaaagugacacuggccgacgccggcuucaucaagcaguauggcgauugucugggcgacauugccgccagggaucugauuugcgcccagaaguuuaacggacugacagugcugccuccucugcugaccgaugagaugaucgcccaguacacaucugcccugcuggccggcacaaucacaagcggcuggacauuuggagcuggcgccgcucugcagauccccuuugcuaugcagauggccuaccgguucaacggcaucggagugacccagaaugugcuguacgagaaccagaagcugaucgccaaccaguucaacagcgccaucggcaagauccaggacagccugagcagcacagcaagcgcccugggaaagcugcaggacguggucaaccagaaugcccaggcacugaacacccuggucaagcagcuguccuccaacuucggcgccaucagcucugugcugaacgauauccugagcagacuggacaaggucgaggccgaggugcagaucgacagacugaucacaggcagacugcagagccuccagacauacgugacccagcagcugaucagagccgccgagauuagagccucugccaaucuggccgccaucaagaugucugagugugugcugggccagagcaagagaguggacuuuugcggcaagggcuaccaccugaugagcuucccucagucugccccucacggcgugguguuucugcacgugacauaugugcccgcucaagagaagaauuucaccaccgcuccagccaucugccacgacggcaaagcccacuuuccuagagaaggcguguucguguccaacggcacccauugguucgugacacagcggaacuucuacgagccccagaucaucaccaccgacaacaccuucgugucuggcaacugcgacguugugaucggcauugugaacaauaccguguacgacccucugcagcccgagcuggacagcuucaaagaggaacuggacaaguacuuuaagaaccacacaagccccgacguggaccugggcgauaucagcggaaucaaugccagcgucgugaacauccagaaagagaucgaccggcugaacgagguggccaagaaucugaacgagagccugaucgaccugcaagaacuggggaaguacgagcaguacaucaaguggcccugguacaucuggcugggcuuuaucgccggacugauugccaucgugauggucacaaucaugcuguguugcaugaccagcugcuguagcugccugaagggcuguuguagcuguggcagcugcugcaaguucgacgaggacgauucugagcccgugcugaagggcgugaaacugcacuacaccugaugacucgagcugguacugcaugcacgcaaugcuagcugccccuuucccguccuggguaccccgagucucccccgaccucgggucccagguaugcucccaccuccaccugccccacucaccaccucugcuaguuccagacaccucccaagcacgcagcaaugcagcucaaaacgcuuagccuagccacacccccacgggaaacagcagugauuaaccuuuagcaauaaacgaaaguuuaacuaagcuauacuaaccccaggguuggucaauuucgugccagccacacccuggagcuagcaaaaaaaaaaaaaaaaaaaaaaaaaaaaaagcauaugacuaaaaaaaaaaaaaaaaaaaaaaaaaaaaaaaaaaaaaaaaaaaaaaaaaaaaaaaaaaaaaaaaaaaaaa

SEQ ID NO: 26798 - RNA, 4283 nt, Artificial Sequence
  SARS-CoV-2/Wuhan/WIV05/2019__EPI_ISL_402128 spike protein mRNA gc mod (1-1273)(S13I_W152C_L452R_D614G)
agaauaaacuaguauucuucugguccccacagacucagagagaacccgccaccauguucguguuucuggugcugcugccccugguguccauccagugugugaaccugaccaccagaacacagcugccuccagccuacaccaacagcuucaccagaggcguguacuaccccgacaagguguucagauccagcgugcugcacucuacccaggaccuguuccugccuuucuucagcaacgugaccugguuccacgccauccacguguccggcaccaauggcaccaagagauucgacaaccccgugcugcccuucaacgacgggguguacuuugccagcaccgagaaguccaacaucaucagaggcuggaucuucggcaccacacuggacagcaagacccagagccugcugaucgugaacaacgccaccaacguggucaucaaagugugcgaguuccaguucugcaacgaccccuuccugggcgucuacuaccacaagaacaacaagagcugcauggaaagcgaguuccggguguacagcagcgccaacaacugcaccuucgaguacgugucccagccuuuccugauggaccuggaaggcaagcagggcaacuucaagaaccugcgcgaguucguguucaagaacaucgacggcuacuucaaaaucuacagcaagcacaccccuaucaaccucgugcgggaucugccucagggcuucucugcucuggaaccccugguggaucugcccaucggcaucaacaucacccgguuucagacacugcuggcccugcacagaagcuaccugacaccuggcgauagcagcagcggauggacagcuggugccgccgcuuacuaugugggcuaccugcagccuagaaccuuccugcugaaguacaacgagaacggcaccaucaccgacgccguggauugugcucuggauccucugagcgagacaaagugcacccugaaguccuucaccguggaaaagggcaucuaccagaccagcaacuuccgggugcagcccaccgaauccaucgugcgguuccccaauaucaccaaucugugccccuucggcgagguguucaaugccaccagauucgccucuguguacgccuggaaccggaagcggaucagcaauugcguggccgacuacuccgugcuguacaacuccgccagcuucagcaccuucaagugcuacggcguguccccuaccaagcugaacgaccugugcuucacaaacguguacgccgacagcuucgugauccggggagaugaagugcggcagauugccccuggacagacaggcaagaucgccgacuacaacuacaagcugcccgacgacuucaccggcugugugauugccuggaacagcaacaaccuggacuccaaagucggcggcaacuacaauuaccgcuaccggcuguuccggaaguccaaucugaagcccuucgagcgggacaucagcaccgaaaucuaucaggccggcagcaccccuugcaacggcguggaaggcuucaacugcuacuucccacugcaguccuacggcuuucagcccacaaauggcgugggcuaucagcccuacagagugguggugcugagcuucgaacugcugcaugcuccugccacagugugcggcccuaagaaaagcaccaaucucgugaagaacaaaugcgugaacuucaacuucaacggccugaccggcaccggcgugcugacagagagcaacaagaaguuccugccauuccagcaguuuggccgggauaucgccgauaccacagacgccguuagagauccccagacacuggaaauccuggacaucaccccaugcagcuucggcggagugucugugaucaccccuggcaccaacaccagcaaucagguggcagugcuguaccagggcgugaacuguaccgaagugcccguggccauucacgccgaucagcugacaccuacauggcggguguacuccaccggcagcaauguguuucagaccagagccggcugucugaucggagccgagcacgugaacaauagcuacgagugcgacauccccaucggcgcuggcaucugugccagcuaccagacacagacaaacagccccagacgggcuagaagcguggccagccagagcaucauugccuacacaaugucucugggcgccgagaacagcguggccuacuccaacaacucuaucgcuauccccaccaacuucaccaucagcgugaccaccgagauccugccuguguccaugaccaagaccagcguggacugcaccauguacaucugcggcgauuccaccgagugcuccaaccugcugcugcaguacggcagcuucugcacccagcugaauagagcccugacagggaucgccguggaacaggacaagaacacccaagagguguucgcccaagugaagcaaaucuacaagaccccuccuaucaaggacuucggcggcuucaauuucagccagauucugcccgauccuagcaagcccagcaagcggagcuucaucgaggaccugcuguucaacaaagugacacuggccgacgccggcuucaucaagcaguauggcgauugucugggcgacauugccgccagggaucugauuugcgcccagaaguuuaacggacugacagugcugccuccucugcugaccgaugagaugaucgcccaguacacaucugcccugcuggccggcacaaucacaagcggcuggacauuuggagcuggcgccgcucugcagauccccuuugcuaugcagauggccuaccgguucaacggcaucggagugacccagaaugugcuguacgagaaccagaagcugaucgccaaccaguucaacagcgccaucggcaagauccaggacagccugagcagcacagcaagcgcccugggaaagcugcaggacguggucaaccagaaugcccaggcacugaacacccuggucaagcagcuguccuccaacuucggcgccaucagcucugugcugaacgauauccugagcagacuggacaaggucgaggccgaggugcagaucgacagacugaucacaggcagacugcagagccuccagacauacgugacccagcagcugaucagagccgccgagauuagagccucugccaaucuggccgccaccaagaugucugagugugugcugggccagagcaagagaguggacuuuugcggcaagggcuaccaccugaugagcuucccucagucugccccucacggcgugguguuucugcacgugacauaugugcccgcucaagagaagaauuucaccaccgcuccagccaucugccacgacggcaaagcccacuuuccuagagaaggcguguucguguccaacggcacccauugguucgugacacagcggaacuucuacgagccccagaucaucaccaccgacaacaccuucgugucuggcaacugcgacguugugaucggcauugugaacaauaccguguacgacccucugcagcccgagcuggacagcuucaaagaggaacuggacaaguacuuuaagaaccacacaagccccgacguggaccugggcgauaucagcggaaucaaugccagcgucgugaacauccagaaagagaucgaccggcugaacgagguggccaagaaucugaacgagagccugaucgaccugcaagaacuggggaaguacgagcaguacaucaaguggcccugguacaucuggcugggcuuuaucgccggacugauugccaucgugauggucacaaucaugcuguguugcaugaccagcugcuguagcugccugaagggcuguuguagcuguggcagcugcugcaaguucgacgaggacgauucugagcccgugcugaagggcgugaaacugcacuacaccugaugacucgagcugguacugcaugcacgcaaugcuagcugccccuuucccguccuggguaccccgagucucccccgaccucgggucccagguaugcucccaccuccaccugccccacucaccaccucugcuaguuccagacaccucccaagcacgcagcaaugcagcucaaaacgcuuagccuagccacacccccacgggaaacagcagugauuaaccuuuagcaauaaacgaaaguuuaacuaagcuauacuaaccccaggguuggucaauuucgugccagccacacccuggagcuagcaaaaaaaaaaaaaaaaaaaaaaaaaaaaaagcauaugacuaaaaaaaaaaaaaaaaaaaaaaaaaaaaaaaaaaaaaaaaaaaaaaaaaaaaaaaaaaaaaaaaaaaaaa

SEQ ID NO: 26799 - RNA, 4283 nt, Artificial Sequence
  SARS-CoV-2/Wuhan/WIV05/2019__EPI_ISL_402128 spike protein mRNA gc mod (1-1273)
agaauaaacuaguauucuucugguccccacagacucagagagaacccgccaccauguucguguuccuggugcugcugccucugguguccagccagugugugaaccugaccaccagaacacagcugccuccagccuacaccaacagcuuuaccagaggcguguacuaccccgacaagguguucagauccagcgugcugcacucuacccaggaccuguuccugccuuucuucagcaacgugaccugguuccacgccauccacguguccggcaccaauggcaccaagagauucgacaaccccgugcugcccuucaacgacgggguguacuuugccagcaccgagaaguccaacaucaucagaggcuggaucuucggcaccacacuggacagcaagacccagagccugcugaucgugaacaacgccaccaacguggucaucaaagugugcgaguuccaguucugcaacgaccccuuccugggcgucuacuaccacaagaacaacaagagcuggauggaaagcgaguuccggguguacagcagcgccaacaacugcaccuucgaguacgugucccagccuuuccugauggaccuggaaggcaagcagggcaacuucaagaaccugcgcgaguucguguuuaagaacaucgacggcuacuucaagaucuacagcaagcacaccccuaucaaccucgugcgggaucugccucagggcuucucugcucuggaaccccugguggaucugcccaucggcaucaacaucacccgguuucagacacugcuggcccugcacagaagcuaccugacaccuggcgauagcagcagcggauggacagcuggugccgccgcuuacuaugugggcuaccugcagccuagaaccuuccugcugaaguacaacgagaacggcaccaucaccgacgccguggauugugcucuggauccucugagcgagacaaagugcacccugaaguccuucaccguggaaaagggcaucuaccagaccagcaacuuccgggugcagcccaccgaauccaucgugcgguuccccaauaucaccaaucugugccccuucggcgagguguucaaugccaccagauucgccucuguguacgccuggaaccggaagcggaucagcaauugcguggccgacuacuccgugcuguacaacuccgccagcuucagcaccuucaagugcuacggcguguccccuaccaagcugaacgaccugugcuucacaaacguguacgccgacagcuucgugauccggggagaugaagugcggcagauugccccuggacagacaggcaagaucgccgacuacaacuacaagcugcccgacgacuucaccggcugugugauugccuggaacagcaacaaccuggacuccaaagucggcggcaacuacaauuaccuguaccggcuguuccggaaguccaaucugaagcccuucgagcgggacaucuccaccgagaucuaucaggccggcagcaccccuuguaacggcguggaaggcuucaacugcuacuucccacugcaguccuacggcuuucagcccacaaauggcgugggcuaucagcccuacagagugguggugcugagcuucgaacugcugcaugccccugccacagugugcggcccuaagaaaagcaccaaucucgugaagaacaaaugcgugaacuucaacuucaacggccugaccggcaccggcgugcugacagagagcaacaagaaguuccugccauuccagcaguuuggccgggauaucgccgauaccacagacgccguuagagauccccagacacuggaaauccuggacaucaccccuugcagcuucggcggagugucugugaucaccccuggcaccaacaccagcaaucagguggcagugcuguaccaggacgugaacuguaccgaagugcccguggccauucacgccgaucagcugacaccuacauggcggguguacuccaccggcagcaauguguuucagaccagagccggcugucugaucggagccgagcacgugaacaauagcuacgagugcgacauccccaucggcgcuggaaucugcgccagcuaccagacacagacaaacagcccucggagagccagaagcguggccagccagagcaucauugccuacacaaugucucugggcgccgagaacagcguggccuacuccaacaacucuaucgcuauccccaccaacuucaccaucagcgugaccacagagauccugccuguguccaugaccaagaccagcguggacugcaccauguacaucugcggcgauuccaccgagugcuccaaccugcugcugcaguacggcagcuucugcacccagcugaauagagcccugacagggaucgccguggaacaggacaagaacacccaagagguguucgcccaagugaagcagaucuacaagaccccuccuaucaaggacuucggcggcuucaauuucagccagauucugcccgauccuagcaagcccagcaagcggagcuucaucgaggaccugcuguucaacaaagugacacuggccgacgccggcuucaucaagcaguauggcgauugucugggcgacauugccgccagggaucugauuugcgcccagaaguuuaacggacugacagugcugccuccucugcugaccgaugagaugaucgcccaguacacaucugcccugcuggccggcacaaucacaagcggcuggacauuuggagcaggcgccgcucugcagauccccuuugcuaugcagauggccuaccgguucaacggcaucggagugacccagaaugugcuguacgagaaccagaagcugaucgccaaccaguucaacagcgccaucggcaagauccaggacagccugagcagcacagcaagcgcccugggaaagcugcaggacguggucaaccagaaugcccaggcacugaacacccuggucaagcagcuguccuccaacuucggcgccaucagcucugugcugaacgauauccugagcagacuggacaaggucgaggccgaggugcagaucgacagacugaucacaggcagacugcagagccuccagacauacgugacccagcagcugaucagagccgccgagauuagagccucugccaaucuggccgccaccaagaugucugagugugugcugggccagagcaagagaguggacuuuugcggcaagggcuaccaccugaugagcuucccucagucugccccucacggcgugguguuucugcacgugacauaugugcccgcucaagagaagaauuucaccaccgcuccagccaucugccacgacggcaaagcccacuuuccuagagaaggcguguucguguccaacggcacccauugguucgugacacagcggaacuucuacgagccccagaucaucaccaccgacaacaccuucgugucuggcaacugcgacgucgugaucggcauugugaacaauaccguguacgacccucugcagcccgagcuggacagcuucaaagaggaacuggacaaguacuuuaagaaccacacaagccccgacguggaccugggcgauaucagcggaaucaaugccagcgucgugaacauccagaaagagaucgaccggcugaacgagguggccaagaaucugaacgagagccugaucgaccugcaagaacuggggaaguacgagcaguacaucaaguggcccugguacaucuggcugggcuuuaucgccggacugauugccaucgugauggucacaaucaugcuguguugcaugaccagcugcuguagcugccugaagggcuguuguagcuguggcagcugcugcaaguucgacgaggacgauucugagcccgugcugaagggcgugaaacugcacuacacaugaugacucgagcugguacugcaugcacgcaaugcuagcugccccuuucccguccuggguaccccgagucucccccgaccucgggucccagguaugcucccaccuccaccugccccacucaccaccucugcuaguuccagacaccucccaagcacgcagcaaugcagcucaaaacgcuuagccuagccacacccccacgggaaacagcagugauuaaccuuuagcaauaaacgaaaguuuaacuaagcuauacuaaccccaggguuggucaauuucgugccagccacacccuggagcuagcaaaaaaaaaaaaaaaaaaaaaaaaaaaaaagcauaugacuaaaaaaaaaaaaaaaaaaaaaaaaaaaaaaaaaaaaaaaaaaaaaaaaaaaaaaaaaaaaaaaaaaaaaa

SEQ ID NO: 26800 - RNA, 4283 nt, Artificial Sequence
  SARS-CoV-2/Wuhan/WIV05/2019__EPI_ISL_402128 spike protein mRNA gc mod (1-1273)(D614G)
agaauaaacuaguauucuucugguccccacagacucagagagaacccgccaccauguucguguuccuggugcugcugccucugguguccagccagugugugaaccugaccaccagaacacagcugccuccagccuacaccaacagcuuuaccagaggcguguacuaccccgacaagguguucagauccagcgugcugcacucuacccaggaccuguuccugccuuucuucagcaacgugaccugguuccacgccauccacguguccggcaccaauggcaccaagagauucgacaaccccgugcugcccuucaacgacgggguguacuuugccagcaccgagaaguccaacaucaucagaggcuggaucuucggcaccacacuggacagcaagacccagagccugcugaucgugaacaacgccaccaacguggucaucaaagugugcgaguuccaguucugcaacgaccccuuccugggcgucuacuaccacaagaacaacaagagcuggauggaaagcgaguuccggguguacagcagcgccaacaacugcaccuucgaguacgugucccagccuuuccugauggaccuggaaggcaagcagggcaacuucaagaaccugcgcgaguucguguuuaagaacaucgacggcuacuucaagaucuacagcaagcacaccccuaucaaccucgugcgggaucugccucagggcuucucugcucuggaaccccugguggaucugcccaucggcaucaacaucacccgguuucagacacugcuggcccugcacagaagcuaccugacaccuggcgauagcagcagcggauggacagcuggugccgccgcuuacuaugugggcuaccugcagccuagaaccuuccugcugaaguacaacgagaacggcaccaucaccgacgccguggauugugcucuggauccucugagcgagacaaagugcacccugaaguccuucaccguggaaaagggcaucuaccagaccagcaacuuccgggugcagcccaccgaauccaucgugcgguuccccaauaucaccaaucugugccccuucggcgagguguucaaugccaccagauucgccucuguguacgccuggaaccggaagcggaucagcaauugcguggccgacuacuccgugcuguacaacuccgccagcuucagcaccuucaagugcuacggcguguccccuaccaagcugaacgaccugugcuucacaaacguguacgccgacagcuucgugauccggggagaugaagugcggcagauugccccuggacagacaggcaagaucgccgacuacaacuacaagcugcccgacgacuucaccggcugugugauugccuggaacagcaacaaccuggacuccaaagucggcggcaacuacaauuaccuguaccggcuguuccggaaguccaaucugaagcccuucgagcgggacaucuccaccgagaucuaucaggccggcagcaccccuuguaacggcguggaaggcuucaacugcuacuucccacugcaguccuacggcuuucagcccacaaauggcgugggcuaucagcccuacagagugguggugcugagcuucgaacugcugcaugccccugccacagugugcggcccuaagaaaagcaccaaucucgugaagaacaaaugcgugaacuucaacuucaacggccugaccggcaccggcgugcugacagagagcaacaagaaguuccugccauuccagcaguuuggccgggauaucgccgauaccacagacgccguuagagauccccagacacuggaaauccuggacaucaccccuugcagcuucggcggagugucugugaucaccccuggcaccaacaccagcaaucagguggcagugcuguaccagggcgugaacuguaccgaagugcccguggccauucacgccgaucagcugacaccuacauggcggguguacuccaccggcagcaauguguuucagaccagagccggcugucugaucggagccgagcacgugaacaauagcuacgagugcgacauccccaucggcgcuggaaucugcgccagcuaccagacacagacaaacagcccucggagagccagaagcguggccagccagagcaucauugccuacacaaugucucugggcgccgagaacagcguggccuacuccaacaacucuaucgcuauccccaccaacuucaccaucagcgugaccacagagauccugccuguguccaugaccaagaccagcguggacugcaccauguacaucugcggcgauuccaccgagugcuccaaccugcugcugcaguacggcagcuucugcacccagcugaauagagcccugacagggaucgccguggaacaggacaagaacacccaagagguguucgcccaagugaagcagaucuacaagaccccuccuaucaaggacuucggcggcuucaauuucagccagauucugcccgauccuagcaagcccagcaagcggagcuucaucgaggaccugcuguucaacaaagugacacuggccgacgccggcuucaucaagcaguauggcgauugucugggcgacauugccgccagggaucugauuugcgcccagaaguuuaacggacugacagugcugccuccucugcugaccgaugagaugaucgcccaguacacaucugcccugcuggccggcacaaucacaagcggcuggacauuuggagcaggcgccgcucugcagauccccuuugcuaugcagauggccuaccgguucaacggcaucggagugacccagaaugugcuguacgagaaccagaagcugaucgccaaccaguucaacagcgccaucggcaagauccaggacagccugagcagcacagcaagcgcccugggaaagcugcaggacguggucaaccagaaugcccaggcacugaacacccuggucaagcagcuguccuccaacuucggcgccaucagcucugugcugaacgauauccugagcagacuggacaaggucgaggccgaggugcagaucgacagacugaucacaggcagacugcagagccuccagacauacgugacccagcagcugaucagagccgccgagauuagagccucugccaaucuggccgccaccaagaugucugagugugugcugggccagagcaagagaguggacuuuugcggcaagggcuaccaccugaugagcuucccucagucugccccucacggcgugguguuucugcacgugacauaugugcccgcucaagagaagaauuucaccaccgcuccagccaucugccacgacggcaaagcccacuuuccuagagaaggcguguucguguccaacggcacccauugguucgugacacagcggaacuucuacgagccccagaucaucaccaccgacaacaccuucgugucuggcaacugcgacgucgugaucggcauugugaacaauaccguguacgacccucugcagcccgagcuggacagcuucaaagaggaacuggacaaguacuuuaagaaccacacaagccccgacguggaccugggcgauaucagcggaaucaaugccagcgucgugaacauccagaaagagaucgaccggcugaacgagguggccaagaaucugaacgagagccugaucgaccugcaagaacuggggaaguacgagcaguacaucaaguggcccugguacaucuggcugggcuuuaucgccggacugauugccaucgugauggucacaaucaugcuguguugcaugaccagcugcuguagcugccugaagggcuguuguagcuguggcagcugcugcaaguucgacgaggacgauucugagcccgugcugaagggcgugaaacugcacuacacaugaugacucgagcugguacugcaugcacgcaaugcuagcugccccuuucccguccuggguaccccgagucucccccgaccucgggucccagguaugcucccaccuccaccugccccacucaccaccucugcuaguuccagacaccucccaagcacgcagcaaugcagcucaaaacgcuuagccuagccacacccccacgggaaacagcagugauuaaccuuuagcaauaaacgaaaguuuaacuaagcuauacuaaccccaggguuggucaauuucgugccagccacacccuggagcuagcaaaaaaaaaaaaaaaaaaaaaaaaaaaaaagcauaugacuaaaaaaaaaaaaaaaaaaaaaaaaaaaaaaaaaaaaaaaaaaaaaaaaaaaaaaaaaaaaaaaaaaaaaa

SEQ ID NO: 26801 - RNA, 4283 nt, Artificial Sequence
  SARS-CoV-2/Wuhan/WIV05/2019__EPI_ISL_402128 spike protein mRNA gc mod (1-1273)(A222V_D614G)
agaauaaacuaguauucuucugguccccacagacucagagagaacccgccaccauguucguguuccuggugcugcugccucugguguccagccagugugugaaccugaccaccagaacacagcugccuccagccuacaccaacagcuuuaccagaggcguguacuaccccgacaagguguucagauccagcgugcugcacucuacccaggaccuguuccugccuuucuucagcaacgugaccugguuccacgccauccacguguccggcaccaauggcaccaagagauucgacaaccccgugcugcccuucaacgacgggguguacuuugccagcaccgagaaguccaacaucaucagaggcuggaucuucggcaccacacuggacagcaagacccagagccugcugaucgugaacaacgccaccaacguggucaucaaagugugcgaguuccaguucugcaacgaccccuuccugggcgucuacuaccacaagaacaacaagagcuggauggaaagcgaguuccggguguacagcagcgccaacaacugcaccuucgaguacgugucccagccuuuccugauggaccuggaaggcaagcagggcaacuucaagaaccugcgcgaguucguguuuaagaacaucgacggcuacuucaagaucuacagcaagcacaccccuaucaaccucgugcgggaucugccucagggcuucucugugcuggaaccccugguggaucugcccaucggcaucaacaucacccgguuucagacacugcuggcccugcacagaagcuaccugacaccuggcgauagcagcagcggauggacagcuggugccgccgcuuacuaugugggcuaccugcagccuagaaccuuccugcugaaguacaacgagaacggcaccaucaccgacgccguggauugugcucuggauccucugagcgagacaaagugcacccugaaguccuucaccguggaaaagggcaucuaccagaccagcaacuuccgggugcagcccaccgaauccaucgugcgguuccccaauaucaccaaucugugccccuucggcgagguguucaaugccaccagauucgccucuguguacgccuggaaccggaagcggaucagcaauugcguggccgacuacuccgugcuguacaacuccgccagcuucagcaccuucaagugcuacggcguguccccuaccaagcugaacgaccugugcuucacaaacguguacgccgacagcuucgugauccggggagaugaagugcggcagauugccccuggacagacaggcaagaucgccgacuacaacuacaagcugcccgacgacuucaccggcugugugauugccuggaacagcaacaaccuggacuccaaagucggcggcaacuacaauuaccuguaccggcuguuccggaaguccaaucugaagcccuucgagcgggacaucuccaccgagaucuaucaggccggcagcaccccuuguaacggcguggaaggcuucaacugcuacuucccacugcaguccuacggcuuucagcccacaaauggcgugggcuaucagcccuacagagugguggugcugagcuucgaacugcugcaugccccugccacagugugcggcccuaagaaaagcaccaaucucgugaagaacaaaugcgugaacuucaacuucaacggccugaccggcaccggcgugcugacagagagcaacaagaaguuccugccauuccagcaguuuggccgggauaucgccgauaccacagacgccguuagagauccccagacacuggaaauccuggacaucaccccuugcagcuucggcggagugucugugaucaccccuggcaccaacaccagcaaucagguggcagugcuguaccagggcgugaacuguaccgaagugcccguggccauucacgccgaucagcugacaccuacauggcggguguacuccaccggcagcaauguguuucagaccagagccggcugucugaucggagccgagcacgugaacaauagcuacgagugcgacauccccaucggcgcuggaaucugcgccagcuaccagacacagacaaacagcccucggagagccagaagcguggccagccagagcaucauugccuacacaaugucucugggcgccgagaacagcguggccuacuccaacaacucuaucgcuauccccaccaacuucaccaucagcgugaccacagagauccugccuguguccaugaccaagaccagcguggacugcaccauguacaucugcggcgauuccaccgagugcuccaaccugcugcugcaguacggcagcuucugcacccagcugaauagagcccugacagggaucgccguggaacaggacaagaacacccaagagguguucgcccaagugaagcagaucuacaagaccccuccuaucaaggacuucggcggcuucaauuucagccagauucugcccgauccuagcaagcccagcaagcggagcuucaucgaggaccugcuguucaacaaagugacacuggccgacgccggcuucaucaagcaguauggcgauugucugggcgacauugccgccagggaucugauuugcgcccagaaguuuaacggacugacagugcugccuccucugcugaccgaugagaugaucgcccaguacacaucugcccugcuggccggcacaaucacaagcggcuggacauuuggagcaggcgccgcucugcagauccccuuugcuaugcagauggccuaccgguucaacggcaucggagugacccagaaugugcuguacgagaaccagaagcugaucgccaaccaguucaacagcgccaucggcaagauccaggacagccugagcagcacagcaagcgcccugggaaagcugcaggacguggucaaccagaaugcccaggcacugaacacccuggucaagcagcuguccuccaacuucggcgccaucagcucugugcugaacgauauccugagcagacuggacaaggucgaggccgaggugcagaucgacagacugaucacaggcagacugcagagccuccagacauacgugacccagcagcugaucagagccgccgagauuagagccucugccaaucuggccgccaccaagaugucugagugugugcugggccagagcaagagaguggacuuuugcggcaagggcuaccaccugaugagcuucccucagucugccccucacggcgugguguuucugcacgugacauaugugcccgcucaagagaagaauuucaccaccgcuccagccaucugccacgacggcaaagcccacuuuccuagagaaggcguguucguguccaacggcacccauugguucgugacacagcggaacuucuacgagccccagaucaucaccaccgacaacaccuucgugucuggcaacugcgacgucgugaucggcauugugaacaauaccguguacgacccucugcagcccgagcuggacagcuucaaagaggaacuggacaaguacuuuaagaaccacacaagccccgacguggaccugggcgauaucagcggaaucaaugccagcgucgugaacauccagaaagagaucgaccggcugaacgagguggccaagaaucugaacgagagccugaucgaccugcaagaacuggggaaguacgagcaguacaucaaguggcccugguacaucuggcugggcuuuaucgccggacugauugccaucgugauggucacaaucaugcuguguugcaugaccagcugcuguagcugccugaagggcuguuguagcuguggcagcugcugcaaguucgacgaggacgauucugagcccgugcugaagggcgugaaacugcacuacacaugaugacucgagcugguacugcaugcacgcaaugcuagcugccccuuucccguccuggguaccccgagucucccccgaccucgggucccagguaugcucccaccuccaccugccccacucaccaccucugcuaguuccagacaccucccaagcacgcagcaaugcagcucaaaacgcuuagccuagccacacccccacgggaaacagcagugauuaaccuuuagcaauaaacgaaaguuuaacuaagcuauacuaaccccaggguuggucaauuucgugccagccacacccuggagcuagcaaaaaaaaaaaaaaaaaaaaaaaaaaaaaagcauaugacuaaaaaaaaaaaaaaaaaaaaaaaaaaaaaaaaaaaaaaaaaaaaaaaaaaaaaaaaaaaaaaaaaaaaaa

SEQ ID NO: 26802 - RNA, 4283 nt, Artificial Sequence
  SARS-CoV-2/Wuhan/WIV05/2019__EPI_ISL_402128 spike protein mRNA gc mod (1-1273)(N439K_D614G)
agaauaaacuaguauucuucugguccccacagacucagagagaacccgccaccauguucguguuccuggugcugcugccucugguguccagccagugugugaaccugaccaccagaacacagcugccuccagccuacaccaacagcuuuaccagaggcguguacuaccccgacaagguguucagauccagcgugcugcacucuacccaggaccuguuccugccuuucuucagcaacgugaccugguuccacgccauccacguguccggcaccaauggcaccaagagauucgacaaccccgugcugcccuucaacgacgggguguacuuugccagcaccgagaaguccaacaucaucagaggcuggaucuucggcaccacacuggacagcaagacccagagccugcugaucgugaacaacgccaccaacguggucaucaaagugugcgaguuccaguucugcaacgaccccuuccugggcgucuacuaccacaagaacaacaagagcuggauggaaagcgaguuccggguguacagcagcgccaacaacugcaccuucgaguacgugucccagccuuuccugauggaccuggaaggcaagcagggcaacuucaagaaccugcgcgaguucguguuuaagaacaucgacggcuacuucaagaucuacagcaagcacaccccuaucaaccucgugcgggaucugccucagggcuucucugcucuggaaccccugguggaucugcccaucggcaucaacaucacccgguuucagacacugcuggcccugcacagaagcuaccugacaccuggcgauagcagcagcggauggacagcuggugccgccgcuuacuaugugggcuaccugcagccuagaaccuuccugcugaaguacaacgagaacggcaccaucaccgacgccguggauugugcucuggauccucugagcgagacaaagugcacccugaaguccuucaccguggaaaagggcaucuaccagaccagcaacuuccgggugcagcccaccgaauccaucgugcgguuccccaauaucaccaaucugugccccuucggcgagguguucaaugccaccagauucgccucuguguacgccuggaaccggaagcggaucagcaauugcguggccgacuacuccgugcuguacaacuccgccagcuucagcaccuucaagugcuacggcguguccccuaccaagcugaacgaccugugcuucacaaacguguacgccgacagcuucgugauccggggagaugaagugcggcagauugccccuggacagacaggcaagaucgccgacuacaacuacaagcugcccgacgacuucaccggcugugugauugccuggaacagcaagaaccuggacuccaaagucggcggcaacuacaauuaccuguaccggcuguuccggaaguccaaucugaagcccuucgagcgggacaucuccaccgagaucuaucaggccggcagcaccccuuguaacggcguggaaggcuucaacugcuacuucccacugcaguccuacggcuuucagcccacaaauggcgugggcuaucagcccuacagagugguggugcugagcuucgaacugcugcaugccccugccacagugugcggcccuaagaaaagcaccaaucucgugaagaacaaaugcgugaacuucaacuucaacggccugaccggcaccggcgugcugacagagagcaacaagaaguuccugccauuccagcaguuuggccgggauaucgccgauaccacagacgccguuagagauccccagacacuggaaauccuggacaucaccccuugcagcuucggcggagugucugugaucaccccuggcaccaacaccagcaaucagguggcagugcuguaccagggcgugaacuguaccgaagugcccguggccauucacgccgaucagcugacaccuacauggcggguguacuccaccggcagcaauguguuucagaccagagccggcugucugaucggagccgagcacgugaacaauagcuacgagugcgacauccccaucggcgcuggaaucugcgccagcuaccagacacagacaaacagcccucggagagccagaagcguggccagccagagcaucauugccuacacaaugucucugggcgccgagaacagcguggccuacuccaacaacucuaucgcuauccccaccaacuucaccaucagcgugaccacagagauccugccuguguccaugaccaagaccagcguggacugcaccauguacaucugcggcgauuccaccgagugcuccaaccugcugcugcaguacggcagcuucugcacccagcugaauagagcccugacagggaucgccguggaacaggacaagaacacccaagagguguucgcccaagugaagcagaucuacaagaccccuccuaucaaggacuucggcggcuucaauuucagccagauucugcccgauccuagcaagcccagcaagcggagcuucaucgaggaccugcuguucaacaaagugacacuggccgacgccggcuucaucaagcaguauggcgauugucugggcgacauugccgccagggaucugauuugcgcccagaaguuuaacggacugacagugcugccuccucugcugaccgaugagaugaucgcccaguacacaucugcccugcuggccggcacaaucacaagcggcuggacauuuggagcaggcgccgcucugcagauccccuuugcuaugcagauggccuaccgguucaacggcaucggagugacccagaaugugcuguacgagaaccagaagcugaucgccaaccaguucaacagcgccaucggcaagauccaggacagccugagcagcacagcaagcgcccugggaaagcugcaggacguggucaaccagaaugcccaggcacugaacacccuggucaagcagcuguccuccaacuucggcgccaucagcucugugcugaacgauauccugagcagacuggacaaggucgaggccgaggugcagaucgacagacugaucacaggcagacugcagagccuccagacauacgugacccagcagcugaucagagccgccgagauuagagccucugccaaucuggccgccaccaagaugucugagugugugcugggccagagcaagagaguggacuuuugcggcaagggcuaccaccugaugagcuucccucagucugccccucacggcgugguguuucugcacgugacauaugugcccgcucaagagaagaauuucaccaccgcuccagccaucugccacgacggcaaagcccacuuuccuagagaaggcguguucguguccaacggcacccauugguucgugacacagcggaacuucuacgagccccagaucaucaccaccgacaacaccuucgugucuggcaacugcgacgucgugaucggcauugugaacaauaccguguacgacccucugcagcccgagcuggacagcuucaaagaggaacuggacaaguacuuuaagaaccacacaagccccgacguggaccugggcgauaucagcggaaucaaugccagcgucgugaacauccagaaagagaucgaccggcugaacgagguggccaagaaucugaacgagagccugaucgaccugcaagaacuggggaaguacgagcaguacaucaaguggcccugguacaucuggcugggcuuuaucgccggacugauugccaucgugauggucacaaucaugcuguguugcaugaccagcugcuguagcugccugaagggcuguuguagcuguggcagcugcugcaaguucgacgaggacgauucugagcccgugcugaagggcgugaaacugcacuacacaugaugacucgagcugguacugcaugcacgcaaugcuagcugccccuuucccguccuggguaccccgagucucccccgaccucgggucccagguaugcucccaccuccaccugccccacucaccaccucugcuaguuccagacaccucccaagcacgcagcaaugcagcucaaaacgcuuagccuagccacacccccacgggaaacagcagugauuaaccuuuagcaauaaacgaaaguuuaacuaagcuauacuaaccccaggguuggucaauuucgugccagccacacccuggagcuagcaaaaaaaaaaaaaaaaaaaaaaaaaaaaaagcauaugacuaaaaaaaaaaaaaaaaaaaaaaaaaaaaaaaaaaaaaaaaaaaaaaaaaaaaaaaaaaaaaaaaaaaaaa

SEQ ID NO: 26803 - RNA, 4283 nt, Artificial Sequence
  SARS-CoV-2/Wuhan/WIV05/2019__EPI_ISL_402128 spike protein mRNA gc mod (1-1273)(S477N_D614G)
agaauaaacuaguauucuucugguccccacagacucagagagaacccgccaccauguucguguuccuggugcugcugccucugguguccagccagugugugaaccugaccaccagaacacagcugccuccagccuacaccaacagcuuuaccagaggcguguacuaccccgacaagguguucagauccagcgugcugcacucuacccaggaccuguuccugccuuucuucagcaacgugaccugguuccacgccauccacguguccggcaccaauggcaccaagagauucgacaaccccgugcugcccuucaacgacgggguguacuuugccagcaccgagaaguccaacaucaucagaggcuggaucuucggcaccacacuggacagcaagacccagagccugcugaucgugaacaacgccaccaacguggucaucaaagugugcgaguuccaguucugcaacgaccccuuccugggcgucuacuaccacaagaacaacaagagcuggauggaaagcgaguuccggguguacagcagcgccaacaacugcaccuucgaguacgugucccagccuuuccugauggaccuggaaggcaagcagggcaacuucaagaaccugcgcgaguucguguuuaagaacaucgacggcuacuucaagaucuacagcaagcacaccccuaucaaccucgugcgggaucugccucagggcuucucugcucuggaaccccugguggaucugcccaucggcaucaacaucacccgguuucagacacugcuggcccugcacagaagcuaccugacaccuggcgauagcagcagcggauggacagcuggugccgccgcuuacuaugugggcuaccugcagccuagaaccuuccugcugaaguacaacgagaacggcaccaucaccgacgccguggauugugcucuggauccucugagcgagacaaagugcacccugaaguccuucaccguggaaaagggcaucuaccagaccagcaacuuccgggugcagcccaccgaauccaucgugcgguuccccaauaucaccaaucugugccccuucggcgagguguucaaugccaccagauucgccucuguguacgccuggaaccggaagcggaucagcaauugcguggccgacuacuccgugcuguacaacuccgccagcuucagcaccuucaagugcuacggcguguccccuaccaagcugaacgaccugugcuucacaaacguguacgccgacagcuucgugauccggggagaugaagugcggcagauugccccuggacagacaggcaagaucgccgacuacaacuacaagcugcccgacgacuucaccggcugugugauugccuggaacagcaacaaccuggacuccaaagucggcggcaacuacaauuaccuguaccggcuguuccggaaguccaaucugaagcccuucgagcgggacaucuccaccgagaucuaucaggccggcaacaccccuuguaacggcguggaaggcuucaacugcuacuucccacugcaguccuacggcuuucagcccacaaauggcgugggcuaucagcccuacagagugguggugcugagcuucgaacugcugcaugccccugccacagugugcggcccuaagaaaagcaccaaucucgugaagaacaaaugcgugaacuucaacuucaacggccugaccggcaccggcgugcugacagagagcaacaagaaguuccugccauuccagcaguuuggccgggauaucgccgauaccacagacgccguuagagauccccagacacuggaaauccuggacaucaccccuugcagcuucggcggagugucugugaucaccccuggcaccaacaccagcaaucagguggcagugcuguaccagggcgugaacuguaccgaagugcccguggccauucacgccgaucagcugacaccuacauggcggguguacuccaccggcagcaauguguuucagaccagagccggcugucugaucggagccgagcacgugaacaauagcuacgagugcgacauccccaucggcgcuggaaucugcgccagcuaccagacacagacaaacagcccucggagagccagaagcguggccagccagagcaucauugccuacacaaugucucugggcgccgagaacagcguggccuacuccaacaacucuaucgcuauccccaccaacuucaccaucagcgugaccacagagauccugccuguguccaugaccaagaccagcguggacugcaccauguacaucugcggcgauuccaccgagugcuccaaccugcugcugcaguacggcagcuucugcacccagcugaauagagcccugacagggaucgccguggaacaggacaagaacacccaagagguguucgcccaagugaagcagaucuacaagaccccuccuaucaaggacuucggcggcuucaauuucagccagauucugcccgauccuagcaagcccagcaagcggagcuucaucgaggaccugcuguucaacaaagugacacuggccgacgccggcuucaucaagcaguauggcgauugucugggcgacauugccgccagggaucugauuugcgcccagaaguuuaacggacugacagugcugccuccucugcugaccgaugagaugaucgcccaguacacaucugcccugcuggccggcacaaucacaagcggcuggacauuuggagcaggcgccgcucugcagauccccuuugcuaugcagauggccuaccgguucaacggcaucggagugacccagaaugugcuguacgagaaccagaagcugaucgccaaccaguucaacagcgccaucggcaagauccaggacagccugagcagcacagcaagcgcccugggaaagcugcaggacguggucaaccagaaugcccaggcacugaacacccuggucaagcagcuguccuccaacuucggcgccaucagcucugugcugaacgauauccugagcagacuggacaaggucgaggccgaggugcagaucgacagacugaucacaggcagacugcagagccuccagacauacgugacccagcagcugaucagagccgccgagauuagagccucugccaaucuggccgccaccaagaugucugagugugugcugggccagagcaagagaguggacuuuugcggcaagggcuaccaccugaugagcuucccucagucugccccucacggcgugguguuucugcacgugacauaugugcccgcucaagagaagaauuucaccaccgcuccagccaucugccacgacggcaaagcccacuuuccuagagaaggcguguucguguccaacggcacccauugguucgugacacagcggaacuucuacgagccccagaucaucaccaccgacaacaccuucgugucuggcaacugcgacgucgugaucggcauugugaacaauaccguguacgacccucugcagcccgagcuggacagcuucaaagaggaacuggacaaguacuuuaagaaccacacaagccccgacguggaccugggcgauaucagcggaaucaaugccagcgucgugaacauccagaaagagaucgaccggcugaacgagguggccaagaaucugaacgagagccugaucgaccugcaagaacuggggaaguacgagcaguacaucaaguggcccugguacaucuggcugggcuuuaucgccggacugauugccaucgugauggucacaaucaugcuguguugcaugaccagcugcuguagcugccugaagggcuguuguagcuguggcagcugcugcaaguucgacgaggacgauucugagcccgugcugaagggcgugaaacugcacuacacaugaugacucgagcugguacugcaugcacgcaaugcuagcugccccuuucccguccuggguaccccgagucucccccgaccucgggucccagguaugcucccaccuccaccugccccacucaccaccucugcuaguuccagacaccucccaagcacgcagcaaugcagcucaaaacgcuuagccuagccacacccccacgggaaacagcagugauuaaccuuuagcaauaaacgaaaguuuaacuaagcuauacuaaccccaggguuggucaauuucgugccagccacacccuggagcuagcaaaaaaaaaaaaaaaaaaaaaaaaaaaaaagcauaugacuaaaaaaaaaaaaaaaaaaaaaaaaaaaaaaaaaaaaaaaaaaaaaaaaaaaaaaaaaaaaaaaaaaaaaa

SEQ ID NO: 26804 - RNA, 4283 nt, Artificial Sequence
  SARS-CoV-2/Wuhan/WIV05/2019__EPI_ISL_402128 spike protein mRNA gc mod (1-1273)(N501Y_D614G)
agaauaaacuaguauucuucugguccccacagacucagagagaacccgccaccauguucguguuccuggugcugcugccucugguguccagccagugugugaaccugaccaccagaacacagcugccuccagccuacaccaacagcuuuaccagaggcguguacuaccccgacaagguguucagauccagcgugcugcacucuacccaggaccuguuccugccuuucuucagcaacgugaccugguuccacgccauccacguguccggcaccaauggcaccaagagauucgacaaccccgugcugcccuucaacgacgggguguacuuugccagcaccgagaaguccaacaucaucagaggcuggaucuucggcaccacacuggacagcaagacccagagccugcugaucgugaacaacgccaccaacguggucaucaaagugugcgaguuccaguucugcaacgaccccuuccugggcgucuacuaccacaagaacaacaagagcuggauggaaagcgaguuccggguguacagcagcgccaacaacugcaccuucgaguacgugucccagccuuuccugauggaccuggaaggcaagcagggcaacuucaagaaccugcgcgaguucguguuuaagaacaucgacggcuacuucaagaucuacagcaagcacaccccuaucaaccucgugcgggaucugccucagggcuucucugcucuggaaccccugguggaucugcccaucggcaucaacaucacccgguuucagacacugcuggcccugcacagaagcuaccugacaccuggcgauagcagcagcggauggacagcuggugccgccgcuuacuaugugggcuaccugcagccuagaaccuuccugcugaaguacaacgagaacggcaccaucaccgacgccguggauugugcucuggauccucugagcgagacaaagugcacccugaaguccuucaccguggaaaagggcaucuaccagaccagcaacuuccgggugcagcccaccgaauccaucgugcgguuccccaauaucaccaaucugugccccuucggcgagguguucaaugccaccagauucgccucuguguacgccuggaaccggaagcggaucagcaauugcguggccgacuacuccgugcuguacaacuccgccagcuucagcaccuucaagugcuacggcguguccccuaccaagcugaacgaccugugcuucacaaacguguacgccgacagcuucgugauccggggagaugaagugcggcagauugccccuggacagacaggcaagaucgccgacuacaacuacaagcugcccgacgacuucaccggcugugugauugccuggaacagcaacaaccuggacuccaaagucggcggcaacuacaauuaccuguaccggcuguuccggaaguccaaucugaagcccuucgagcgggacaucuccaccgagaucuaucaggccggcagcaccccuuguaacggcguggaaggcuucaacugcuacuucccacugcaguccuacggcuuucagcccacauacggcgugggcuaucagcccuacagagugguggugcugagcuucgaacugcugcaugccccugccacagugugcggcccuaagaaaagcaccaaucucgugaagaacaaaugcgugaacuucaacuucaacggccugaccggcaccggcgugcugacagagagcaacaagaaguuccugccauuccagcaguuuggccgggauaucgccgauaccacagacgccguuagagauccccagacacuggaaauccuggacaucaccccuugcagcuucggcggagugucugugaucaccccuggcaccaacaccagcaaucagguggcagugcuguaccagggcgugaacuguaccgaagugcccguggccauucacgccgaucagcugacaccuacauggcggguguacuccaccggcagcaauguguuucagaccagagccggcugucugaucggagccgagcacgugaacaauagcuacgagugcgacauccccaucggcgcuggaaucugcgccagcuaccagacacagacaaacagcccucggagagccagaagcguggccagccagagcaucauugccuacacaaugucucugggcgccgagaacagcguggccuacuccaacaacucuaucgcuauccccaccaacuucaccaucagcgugaccacagagauccugccuguguccaugaccaagaccagcguggacugcaccauguacaucugcggcgauuccaccgagugcuccaaccugcugcugcaguacggcagcuucugcacccagcugaauagagcccugacagggaucgccguggaacaggacaagaacacccaagagguguucgcccaagugaagcagaucuacaagaccccuccuaucaaggacuucggcggcuucaauuucagccagauucugcccgauccuagcaagcccagcaagcggagcuucaucgaggaccugcuguucaacaaagugacacuggccgacgccggcuucaucaagcaguauggcgauugucugggcgacauugccgccagggaucugauuugcgcccagaaguuuaacggacugacagugcugccuccucugcugaccgaugagaugaucgcccaguacacaucugcccugcuggccggcacaaucacaagcggcuggacauuuggagcaggcgccgcucugcagauccccuuugcuaugcagauggccuaccgguucaacggcaucggagugacccagaaugugcuguacgagaaccagaagcugaucgccaaccaguucaacagcgccaucggcaagauccaggacagccugagcagcacagcaagcgcccugggaaagcugcaggacguggucaaccagaaugcccaggcacugaacacccuggucaagcagcuguccuccaacuucggcgccaucagcucugugcugaacgauauccugagcagacuggacaaggucgaggccgaggugcagaucgacagacugaucacaggcagacugcagagccuccagacauacgugacccagcagcugaucagagccgccgagauuagagccucugccaaucuggccgccaccaagaugucugagugugugcugggccagagcaagagaguggacuuuugcggcaagggcuaccaccugaugagcuucccucagucugccccucacggcgugguguuucugcacgugacauaugugcccgcucaagagaagaauuucaccaccgcuccagccaucugccacgacggcaaagcccacuuuccuagagaaggcguguucguguccaacggcacccauugguucgugacacagcggaacuucuacgagccccagaucaucaccaccgacaacaccuucgugucuggcaacugcgacgucgugaucggcauugugaacaauaccguguacgacccucugcagcccgagcuggacagcuucaaagaggaacuggacaaguacuuuaagaaccacacaagccccgacguggaccugggcgauaucagcggaaucaaugccagcgucgugaacauccagaaagagaucgaccggcugaacgagguggccaagaaucugaacgagagccugaucgaccugcaagaacuggggaaguacgagcaguacaucaaguggcccugguacaucuggcugggcuuuaucgccggacugauugccaucgugauggucacaaucaugcuguguugcaugaccagcugcuguagcugccugaagggcuguuguagcuguggcagcugcugcaaguucgacgaggacgauucugagcccgugcugaagggcgugaaacugcacuacacaugaugacucgagcugguacugcaugcacgcaaugcuagcugccccuuucccguccuggguaccccgagucucccccgaccucgggucccagguaugcucccaccuccaccugccccacucaccaccucugcuaguuccagacaccucccaagcacgcagcaaugcagcucaaaacgcuuagccuagccacacccccacgggaaacagcagugauuaaccuuuagcaauaaacgaaaguuuaacuaagcuauacuaaccccaggguuggucaauuucgugccagccacacccuggagcuagcaaaaaaaaaaaaaaaaaaaaaaaaaaaaaagcauaugacuaaaaaaaaaaaaaaaaaaaaaaaaaaaaaaaaaaaaaaaaaaaaaaaaaaaaaaaaaaaaaaaaaaaaaa

SEQ ID NO: 26805 - RNA, 4277 nt, Artificial Sequence
  SARS-CoV-2/Wuhan/WIV05/2019__EPI_ISL_402128 spike protein mRNA gc mod (1-1273)(H69del_V70del_D614G)
agaauaaacuaguauucuucugguccccacagacucagagagaacccgccaccauguucguguuccuggugcugcugccucugguguccagccagugugugaaccugaccaccagaacacagcugccuccagccuacaccaacagcuuuaccagaggcguguacuaccccgacaagguguucagauccagcgugcugcacucuacccaggaccuguuccugccuuucuucagcaacgugaccugguuccacgccaucuccggcaccaauggcaccaagagauucgacaaccccgugcugcccuucaacgacgggguguacuuugccagcaccgagaaguccaacaucaucagaggcuggaucuucggcaccacacuggacagcaagacccagagccugcugaucgugaacaacgccaccaacguggucaucaaagugugcgaguuccaguucugcaacgaccccuuccugggcgucuacuaccacaagaacaacaagagcuggauggaaagcgaguuccggguguacagcagcgccaacaacugcaccuucgaguacgugucccagccuuuccugauggaccuggaaggcaagcagggcaacuucaagaaccugcgcgaguucguguuuaagaacaucgacggcuacuucaagaucuacagcaagcacaccccuaucaaccucgugcgggaucugccucagggcuucucugcucuggaaccccugguggaucugcccaucggcaucaacaucacccgguuucagacacugcuggcccugcacagaagcuaccugacaccuggcgauagcagcagcggauggacagcuggugccgccgcuuacuaugugggcuaccugcagccuagaaccuuccugcugaaguacaacgagaacggcaccaucaccgacgccguggauugugcucuggauccucugagcgagacaaagugcacccugaaguccuucaccguggaaaagggcaucuaccagaccagcaacuuccgggugcagcccaccgaauccaucgugcgguuccccaauaucaccaaucugugccccuucggcgagguguucaaugccaccagauucgccucuguguacgccuggaaccggaagcggaucagcaauugcguggccgacuacuccgugcuguacaacuccgccagcuucagcaccuucaagugcuacggcguguccccuaccaagcugaacgaccugugcuucacaaacguguacgccgacagcuucgugauccggggagaugaagugcggcagauugccccuggacagacaggcaagaucgccgacuacaacuacaagcugcccgacgacuucaccggcugugugauugccuggaacagcaacaaccuggacuccaaagucggcggcaacuacaauuaccuguaccggcuguuccggaaguccaaucugaagcccuucgagcgggacaucuccaccgagaucuaucaggccggcagcaccccuuguaacggcguggaaggcuucaacugcuacuucccacugcaguccuacggcuuucagcccacaaauggcgugggcuaucagcccuacagagugguggugcugagcuucgaacugcugcaugccccugccacagugugcggcccuaagaaaagcaccaaucucgugaagaacaaaugcgugaacuucaacuucaacggccugaccggcaccggcgugcugacagagagcaacaagaaguuccugccauuccagcaguuuggccgggauaucgccgauaccacagacgccguuagagauccccagacacuggaaauccuggacaucaccccuugcagcuucggcggagugucugugaucaccccuggcaccaacaccagcaaucagguggcagugcuguaccagggcgugaacuguaccgaagugcccguggccauucacgccgaucagcugacaccuacauggcggguguacuccaccggcagcaauguguuucagaccagagccggcugucugaucggagccgagcacgugaacaauagcuacgagugcgacauccccaucggcgcuggaaucugcgccagcuaccagacacagacaaacagcccucggagagccagaagcguggccagccagagcaucauugccuacacaaugucucugggcgccgagaacagcguggccuacuccaacaacucuaucgcuauccccaccaacuucaccaucagcgugaccacagagauccugccuguguccaugaccaagaccagcguggacugcaccauguacaucugcggcgauuccaccgagugcuccaaccugcugcugcaguacggcagcuucugcacccagcugaauagagcccugacagggaucgccguggaacaggacaagaacacccaagagguguucgcccaagugaagcagaucuacaagaccccuccuaucaaggacuucggcggcuucaauuucagccagauucugcccgauccuagcaagcccagcaagcggagcuucaucgaggaccugcuguucaacaaagugacacuggccgacgccggcuucaucaagcaguauggcgauugucugggcgacauugccgccagggaucugauuugcgcccagaaguuuaacggacugacagugcugccuccucugcugaccgaugagaugaucgcccaguacacaucugcccugcuggccggcacaaucacaagcggcuggacauuuggagcaggcgccgcucugcagauccccuuugcuaugcagauggccuaccgguucaacggcaucggagugacccagaaugugcuguacgagaaccagaagcugaucgccaaccaguucaacagcgccaucggcaagauccaggacagccugagcagcacagcaagcgcccugggaaagcugcaggacguggucaaccagaaugcccaggcacugaacacccuggucaagcagcuguccuccaacuucggcgccaucagcucugugcugaacgauauccugagcagacuggacaaggucgaggccgaggugcagaucgacagacugaucacaggcagacugcagagccuccagacauacgugacccagcagcugaucagagccgccgagauuagagccucugccaaucuggccgccaccaagaugucugagugugugcugggccagagcaagagaguggacuuuugcggcaagggcuaccaccugaugagcuucccucagucugccccucacggcgugguguuucugcacgugacauaugugcccgcucaagagaagaauuucaccaccgcuccagccaucugccacgacggcaaagcccacuuuccuagagaaggcguguucguguccaacggcacccauugguucgugacacagcggaacuucuacgagccccagaucaucaccaccgacaacaccuucgugucuggcaacugcgacgucgugaucggcauugugaacaauaccguguacgacccucugcagcccgagcuggacagcuucaaagaggaacuggacaaguacuuuaagaaccacacaagccccgacguggaccugggcgauaucagcggaaucaaugccagcgucgugaacauccagaaagagaucgaccggcugaacgagguggccaagaaucugaacgagagccugaucgaccugcaagaacuggggaaguacgagcaguacaucaaguggcccugguacaucuggcugggcuuuaucgccggacugauugccaucgugauggucacaaucaugcuguguugcaugaccagcugcuguagcugccugaagggcuguuguagcuguggcagcugcugcaaguucgacgaggacgauucugagcccgugcugaagggcgugaaacugcacuacacaugaugacucgagcugguacugcaugcacgcaaugcuagcugccccuuucccguccuggguaccccgagucucccccgaccucgggucccagguaugcucccaccuccaccugccccacucaccaccucugcuaguuccagacaccucccaagcacgcagcaaugcagcucaaaacgcuuagccuagccacacccccacgggaaacagcagugauuaaccuuuagcaauaaacgaaaguuuaacuaagcuauacuaaccccaggguuggucaauuucgugccagccacacccuggagcuagcaaaaaaaaaaaaaaaaaaaaaaaaaaaaaagcauaugacuaaaaaaaaaaaaaaaaaaaaaaaaaaaaaaaaaaaaaaaaaaaaaaaaaaaaaaaaaaaaaaaaaaaaaa

SEQ ID NO: 26806 - RNA, 4283 nt, Artificial Sequence
  SARS-CoV-2/Wuhan/WIV05/2019__EPI_ISL_402128 spike protein mRNA gc mod (1-1273)(Y453F_D614G)
agaauaaacuaguauucuucugguccccacagacucagagagaacccgccaccauguucguguuccuggugcugcugccucugguguccagccagugugugaaccugaccaccagaacacagcugccuccagccuacaccaacagcuuuaccagaggcguguacuaccccgacaagguguucagauccagcgugcugcacucuacccaggaccuguuccugccuuucuucagcaacgugaccugguuccacgccauccacguguccggcaccaauggcaccaagagauucgacaaccccgugcugcccuucaacgacgggguguacuuugccagcaccgagaaguccaacaucaucagaggcuggaucuucggcaccacacuggacagcaagacccagagccugcugaucgugaacaacgccaccaacguggucaucaaagugugcgaguuccaguucugcaacgaccccuuccugggcgucuacuaccacaagaacaacaagagcuggauggaaagcgaguuccggguguacagcagcgccaacaacugcaccuucgaguacgugucccagccuuuccugauggaccuggaaggcaagcagggcaacuucaagaaccugcgcgaguucguguuuaagaacaucgacggcuacuucaagaucuacagcaagcacaccccuaucaaccucgugcgggaucugccucagggcuucucugcucuggaaccccugguggaucugcccaucggcaucaacaucacccgguuucagacacugcuggcccugcacagaagcuaccugacaccuggcgauagcagcagcggauggacagcuggugccgccgcuuacuaugugggcuaccugcagccuagaaccuuccugcugaaguacaacgagaacggcaccaucaccgacgccguggauugugcucuggauccucugagcgagacaaagugcacccugaaguccuucaccguggaaaagggcaucuaccagaccagcaacuuccgggugcagcccaccgaauccaucgugcgguuccccaauaucaccaaucugugccccuucggcgagguguucaaugccaccagauucgccucuguguacgccuggaaccggaagcggaucagcaauugcguggccgacuacuccgugcuguacaacuccgccagcuucagcaccuucaagugcuacggcguguccccuaccaagcugaacgaccugugcuucacaaacguguacgccgacagcuucgugauccggggagaugaagugcggcagauugccccuggacagacaggcaagaucgccgacuacaacuacaagcugcccgacgacuucaccggcugugugauugccuggaacagcaacaaccuggacuccaaagucggcggcaacuacaauuaccuguuccggcuguuccggaaguccaaucugaagcccuucgagcgggacaucuccaccgagaucuaucaggccggcagcaccccuuguaacggcguggaaggcuucaacugcuacuucccacugcaguccuacggcuuucagcccacaaauggcgugggcuaucagcccuacagagugguggugcugagcuucgaacugcugcaugccccugccacagugugcggcccuaagaaaagcaccaaucucgugaagaacaaaugcgugaacuucaacuucaacggccugaccggcaccggcgugcugacagagagcaacaagaaguuccugccauuccagcaguuuggccgggauaucgccgauaccacagacgccguuagagauccccagacacuggaaauccuggacaucaccccuugcagcuucggcggagugucugugaucaccccuggcaccaacaccagcaaucagguggcagugcuguaccagggcgugaacuguaccgaagugcccguggccauucacgccgaucagcugacaccuacauggcggguguacuccaccggcagcaauguguuucagaccagagccggcugucugaucggagccgagcacgugaacaauagcuacgagugcgacauccccaucggcgcuggaaucugcgccagcuaccagacacagacaaacagcccucggagagccagaagcguggccagccagagcaucauugccuacacaaugucucugggcgccgagaacagcguggccuacuccaacaacucuaucgcuauccccaccaacuucaccaucagcgugaccacagagauccugccuguguccaugaccaagaccagcguggacugcaccauguacaucugcggcgauuccaccgagugcuccaaccugcugcugcaguacggcagcuucugcacccagcugaauagagcccugacagggaucgccguggaacaggacaagaacacccaagagguguucgcccaagugaagcagaucuacaagaccccuccuaucaaggacuucggcggcuucaauuucagccagauucugcccgauccuagcaagcccagcaagcggagcuucaucgaggaccugcuguucaacaaagugacacuggccgacgccggcuucaucaagcaguauggcgauugucugggcgacauugccgccagggaucugauuugcgcccagaaguuuaacggacugacagugcugccuccucugcugaccgaugagaugaucgcccaguacacaucugcccugcuggccggcacaaucacaagcggcuggacauuuggagcaggcgccgcucugcagauccccuuugcuaugcagauggccuaccgguucaacggcaucggagugacccagaaugugcuguacgagaaccagaagcugaucgccaaccaguucaacagcgccaucggcaagauccaggacagccugagcagcacagcaagcgcccugggaaagcugcaggacguggucaaccagaaugcccaggcacugaacacccuggucaagcagcuguccuccaacuucggcgccaucagcucugugcugaacgauauccugagcagacuggacaaggucgaggccgaggugcagaucgacagacugaucacaggcagacugcagagccuccagacauacgugacccagcagcugaucagagccgccgagauuagagccucugccaaucuggccgccaccaagaugucugagugugugcugggccagagcaagagaguggacuuuugcggcaagggcuaccaccugaugagcuucccucagucugccccucacggcgugguguuucugcacgugacauaugugcccgcucaagagaagaauuucaccaccgcuccagccaucugccacgacggcaaagcccacuuuccuagagaaggcguguucguguccaacggcacccauugguucgugacacagcggaacuucuacgagccccagaucaucaccaccgacaacaccuucgugucuggcaacugcgacgucgugaucggcauugugaacaauaccguguacgacccucugcagcccgagcuggacagcuucaaagaggaacuggacaaguacuuuaagaaccacacaagccccgacguggaccugggcgauaucagcggaaucaaugccagcgucgugaacauccagaaagagaucgaccggcugaacgagguggccaagaaucugaacgagagccugaucgaccugcaagaacuggggaaguacgagcaguacaucaaguggcccugguacaucuggcugggcuuuaucgccggacugauugccaucgugauggucacaaucaugcuguguugcaugaccagcugcuguagcugccugaagggcuguuguagcuguggcagcugcugcaaguucgacgaggacgauucugagcccgugcugaagggcgugaaacugcacuacacaugaugacucgagcugguacugcaugcacgcaaugcuagcugccccuuucccguccuggguaccccgagucucccccgaccucgggucccagguaugcucccaccuccaccugccccacucaccaccucugcuaguuccagacaccucccaagcacgcagcaaugcagcucaaaacgcuuagccuagccacacccccacgggaaacagcagugauuaaccuuuagcaauaaacgaaaguuuaacuaagcuauacuaaccccaggguuggucaauuucgugccagccacacccuggagcuagcaaaaaaaaaaaaaaaaaaaaaaaaaaaaaagcauaugacuaaaaaaaaaaaaaaaaaaaaaaaaaaaaaaaaaaaaaaaaaaaaaaaaaaaaaaaaaaaaaaaaaaaaaa

SEQ ID NO: 26807 - RNA, 4283 nt, Artificial Sequence
  SARS-CoV-2/Wuhan/WIV05/2019__EPI_ISL_402128 spike protein mRNA gc mod (1-1273)(D614G_I692V)
agaauaaacuaguauucuucugguccccacagacucagagagaacccgccaccauguucguguuccuggugcugcugccucugguguccagccagugugugaaccugaccaccagaacacagcugccuccagccuacaccaacagcuuuaccagaggcguguacuaccccgacaagguguucagauccagcgugcugcacucuacccaggaccuguuccugccuuucuucagcaacgugaccugguuccacgccauccacguguccggcaccaauggcaccaagagauucgacaaccccgugcugcccuucaacgacgggguguacuuugccagcaccgagaaguccaacaucaucagaggcuggaucuucggcaccacacuggacagcaagacccagagccugcugaucgugaacaacgccaccaacguggucaucaaagugugcgaguuccaguucugcaacgaccccuuccugggcgucuacuaccacaagaacaacaagagcuggauggaaagcgaguuccggguguacagcagcgccaacaacugcaccuucgaguacgugucccagccuuuccugauggaccuggaaggcaagcagggcaacuucaagaaccugcgcgaguucguguuuaagaacaucgacggcuacuucaagaucuacagcaagcacaccccuaucaaccucgugcgggaucugccucagggcuucucugcucuggaaccccugguggaucugcccaucggcaucaacaucacccgguuucagacacugcuggcccugcacagaagcuaccugacaccuggcgauagcagcagcggauggacagcuggugccgccgcuuacuaugugggcuaccugcagccuagaaccuuccugcugaaguacaacgagaacggcaccaucaccgacgccguggauugugcucuggauccucugagcgagacaaagugcacccugaaguccuucaccguggaaaagggcaucuaccagaccagcaacuuccgggugcagcccaccgaauccaucgugcgguuccccaauaucaccaaucugugccccuucggcgagguguucaaugccaccagauucgccucuguguacgccuggaaccggaagcggaucagcaauugcguggccgacuacuccgugcuguacaacuccgccagcuucagcaccuucaagugcuacggcguguccccuaccaagcugaacgaccugugcuucacaaacguguacgccgacagcuucgugauccggggagaugaagugcggcagauugccccuggacagacaggcaagaucgccgacuacaacuacaagcugcccgacgacuucaccggcugugugauugccuggaacagcaacaaccuggacuccaaagucggcggcaacuacaauuaccuguaccggcuguuccggaaguccaaucugaagcccuucgagcgggacaucuccaccgagaucuaucaggccggcagcaccccuuguaacggcguggaaggcuucaacugcuacuucccacugcaguccuacggcuuucagcccacaaauggcgugggcuaucagcccuacagagugguggugcugagcuucgaacugcugcaugccccugccacagugugcggcccuaagaaaagcaccaaucucgugaagaacaaaugcgugaacuucaacuucaacggccugaccggcaccggcgugcugacagagagcaacaagaaguuccugccauuccagcaguuuggccgggauaucgccgauaccacagacgccguuagagauccccagacacuggaaauccuggacaucaccccuugcagcuucggcggagugucugugaucaccccuggcaccaacaccagcaaucagguggcagugcuguaccagggcgugaacuguaccgaagugcccguggccauucacgccgaucagcugacaccuacauggcggguguacuccaccggcagcaauguguuucagaccagagccggcugucugaucggagccgagcacgugaacaauagcuacgagugcgacauccccaucggcgcuggaaucugcgccagcuaccagacacagacaaacagcccucggagagccagaagcguggccagccagagcgugauugccuacacaaugucucugggcgccgagaacagcguggccuacuccaacaacucuaucgcuauccccaccaacuucaccaucagcgugaccacagagauccugccuguguccaugaccaagaccagcguggacugcaccauguacaucugcggcgauuccaccgagugcuccaaccugcugcugcaguacggcagcuucugcacccagcugaauagagcccugacagggaucgccguggaacaggacaagaacacccaagagguguucgcccaagugaagcagaucuacaagaccccuccuaucaaggacuucggcggcuucaauuucagccagauucugcccgauccuagcaagcccagcaagcggagcuucaucgaggaccugcuguucaacaaagugacacuggccgacgccggcuucaucaagcaguauggcgauugucugggcgacauugccgccagggaucugauuugcgcccagaaguuuaacggacugacagugcugccuccucugcugaccgaugagaugaucgcccaguacacaucugcccugcuggccggcacaaucacaagcggcuggacauuuggagcaggcgccgcucugcagauccccuuugcuaugcagauggccuaccgguucaacggcaucggagugacccagaaugugcuguacgagaaccagaagcugaucgccaaccaguucaacagcgccaucggcaagauccaggacagccugagcagcacagcaagcgcccugggaaagcugcaggacguggucaaccagaaugcccaggcacugaacacccuggucaagcagcuguccuccaacuucggcgccaucagcucugugcugaacgauauccugagcagacuggacaaggucgaggccgaggugcagaucgacagacugaucacaggcagacugcagagccuccagacauacgugacccagcagcugaucagagccgccgagauuagagccucugccaaucuggccgccaccaagaugucugagugugugcugggccagagcaagagaguggacuuuugcggcaagggcuaccaccugaugagcuucccucagucugccccucacggcgugguguuucugcacgugacauaugugcccgcucaagagaagaauuucaccaccgcuccagccaucugccacgacggcaaagcccacuuuccuagagaaggcguguucguguccaacggcacccauugguucgugacacagcggaacuucuacgagccccagaucaucaccaccgacaacaccuucgugucuggcaacugcgacgucgugaucggcauugugaacaauaccguguacgacccucugcagcccgagcuggacagcuucaaagaggaacuggacaaguacuuuaagaaccacacaagccccgacguggaccugggcgauaucagcggaaucaaugccagcgucgugaacauccagaaagagaucgaccggcugaacgagguggccaagaaucugaacgagagccugaucgaccugcaagaacuggggaaguacgagcaguacaucaaguggcccugguacaucuggcugggcuuuaucgccggacugauugccaucgugauggucacaaucaugcuguguugcaugaccagcugcuguagcugccugaagggcuguuguagcuguggcagcugcugcaaguucgacgaggacgauucugagcccgugcugaagggcgugaaacugcacuacacaugaugacucgagcugguacugcaugcacgcaaugcuagcugccccuuucccguccuggguaccccgagucucccccgaccucgggucccagguaugcucccaccuccaccugccccacucaccaccucugcuaguuccagacaccucccaagcacgcagcaaugcagcucaaaacgcuuagccuagccacacccccacgggaaacagcagugauuaaccuuuagcaauaaacgaaaguuuaacuaagcuauacuaaccccaggguuggucaauuucgugccagccacacccuggagcuagcaaaaaaaaaaaaaaaaaaaaaaaaaaaaaagcauaugacuaaaaaaaaaaaaaaaaaaaaaaaaaaaaaaaaaaaaaaaaaaaaaaaaaaaaaaaaaaaaaaaaaaaaaa

SEQ ID NO: 26808 - RNA, 4283 nt, Artificial Sequence
  SARS-CoV-2/Wuhan/WIV05/2019__EPI_ISL_402128 spike protein mRNA gc mod (1-1273)(D614G_M1229I)
agaauaaacuaguauucuucugguccccacagacucagagagaacccgccaccauguucguguuccuggugcugcugccucugguguccagccagugugugaaccugaccaccagaacacagcugccuccagccuacaccaacagcuuuaccagaggcguguacuaccccgacaagguguucagauccagcgugcugcacucuacccaggaccuguuccugccuuucuucagcaacgugaccugguuccacgccauccacguguccggcaccaauggcaccaagagauucgacaaccccgugcugcccuucaacgacgggguguacuuugccagcaccgagaaguccaacaucaucagaggcuggaucuucggcaccacacuggacagcaagacccagagccugcugaucgugaacaacgccaccaacguggucaucaaagugugcgaguuccaguucugcaacgaccccuuccugggcgucuacuaccacaagaacaacaagagcuggauggaaagcgaguuccggguguacagcagcgccaacaacugcaccuucgaguacgugucccagccuuuccugauggaccuggaaggcaagcagggcaacuucaagaaccugcgcgaguucguguuuaagaacaucgacggcuacuucaagaucuacagcaagcacaccccuaucaaccucgugcgggaucugccucagggcuucucugcucuggaaccccugguggaucugcccaucggcaucaacaucacccgguuucagacacugcuggcccugcacagaagcuaccugacaccuggcgauagcagcagcggauggacagcuggugccgccgcuuacuaugugggcuaccugcagccuagaaccuuccugcugaaguacaacgagaacggcaccaucaccgacgccguggauugugcucuggauccucugagcgagacaaagugcacccugaaguccuucaccguggaaaagggcaucuaccagaccagcaacuuccgggugcagcccaccgaauccaucgugcgguuccccaauaucaccaaucugugccccuucggcgagguguucaaugccaccagauucgccucuguguacgccuggaaccggaagcggaucagcaauugcguggccgacuacuccgugcuguacaacuccgccagcuucagcaccuucaagugcuacggcguguccccuaccaagcugaacgaccugugcuucacaaacguguacgccgacagcuucgugauccggggagaugaagugcggcagauugccccuggacagacaggcaagaucgccgacuacaacuacaagcugcccgacgacuucaccggcugugugauugccuggaacagcaacaaccuggacuccaaagucggcggcaacuacaauuaccuguaccggcuguuccggaaguccaaucugaagcccuucgagcgggacaucuccaccgagaucuaucaggccggcagcaccccuuguaacggcguggaaggcuucaacugcuacuucccacugcaguccuacggcuuucagcccacaaauggcgugggcuaucagcccuacagagugguggugcugagcuucgaacugcugcaugccccugccacagugugcggcccuaagaaaagcaccaaucucgugaagaacaaaugcgugaacuucaacuucaacggccugaccggcaccggcgugcugacagagagcaacaagaaguuccugccauuccagcaguuuggccgggauaucgccgauaccacagacgccguuagagauccccagacacuggaaauccuggacaucaccccuugcagcuucggcggagugucugugaucaccccuggcaccaacaccagcaaucagguggcagugcuguaccagggcgugaacuguaccgaagugcccguggccauucacgccgaucagcugacaccuacauggcggguguacuccaccggcagcaauguguuucagaccagagccggcugucugaucggagccgagcacgugaacaauagcuacgagugcgacauccccaucggcgcuggaaucugcgccagcuaccagacacagacaaacagcccucggagagccagaagcguggccagccagagcaucauugccuacacaaugucucugggcgccgagaacagcguggccuacuccaacaacucuaucgcuauccccaccaacuucaccaucagcgugaccacagagauccugccuguguccaugaccaagaccagcguggacugcaccauguacaucugcggcgauuccaccgagugcuccaaccugcugcugcaguacggcagcuucugcacccagcugaauagagcccugacagggaucgccguggaacaggacaagaacacccaagagguguucgcccaagugaagcagaucuacaagaccccuccuaucaaggacuucggcggcuucaauuucagccagauucugcccgauccuagcaagcccagcaagcggagcuucaucgaggaccugcuguucaacaaagugacacuggccgacgccggcuucaucaagcaguauggcgauugucugggcgacauugccgccagggaucugauuugcgcccagaaguuuaacggacugacagugcugccuccucugcugaccgaugagaugaucgcccaguacacaucugcccugcuggccggcacaaucacaagcggcuggacauuuggagcaggcgccgcucugcagauccccuuugcuaugcagauggccuaccgguucaacggcaucggagugacccagaaugugcuguacgagaaccagaagcugaucgccaaccaguucaacagcgccaucggcaagauccaggacagccugagcagcacagcaagcgcccugggaaagcugcaggacguggucaaccagaaugcccaggcacugaacacccuggucaagcagcuguccuccaacuucggcgccaucagcucugugcugaacgauauccugagcagacuggacaaggucgaggccgaggugcagaucgacagacugaucacaggcagacugcagagccuccagacauacgugacccagcagcugaucagagccgccgagauuagagccucugccaaucuggccgccaccaagaugucugagugugugcugggccagagcaagagaguggacuuuugcggcaagggcuaccaccugaugagcuucccucagucugccccucacggcgugguguuucugcacgugacauaugugcccgcucaagagaagaauuucaccaccgcuccagccaucugccacgacggcaaagcccacuuuccuagagaaggcguguucguguccaacggcacccauugguucgugacacagcggaacuucuacgagccccagaucaucaccaccgacaacaccuucgugucuggcaacugcgacgucgugaucggcauugugaacaauaccguguacgacccucugcagcccgagcuggacagcuucaaagaggaacuggacaaguacuuuaagaaccacacaagccccgacguggaccugggcgauaucagcggaaucaaugccagcgucgugaacauccagaaagagaucgaccggcugaacgagguggccaagaaucugaacgagagccugaucgaccugcaagaacuggggaaguacgagcaguacaucaaguggcccugguacaucuggcugggcuuuaucgccggacugauugccaucgugaucgucacaaucaugcuguguugcaugaccagcugcuguagcugccugaagggcuguuguagcuguggcagcugcugcaaguucgacgaggacgauucugagcccgugcugaagggcgugaaacugcacuacacaugaugacucgagcugguacugcaugcacgcaaugcuagcugccccuuucccguccuggguaccccgagucucccccgaccucgggucccagguaugcucccaccuccaccugccccacucaccaccucugcuaguuccagacaccucccaagcacgcagcaaugcagcucaaaacgcuuagccuagccacacccccacgggaaacagcagugauuaaccuuuagcaauaaacgaaaguuuaacuaagcuauacuaaccccaggguuggucaauuucgugccagccacacccuggagcuagcaaaaaaaaaaaaaaaaaaaaaaaaaaaaaagcauaugacuaaaaaaaaaaaaaaaaaaaaaaaaaaaaaaaaaaaaaaaaaaaaaaaaaaaaaaaaaaaaaaaaaaaaaa

SEQ ID NO: 26809 - RNA, 4277 nt, Artificial Sequence
  SARS-CoV-2/Wuhan/WIV05/2019__EPI_ISL_402128 spike protein mRNA gc mod (1-1273)(H69del_V70del_A222V_Y453F_S477N_D614G_I692V)
agaauaaacuaguauucuucugguccccacagacucagagagaacccgccaccauguucguguuccuggugcugcugccucugguguccagccagugugugaaccugaccaccagaacacagcugccuccagccuacaccaacagcuuuaccagaggcguguacuaccccgacaagguguucagauccagcgugcugcacucuacccaggaccuguuccugccuuucuucagcaacgugaccugguuccacgccaucuccggcaccaauggcaccaagagauucgacaaccccgugcugcccuucaacgacgggguguacuuugccagcaccgagaaguccaacaucaucagaggcuggaucuucggcaccacacuggacagcaagacccagagccugcugaucgugaacaacgccaccaacguggucaucaaagugugcgaguuccaguucugcaacgaccccuuccugggcgucuacuaccacaagaacaacaagagcuggauggaaagcgaguuccggguguacagcagcgccaacaacugcaccuucgaguacgugucccagccuuuccugauggaccuggaaggcaagcagggcaacuucaagaaccugcgcgaguucguguuuaagaacaucgacggcuacuucaagaucuacagcaagcacaccccuaucaaccucgugcgggaucugccucagggcuucucugugcuggaaccccugguggaucugcccaucggcaucaacaucacccgguuucagacacugcuggcccugcacagaagcuaccugacaccuggcgauagcagcagcggauggacagcuggugccgccgcuuacuaugugggcuaccugcagccuagaaccuuccugcugaaguacaacgagaacggcaccaucaccgacgccguggauugugcucuggauccucugagcgagacaaagugcacccugaaguccuucaccguggaaaagggcaucuaccagaccagcaacuuccgggugcagcccaccgaauccaucgugcgguuccccaauaucaccaaucugugccccuucggcgagguguucaaugccaccagauucgccucuguguacgccuggaaccggaagcggaucagcaauugcguggccgacuacuccgugcuguacaacuccgccagcuucagcaccuucaagugcuacggcguguccccuaccaagcugaacgaccugugcuucacaaacguguacgccgacagcuucgugauccggggagaugaagugcggcagauugccccuggacagacaggcaagaucgccgacuacaacuacaagcugcccgacgacuucaccggcugugugauugccuggaacagcaacaaccuggacuccaaagucggcggcaacuacaauuaccuguuccggcuguuccggaaguccaaucugaagcccuucgagcgggacaucuccaccgagaucuaucaggccggcaacaccccuuguaacggcguggaaggcuucaacugcuacuucccacugcaguccuacggcuuucagcccacaaauggcgugggcuaucagcccuacagagugguggugcugagcuucgaacugcugcaugccccugccacagugugcggcccuaagaaaagcaccaaucucgugaagaacaaaugcgugaacuucaacuucaacggccugaccggcaccggcgugcugacagagagcaacaagaaguuccugccauuccagcaguuuggccgggauaucgccgauaccacagacgccguuagagauccccagacacuggaaauccuggacaucaccccuugcagcuucggcggagugucugugaucaccccuggcaccaacaccagcaaucagguggcagugcuguaccagggcgugaacuguaccgaagugcccguggccauucacgccgaucagcugacaccuacauggcggguguacuccaccggcagcaauguguuucagaccagagccggcugucugaucggagccgagcacgugaacaauagcuacgagugcgacauccccaucggcgcuggaaucugcgccagcuaccagacacagacaaacagcccucggagagccagaagcguggccagccagagcgugauugccuacacaaugucucugggcgccgagaacagcguggccuacuccaacaacucuaucgcuauccccaccaacuucaccaucagcgugaccacagagauccugccuguguccaugaccaagaccagcguggacugcaccauguacaucugcggcgauuccaccgagugcuccaaccugcugcugcaguacggcagcuucugcacccagcugaauagagcccugacagggaucgccguggaacaggacaagaacacccaagagguguucgcccaagugaagcagaucuacaagaccccuccuaucaaggacuucggcggcuucaauuucagccagauucugcccgauccuagcaagcccagcaagcggagcuucaucgaggaccugcuguucaacaaagugacacuggccgacgccggcuucaucaagcaguauggcgauugucugggcgacauugccgccagggaucugauuugcgcccagaaguuuaacggacugacagugcugccuccucugcugaccgaugagaugaucgcccaguacacaucugcccugcuggccggcacaaucacaagcggcuggacauuuggagcaggcgccgcucugcagauccccuuugcuaugcagauggccuaccgguucaacggcaucggagugacccagaaugugcuguacgagaaccagaagcugaucgccaaccaguucaacagcgccaucggcaagauccaggacagccugagcagcacagcaagcgcccugggaaagcugcaggacguggucaaccagaaugcccaggcacugaacacccuggucaagcagcuguccuccaacuucggcgccaucagcucugugcugaacgauauccugagcagacuggacaaggucgaggccgaggugcagaucgacagacugaucacaggcagacugcagagccuccagacauacgugacccagcagcugaucagagccgccgagauuagagccucugccaaucuggccgccaccaagaugucugagugugugcugggccagagcaagagaguggacuuuugcggcaagggcuaccaccugaugagcuucccucagucugccccucacggcgugguguuucugcacgugacauaugugcccgcucaagagaagaauuucaccaccgcuccagccaucugccacgacggcaaagcccacuuuccuagagaaggcguguucguguccaacggcacccauugguucgugacacagcggaacuucuacgagccccagaucaucaccaccgacaacaccuucgugucuggcaacugcgacgucgugaucggcauugugaacaauaccguguacgacccucugcagcccgagcuggacagcuucaaagaggaacuggacaaguacuuuaagaaccacacaagccccgacguggaccugggcgauaucagcggaaucaaugccagcgucgugaacauccagaaagagaucgaccggcugaacgagguggccaagaaucugaacgagagccugaucgaccugcaagaacuggggaaguacgagcaguacaucaaguggcccugguacaucuggcugggcuuuaucgccggacugauugccaucgugauggucacaaucaugcuguguugcaugaccagcugcuguagcugccugaagggcuguuguagcuguggcagcugcugcaaguucgacgaggacgauucugagcccgugcugaagggcgugaaacugcacuacacaugaugacucgagcugguacugcaugcacgcaaugcuagcugccccuuucccguccuggguaccccgagucucccccgaccucgggucccagguaugcucccaccuccaccugccccacucaccaccucugcuaguuccagacaccucccaagcacgcagcaaugcagcucaaaacgcuuagccuagccacacccccacgggaaacagcagugauuaaccuuuagcaauaaacgaaaguuuaacuaagcuauacuaaccccaggguuggucaauuucgugccagccacacccuggagcuagcaaaaaaaaaaaaaaaaaaaaaaaaaaaaaagcauaugacuaaaaaaaaaaaaaaaaaaaaaaaaaaaaaaaaaaaaaaaaaaaaaaaaaaaaaaaaaaaaaaaaaaaaaa

SEQ ID NO: 26810 - RNA, 4277 nt, Artificial Sequence
  SARS-CoV-2/Wuhan/WIV05/2019__EPI_ISL_402128 spike protein mRNA gc mod (1-1273)(H69del_V70del_Y453F_D614G_I692V_M1229I)
agaauaaacuaguauucuucugguccccacagacucagagagaacccgccaccauguucguguuccuggugcugcugccucugguguccagccagugugugaaccugaccaccagaacacagcugccuccagccuacaccaacagcuuuaccagaggcguguacuaccccgacaagguguucagauccagcgugcugcacucuacccaggaccuguuccugccuuucuucagcaacgugaccugguuccacgccaucuccggcaccaauggcaccaagagauucgacaaccccgugcugcccuucaacgacgggguguacuuugccagcaccgagaaguccaacaucaucagaggcuggaucuucggcaccacacuggacagcaagacccagagccugcugaucgugaacaacgccaccaacguggucaucaaagugugcgaguuccaguucugcaacgaccccuuccugggcgucuacuaccacaagaacaacaagagcuggauggaaagcgaguuccggguguacagcagcgccaacaacugcaccuucgaguacgugucccagccuuuccugauggaccuggaaggcaagcagggcaacuucaagaaccugcgcgaguucguguuuaagaacaucgacggcuacuucaagaucuacagcaagcacaccccuaucaaccucgugcgggaucugccucagggcuucucugcucuggaaccccugguggaucugcccaucggcaucaacaucacccgguuucagacacugcuggcccugcacagaagcuaccugacaccuggcgauagcagcagcggauggacagcuggugccgccgcuuacuaugugggcuaccugcagccuagaaccuuccugcugaaguacaacgagaacggcaccaucaccgacgccguggauugugcucuggauccucugagcgagacaaagugcacccugaaguccuucaccguggaaaagggcaucuaccagaccagcaacuuccgggugcagcccaccgaauccaucgugcgguuccccaauaucaccaaucugugccccuucggcgagguguucaaugccaccagauucgccucuguguacgccuggaaccggaagcggaucagcaauugcguggccgacuacuccgugcuguacaacuccgccagcuucagcaccuucaagugcuacggcguguccccuaccaagcugaacgaccugugcuucacaaacguguacgccgacagcuucgugauccggggagaugaagugcggcagauugccccuggacagacaggcaagaucgccgacuacaacuacaagcugcccgacgacuucaccggcugugugauugccuggaacagcaacaaccuggacuccaaagucggcggcaacuacaauuaccuguuccggcuguuccggaaguccaaucugaagcccuucgagcgggacaucuccaccgagaucuaucaggccggcagcaccccuuguaacggcguggaaggcuucaacugcuacuucccacugcaguccuacggcuuucagcccacaaauggcgugggcuaucagcccuacagagugguggugcugagcuucgaacugcugcaugccccugccacagugugcggcccuaagaaaagcaccaaucucgugaagaacaaaugcgugaacuucaacuucaacggccugaccggcaccggcgugcugacagagagcaacaagaaguuccugccauuccagcaguuuggccgggauaucgccgauaccacagacgccguuagagauccccagacacuggaaauccuggacaucaccccuugcagcuucggcggagugucugugaucaccccuggcaccaacaccagcaaucagguggcagugcuguaccagggcgugaacuguaccgaagugcccguggccauucacgccgaucagcugacaccuacauggcggguguacuccaccggcagcaauguguuucagaccagagccggcugucugaucggagccgagcacgugaacaauagcuacgagugcgacauccccaucggcgcuggaaucugcgccagcuaccagacacagacaaacagcccucggagagccagaagcguggccagccagagcgugauugccuacacaaugucucugggcgccgagaacagcguggccuacuccaacaacucuaucgcuauccccaccaacuucaccaucagcgugaccacagagauccugccuguguccaugaccaagaccagcguggacugcaccauguacaucugcggcgauuccaccgagugcuccaaccugcugcugcaguacggcagcuucugcacccagcugaauagagcccugacagggaucgccguggaacaggacaagaacacccaagagguguucgcccaagugaagcagaucuacaagaccccuccuaucaaggacuucggcggcuucaauuucagccagauucugcccgauccuagcaagcccagcaagcggagcuucaucgaggaccugcuguucaacaaagugacacuggccgacgccggcuucaucaagcaguauggcgauugucugggcgacauugccgccagggaucugauuugcgcccagaaguuuaacggacugacagugcugccuccucugcugaccgaugagaugaucgcccaguacacaucugcccugcuggccggcacaaucacaagcggcuggacauuuggagcaggcgccgcucugcagauccccuuugcuaugcagauggccuaccgguucaacggcaucggagugacccagaaugugcuguacgagaaccagaagcugaucgccaaccaguucaacagcgccaucggcaagauccaggacagccugagcagcacagcaagcgcccugggaaagcugcaggacguggucaaccagaaugcccaggcacugaacacccuggucaagcagcuguccuccaacuucggcgccaucagcucugugcugaacgauauccugagcagacuggacaaggucgaggccgaggugcagaucgacagacugaucacaggcagacugcagagccuccagacauacgugacccagcagcugaucagagccgccgagauuagagccucugccaaucuggccgccaccaagaugucugagugugugcugggccagagcaagagaguggacuuuugcggcaagggcuaccaccugaugagcuucccucagucugccccucacggcgugguguuucugcacgugacauaugugcccgcucaagagaagaauuucaccaccgcuccagccaucugccacgacggcaaagcccacuuuccuagagaaggcguguucguguccaacggcacccauugguucgugacacagcggaacuucuacgagccccagaucaucaccaccgacaacaccuucgugucuggcaacugcgacgucgugaucggcauugugaacaauaccguguacgacccucugcagcccgagcuggacagcuucaaagaggaacuggacaaguacuuuaagaaccacacaagccccgacguggaccugggcgauaucagcggaaucaaugccagcgucgugaacauccagaaagagaucgaccggcugaacgagguggccaagaaucugaacgagagccugaucgaccugcaagaacuggggaaguacgagcaguacaucaaguggcccugguacaucuggcugggcuuuaucgccggacugauugccaucgugaucgucacaaucaugcuguguugcaugaccagcugcuguagcugccugaagggcuguuguagcuguggcagcugcugcaaguucgacgaggacgauucugagcccgugcugaagggcgugaaacugcacuacacaugaugacucgagcugguacugcaugcacgcaaugcuagcugccccuuucccguccuggguaccccgagucucccccgaccucgggucccagguaugcucccaccuccaccugccccacucaccaccucugcuaguuccagacaccucccaagcacgcagcaaugcagcucaaaacgcuuagccuagccacacccccacgggaaacagcagugauuaaccuuuagcaauaaacgaaaguuuaacuaagcuauacuaaccccaggguuggucaauuucgugccagccacacccuggagcuagcaaaaaaaaaaaaaaaaaaaaaaaaaaaaaagcauaugacuaaaaaaaaaaaaaaaaaaaaaaaaaaaaaaaaaaaaaaaaaaaaaaaaaaaaaaaaaaaaaaaaaaaaaa

SEQ ID NO: 26811 - RNA, 4274 nt, Artificial Sequence
  SARS-CoV-2/Wuhan/WIV05/2019__EPI_ISL_402128 spike protein mRNA gc mod (1-1273)(H69del_V70del_Y144del_N501Y_A570D_D614G_P681H_T716I_S982 A_D1118H)
agaauaaacuaguauucuucugguccccacagacucagagagaacccgccaccauguucguguuccuggugcugcugccucugguguccagccagugugugaaccugaccaccagaacacagcugccuccagccuacaccaacagcuuuaccagaggcguguacuaccccgacaagguguucagauccagcgugcugcacucuacccaggaccuguuccugccuuucuucagcaacgugaccugguuccacgccaucuccggcaccaauggcaccaagagauucgacaaccccgugcugcccuucaacgacgggguguacuuugccagcaccgagaaguccaacaucaucagaggcuggaucuucggcaccacacuggacagcaagacccagagccugcugaucgugaacaacgccaccaacguggucaucaaagugugcgaguuccaguucugcaacgaccccuuccugggcgucuaccacaagaacaacaagagcuggauggaaagcgaguuccggguguacagcagcgccaacaacugcaccuucgaguacgugucccagccuuuccugauggaccuggaaggcaagcagggcaacuucaagaaccugcgcgaguucguguuuaagaacaucgacggcuacuucaagaucuacagcaagcacaccccuaucaaccucgugcgggaucugccucagggcuucucugcucuggaaccccugguggaucugcccaucggcaucaacaucacccgguuucagacacugcuggcccugcacagaagcuaccugacaccuggcgauagcagcagcggauggacagcuggugccgccgcuuacuaugugggcuaccugcagccuagaaccuuccugcugaaguacaacgagaacggcaccaucaccgacgccguggauugugcucuggauccucugagcgagacaaagugcacccugaaguccuucaccguggaaaagggcaucuaccagaccagcaacuuccgggugcagcccaccgaauccaucgugcgguuccccaauaucaccaaucugugccccuucggcgagguguucaaugccaccagauucgccucuguguacgccuggaaccggaagcggaucagcaauugcguggccgacuacuccgugcuguacaacuccgccagcuucagcaccuucaagugcuacggcguguccccuaccaagcugaacgaccugugcuucacaaacguguacgccgacagcuucgugauccggggagaugaagugcggcagauugccccuggacagacaggcaagaucgccgacuacaacuacaagcugcccgacgacuucaccggcugugugauugccuggaacagcaacaaccuggacuccaaagucggcggcaacuacaauuaccuguaccggcuguuccggaaguccaaucugaagcccuucgagcgggacaucuccaccgagaucuaucaggccggcagcaccccuuguaacggcguggaaggcuucaacugcuacuucccacugcaguccuacggcuuucagcccacauacggcgugggcuaucagcccuacagagugguggugcugagcuucgaacugcugcaugccccugccacagugugcggcccuaagaaaagcaccaaucucgugaagaacaaaugcgugaacuucaacuucaacggccugaccggcaccggcgugcugacagagagcaacaagaaguuccugccauuccagcaguuuggccgggauaucgacgauaccacagacgccguuagagauccccagacacuggaaauccuggacaucaccccuugcagcuucggcggagugucugugaucaccccuggcaccaacaccagcaaucagguggcagugcuguaccagggcgugaacuguaccgaagugcccguggccauucacgccgaucagcugacaccuacauggcggguguacuccaccggcagcaauguguuucagaccagagccggcugucugaucggagccgagcacgugaacaauagcuacgagugcgacauccccaucggcgcuggaaucugcgccagcuaccagacacagacaaacagccaccggagagccagaagcguggccagccagagcaucauugccuacacaaugucucugggcgccgagaacagcguggccuacuccaacaacucuaucgcuauccccaucaacuucaccaucagcgugaccacagagauccugccuguguccaugaccaagaccagcguggacugcaccauguacaucugcggcgauuccaccgagugcuccaaccugcugcugcaguacggcagcuucugcacccagcugaauagagcccugacagggaucgccguggaacaggacaagaacacccaagagguguucgcccaagugaagcagaucuacaagaccccuccuaucaaggacuucggcggcuucaauuucagccagauucugcccgauccuagcaagcccagcaagcggagcuucaucgaggaccugcuguucaacaaagugacacuggccgacgccggcuucaucaagcaguauggcgauugucugggcgacauugccgccagggaucugauuugcgcccagaaguuuaacggacugacagugcugccuccucugcugaccgaugagaugaucgcccaguacacaucugcccugcuggccggcacaaucacaagcggcuggacauuuggagcaggcgccgcucugcagauccccuuugcuaugcagauggccuaccgguucaacggcaucggagugacccagaaugugcuguacgagaaccagaagcugaucgccaaccaguucaacagcgccaucggcaagauccaggacagccugagcagcacagcaagcgcccugggaaagcugcaggacguggucaaccagaaugcccaggcacugaacacccuggucaagcagcuguccuccaacuucggcgccaucagcucugugcugaacgauauccuggccagacuggacaaggucgaggccgaggugcagaucgacagacugaucacaggcagacugcagagccuccagacauacgugacccagcagcugaucagagccgccgagauuagagccucugccaaucuggccgccaccaagaugucugagugugugcugggccagagcaagagaguggacuuuugcggcaagggcuaccaccugaugagcuucccucagucugccccucacggcgugguguuucugcacgugacauaugugcccgcucaagagaagaauuucaccaccgcuccagccaucugccacgacggcaaagcccacuuuccuagagaaggcguguucguguccaacggcacccauugguucgugacacagcggaacuucuacgagccccagaucaucaccacccacaacaccuucgugucuggcaacugcgacgucgugaucggcauugugaacaauaccguguacgacccucugcagcccgagcuggacagcuucaaagaggaacuggacaaguacuuuaagaaccacacaagccccgacguggaccugggcgauaucagcggaaucaaugccagcgucgugaacauccagaaagagaucgaccggcugaacgagguggccaagaaucugaacgagagccugaucgaccugcaagaacuggggaaguacgagcaguacaucaaguggcccugguacaucuggcugggcuuuaucgccggacugauugccaucgugauggucacaaucaugcuguguugcaugaccagcugcuguagcugccugaagggcuguuguagcuguggcagcugcugcaaguucgacgaggacgauucugagcccgugcugaagggcgugaaacugcacuacacaugaugacucgagcugguacugcaugcacgcaaugcuagcugccccuuucccguccuggguaccccgagucucccccgaccucgggucccagguaugcucccaccuccaccugccccacucaccaccucugcuaguuccagacaccucccaagcacgcagcaaugcagcucaaaacgcuuagccuagccacacccccacgggaaacagcagugauuaaccuuuagcaauaaacgaaaguuuaacuaagcuauacuaaccccaggguuggucaauuucgugccagccacacccuggagcuagcaaaaaaaaaaaaaaaaaaaaaaaaaaaaaagcauaugacuaaaaaaaaaaaaaaaaaaaaaaaaaaaaaaaaaaaaaaaaaaaaaaaaaaaaaaaaaaaaaaaaaaaaaa

SEQ ID NO: 26812 - RNA, 4283 nt, Artificial Sequence
  SARS-CoV-2/Wuhan/WIV05/2019__EPI_ISL_402128 spike protein mRNA gc mod (1-1273)(K417N_E484K_N501Y_D614G)
agaauaaacuaguauucuucugguccccacagacucagagagaacccgccaccauguucguguuccuggugcugcugccucugguguccagccagugugugaaccugaccaccagaacacagcugccuccagccuacaccaacagcuuuaccagaggcguguacuaccccgacaagguguucagauccagcgugcugcacucuacccaggaccuguuccugccuuucuucagcaacgugaccugguuccacgccauccacguguccggcaccaauggcaccaagagauucgacaaccccgugcugcccuucaacgacgggguguacuuugccagcaccgagaaguccaacaucaucagaggcuggaucuucggcaccacacuggacagcaagacccagagccugcugaucgugaacaacgccaccaacguggucaucaaagugugcgaguuccaguucugcaacgaccccuuccugggcgucuacuaccacaagaacaacaagagcuggauggaaagcgaguuccggguguacagcagcgccaacaacugcaccuucgaguacgugucccagccuuuccugauggaccuggaaggcaagcagggcaacuucaagaaccugcgcgaguucguguuuaagaacaucgacggcuacuucaagaucuacagcaagcacaccccuaucaaccucgugcgggaucugccucagggcuucucugcucuggaaccccugguggaucugcccaucggcaucaacaucacccgguuucagacacugcuggcccugcacagaagcuaccugacaccuggcgauagcagcagcggauggacagcuggugccgccgcuuacuaugugggcuaccugcagccuagaaccuuccugcugaaguacaacgagaacggcaccaucaccgacgccguggauugugcucuggauccucugagcgagacaaagugcacccugaaguccuucaccguggaaaagggcaucuaccagaccagcaacuuccgggugcagcccaccgaauccaucgugcgguuccccaauaucaccaaucugugccccuucggcgagguguucaaugccaccagauucgccucuguguacgccuggaaccggaagcggaucagcaauugcguggccgacuacuccgugcuguacaacuccgccagcuucagcaccuucaagugcuacggcguguccccuaccaagcugaacgaccugugcuucacaaacguguacgccgacagcuucgugauccggggagaugaagugcggcagauugccccuggacagacaggcaacaucgccgacuacaacuacaagcugcccgacgacuucaccggcugugugauugccuggaacagcaacaaccuggacuccaaagucggcggcaacuacaauuaccuguaccggcuguuccggaaguccaaucugaagcccuucgagcgggacaucuccaccgagaucuaucaggccggcagcaccccuuguaacggcgugaagggcuucaacugcuacuucccacugcaguccuacggcuuucagcccacauacggcgugggcuaucagcccuacagagugguggugcugagcuucgaacugcugcaugccccugccacagugugcggcccuaagaaaagcaccaaucucgugaagaacaaaugcgugaacuucaacuucaacggccugaccggcaccggcgugcugacagagagcaacaagaaguuccugccauuccagcaguuuggccgggauaucgccgauaccacagacgccguuagagauccccagacacuggaaauccuggacaucaccccuugcagcuucggcggagugucugugaucaccccuggcaccaacaccagcaaucagguggcagugcuguaccagggcgugaacuguaccgaagugcccguggccauucacgccgaucagcugacaccuacauggcggguguacuccaccggcagcaauguguuucagaccagagccggcugucugaucggagccgagcacgugaacaauagcuacgagugcgacauccccaucggcgcuggaaucugcgccagcuaccagacacagacaaacagcccucggagagccagaagcguggccagccagagcaucauugccuacacaaugucucugggcgccgagaacagcguggccuacuccaacaacucuaucgcuauccccaccaacuucaccaucagcgugaccacagagauccugccuguguccaugaccaagaccagcguggacugcaccauguacaucugcggcgauuccaccgagugcuccaaccugcugcugcaguacggcagcuucugcacccagcugaauagagcccugacagggaucgccguggaacaggacaagaacacccaagagguguucgcccaagugaagcagaucuacaagaccccuccuaucaaggacuucggcggcuucaauuucagccagauucugcccgauccuagcaagcccagcaagcggagcuucaucgaggaccugcuguucaacaaagugacacuggccgacgccggcuucaucaagcaguauggcgauugucugggcgacauugccgccagggaucugauuugcgcccagaaguuuaacggacugacagugcugccuccucugcugaccgaugagaugaucgcccaguacacaucugcccugcuggccggcacaaucacaagcggcuggacauuuggagcaggcgccgcucugcagauccccuuugcuaugcagauggccuaccgguucaacggcaucggagugacccagaaugugcuguacgagaaccagaagcugaucgccaaccaguucaacagcgccaucggcaagauccaggacagccugagcagcacagcaagcgcccugggaaagcugcaggacguggucaaccagaaugcccaggcacugaacacccuggucaagcagcuguccuccaacuucggcgccaucagcucugugcugaacgauauccugagcagacuggacaaggucgaggccgaggugcagaucgacagacugaucacaggcagacugcagagccuccagacauacgugacccagcagcugaucagagccgccgagauuagagccucugccaaucuggccgccaccaagaugucugagugugugcugggccagagcaagagaguggacuuuugcggcaagggcuaccaccugaugagcuucccucagucugccccucacggcgugguguuucugcacgugacauaugugcccgcucaagagaagaauuucaccaccgcuccagccaucugccacgacggcaaagcccacuuuccuagagaaggcguguucguguccaacggcacccauugguucgugacacagcggaacuucuacgagccccagaucaucaccaccgacaacaccuucgugucuggcaacugcgacgucgugaucggcauugugaacaauaccguguacgacccucugcagcccgagcuggacagcuucaaagaggaacuggacaaguacuuuaagaaccacacaagccccgacguggaccugggcgauaucagcggaaucaaugccagcgucgugaacauccagaaagagaucgaccggcugaacgagguggccaagaaucugaacgagagccugaucgaccugcaagaacuggggaaguacgagcaguacaucaaguggcccugguacaucuggcugggcuuuaucgccggacugauugccaucgugauggucacaaucaugcuguguugcaugaccagcugcuguagcugccugaagggcuguuguagcuguggcagcugcugcaaguucgacgaggacgauucugagcccgugcugaagggcgugaaacugcacuacacaugaugacucgagcugguacugcaugcacgcaaugcuagcugccccuuucccguccuggguaccccgagucucccccgaccucgggucccagguaugcucccaccuccaccugccccacucaccaccucugcuaguuccagacaccucccaagcacgcagcaaugcagcucaaaacgcuuagccuagccacacccccacgggaaacagcagugauuaaccuuuagcaauaaacgaaaguuuaacuaagcuauacuaaccccaggguuggucaauuucgugccagccacacccuggagcuagcaaaaaaaaaaaaaaaaaaaaaaaaaaaaaagcauaugacuaaaaaaaaaaaaaaaaaaaaaaaaaaaaaaaaaaaaaaaaaaaaaaaaaaaaaaaaaaaaaaaaaaaaaa

SEQ ID NO: 26813 - RNA, 4274 nt, Artificial Sequence
  SARS-CoV-2/Wuhan/WIV05/2019__EPI_ISL_402128 spike protein mRNA gc mod (1-1273)(L18F_D80A_D215G_L242del_A243del_L244del_R246I_K417N_E484 K_N501Y_D614G_A701V)
agaauaaacuaguauucuucugguccccacagacucagagagaacccgccaccauguucguguuccuggugcugcugccucugguguccagccagugugugaacuucaccaccagaacacagcugccuccagccuacaccaacagcuuuaccagaggcguguacuaccccgacaagguguucagauccagcgugcugcacucuacccaggaccuguuccugccuuucuucagcaacgugaccugguuccacgccauccacguguccggcaccaauggcaccaagagauucgccaaccccgugcugcccuucaacgacgggguguacuuugccagcaccgagaaguccaacaucaucagaggcuggaucuucggcaccacacuggacagcaagacccagagccugcugaucgugaacaacgccaccaacguggucaucaaagugugcgaguuccaguucugcaacgaccccuuccugggcgucuacuaccacaagaacaacaagagcuggauggaaagcgaguuccggguguacagcagcgccaacaacugcaccuucgaguacgugucccagccuuuccugauggaccuggaaggcaagcagggcaacuucaagaaccugcgcgaguucguguuuaagaacaucgacggcuacuucaagaucuacagcaagcacaccccuaucaaccucgugcggggccugccucagggcuucucugcucuggaaccccugguggaucugcccaucggcaucaacaucacccgguuucagacacugcacaucagcuaccugacaccuggcgauagcagcagcggauggacagcuggugccgccgcuuacuaugugggcuaccugcagccuagaaccuuccugcugaaguacaacgagaacggcaccaucaccgacgccguggauugugcucuggauccucugagcgagacaaagugcacccugaaguccuucaccguggaaaagggcaucuaccagaccagcaacuuccgggugcagcccaccgaauccaucgugcgguuccccaauaucaccaaucugugccccuucggcgagguguucaaugccaccagauucgccucuguguacgccuggaaccggaagcggaucagcaauugcguggccgacuacuccgugcuguacaacuccgccagcuucagcaccuucaagugcuacggcguguccccuaccaagcugaacgaccugugcuucacaaacguguacgccgacagcuucgugauccggggagaugaagugcggcagauugccccuggacagacaggcaacaucgccgacuacaacuacaagcugcccgacgacuucaccggcugugugauugccuggaacagcaacaaccuggacuccaaagucggcggcaacuacaauuaccuguaccggcuguuccggaaguccaaucugaagcccuucgagcgggacaucuccaccgagaucuaucaggccggcagcaccccuuguaacggcgugaagggcuucaacugcuacuucccacugcaguccuacggcuuucagcccacauacggcgugggcuaucagcccuacagagugguggugcugagcuucgaacugcugcaugccccugccacagugugcggcccuaagaaaagcaccaaucucgugaagaacaaaugcgugaacuucaacuucaacggccugaccggcaccggcgugcugacagagagcaacaagaaguuccugccauuccagcaguuuggccgggauaucgccgauaccacagacgccguuagagauccccagacacuggaaauccuggacaucaccccuugcagcuucggcggagugucugugaucaccccuggcaccaacaccagcaaucagguggcagugcuguaccagggcgugaacuguaccgaagugcccguggccauucacgccgaucagcugacaccuacauggcggguguacuccaccggcagcaauguguuucagaccagagccggcugucugaucggagccgagcacgugaacaauagcuacgagugcgacauccccaucggcgcuggaaucugcgccagcuaccagacacagacaaacagcccucggagagccagaagcguggccagccagagcaucauugccuacacaaugucucugggcguggagaacagcguggccuacuccaacaacucuaucgcuauccccaccaacuucaccaucagcgugaccacagagauccugccuguguccaugaccaagaccagcguggacugcaccauguacaucugcggcgauuccaccgagugcuccaaccugcugcugcaguacggcagcuucugcacccagcugaauagagcccugacagggaucgccguggaacaggacaagaacacccaagagguguucgcccaagugaagcagaucuacaagaccccuccuaucaaggacuucggcggcuucaauuucagccagauucugcccgauccuagcaagcccagcaagcggagcuucaucgaggaccugcuguucaacaaagugacacuggccgacgccggcuucaucaagcaguauggcgauugucugggcgacauugccgccagggaucugauuugcgcccagaaguuuaacggacugacagugcugccuccucugcugaccgaugagaugaucgcccaguacacaucugcccugcuggccggcacaaucacaagcggcuggacauuuggagcaggcgccgcucugcagauccccuuugcuaugcagauggccuaccgguucaacggcaucggagugacccagaaugugcuguacgagaaccagaagcugaucgccaaccaguucaacagcgccaucggcaagauccaggacagccugagcagcacagcaagcgcccugggaaagcugcaggacguggucaaccagaaugcccaggcacugaacacccuggucaagcagcuguccuccaacuucggcgccaucagcucugugcugaacgauauccugagcagacuggacaaggucgaggccgaggugcagaucgacagacugaucacaggcagacugcagagccuccagacauacgugacccagcagcugaucagagccgccgagauuagagccucugccaaucuggccgccaccaagaugucugagugugugcugggccagagcaagagaguggacuuuugcggcaagggcuaccaccugaugagcuucccucagucugccccucacggcgugguguuucugcacgugacauaugugcccgcucaagagaagaauuucaccaccgcuccagccaucugccacgacggcaaagcccacuuuccuagagaaggcguguucguguccaacggcacccauugguucgugacacagcggaacuucuacgagccccagaucaucaccaccgacaacaccuucgugucuggcaacugcgacgucgugaucggcauugugaacaauaccguguacgacccucugcagcccgagcuggacagcuucaaagaggaacuggacaaguacuuuaagaaccacacaagccccgacguggaccugggcgauaucagcggaaucaaugccagcgucgugaacauccagaaagagaucgaccggcugaacgagguggccaagaaucugaacgagagccugaucgaccugcaagaacuggggaaguacgagcaguacaucaaguggcccugguacaucuggcugggcuuuaucgccggacugauugccaucgugauggucacaaucaugcuguguugcaugaccagcugcuguagcugccugaagggcuguuguagcuguggcagcugcugcaaguucgacgaggacgauucugagcccgugcugaagggcgugaaacugcacuacacaugaugacucgagcugguacugcaugcacgcaaugcuagcugccccuuucccguccuggguaccccgagucucccccgaccucgggucccagguaugcucccaccuccaccugccccacucaccaccucugcuaguuccagacaccucccaagcacgcagcaaugcagcucaaaacgcuuagccuagccacacccccacgggaaacagcagugauuaaccuuuagcaauaaacgaaaguuuaacuaagcuauacuaaccccaggguuggucaauuucgugccagccacacccuggagcuagcaaaaaaaaaaaaaaaaaaaaaaaaaaaaaagcauaugacuaaaaaaaaaaaaaaaaaaaaaaaaaaaaaaaaaaaaaaaaaaaaaaaaaaaaaaaaaaaaaaaaaaaaaa

SEQ ID NO: 26814 - RNA, 4283 nt, Artificial Sequence
  SARS-CoV-2/Wuhan/WIV05/2019__EPI_ISL_402128 spike protein mRNA gc mod (1-1273)(E484K_D614G)
agaauaaacuaguauucuucugguccccacagacucagagagaacccgccaccauguucguguuccuggugcugcugccucugguguccagccagugugugaaccugaccaccagaacacagcugccuccagccuacaccaacagcuuuaccagaggcguguacuaccccgacaagguguucagauccagcgugcugcacucuacccaggaccuguuccugccuuucuucagcaacgugaccugguuccacgccauccacguguccggcaccaauggcaccaagagauucgacaaccccgugcugcccuucaacgacgggguguacuuugccagcaccgagaaguccaacaucaucagaggcuggaucuucggcaccacacuggacagcaagacccagagccugcugaucgugaacaacgccaccaacguggucaucaaagugugcgaguuccaguucugcaacgaccccuuccugggcgucuacuaccacaagaacaacaagagcuggauggaaagcgaguuccggguguacagcagcgccaacaacugcaccuucgaguacgugucccagccuuuccugauggaccuggaaggcaagcagggcaacuucaagaaccugcgcgaguucguguuuaagaacaucgacggcuacuucaagaucuacagcaagcacaccccuaucaaccucgugcgggaucugccucagggcuucucugcucuggaaccccugguggaucugcccaucggcaucaacaucacccgguuucagacacugcuggcccugcacagaagcuaccugacaccuggcgauagcagcagcggauggacagcuggugccgccgcuuacuaugugggcuaccugcagccuagaaccuuccugcugaaguacaacgagaacggcaccaucaccgacgccguggauugugcucuggauccucugagcgagacaaagugcacccugaaguccuucaccguggaaaagggcaucuaccagaccagcaacuuccgggugcagcccaccgaauccaucgugcgguuccccaauaucaccaaucugugccccuucggcgagguguucaaugccaccagauucgccucuguguacgccuggaaccggaagcggaucagcaauugcguggccgacuacuccgugcuguacaacuccgccagcuucagcaccuucaagugcuacggcguguccccuaccaagcugaacgaccugugcuucacaaacguguacgccgacagcuucgugauccggggagaugaagugcggcagauugccccuggacagacaggcaagaucgccgacuacaacuacaagcugcccgacgacuucaccggcugugugauugccuggaacagcaacaaccuggacuccaaagucggcggcaacuacaauuaccuguaccggcuguuccggaaguccaaucugaagcccuucgagcgggacaucuccaccgagaucuaucaggccggcagcaccccuuguaacggcgugaagggcuucaacugcuacuucccacugcaguccuacggcuuucagcccacaaauggcgugggcuaucagcccuacagagugguggugcugagcuucgaacugcugcaugccccugccacagugugcggcccuaagaaaagcaccaaucucgugaagaacaaaugcgugaacuucaacuucaacggccugaccggcaccggcgugcugacagagagcaacaagaaguuccugccauuccagcaguuuggccgggauaucgccgauaccacagacgccguuagagauccccagacacuggaaauccuggacaucaccccuugcagcuucggcggagugucugugaucaccccuggcaccaacaccagcaaucagguggcagugcuguaccagggcgugaacuguaccgaagugcccguggccauucacgccgaucagcugacaccuacauggcggguguacuccaccggcagcaauguguuucagaccagagccggcugucugaucggagccgagcacgugaacaauagcuacgagugcgacauccccaucggcgcuggaaucugcgccagcuaccagacacagacaaacagcccucggagagccagaagcguggccagccagagcaucauugccuacacaaugucucugggcgccgagaacagcguggccuacuccaacaacucuaucgcuauccccaccaacuucaccaucagcgugaccacagagauccugccuguguccaugaccaagaccagcguggacugcaccauguacaucugcggcgauuccaccgagugcuccaaccugcugcugcaguacggcagcuucugcacccagcugaauagagcccugacagggaucgccguggaacaggacaagaacacccaagagguguucgcccaagugaagcagaucuacaagaccccuccuaucaaggacuucggcggcuucaauuucagccagauucugcccgauccuagcaagcccagcaagcggagcuucaucgaggaccugcuguucaacaaagugacacuggccgacgccggcuucaucaagcaguauggcgauugucugggcgacauugccgccagggaucugauuugcgcccagaaguuuaacggacugacagugcugccuccucugcugaccgaugagaugaucgcccaguacacaucugcccugcuggccggcacaaucacaagcggcuggacauuuggagcaggcgccgcucugcagauccccuuugcuaugcagauggccuaccgguucaacggcaucggagugacccagaaugugcuguacgagaaccagaagcugaucgccaaccaguucaacagcgccaucggcaagauccaggacagccugagcagcacagcaagcgcccugggaaagcugcaggacguggucaaccagaaugcccaggcacugaacacccuggucaagcagcuguccuccaacuucggcgccaucagcucugugcugaacgauauccugagcagacuggacaaggucgaggccgaggugcagaucgacagacugaucacaggcagacugcagagccuccagacauacgugacccagcagcugaucagagccgccgagauuagagccucugccaaucuggccgccaccaagaugucugagugugugcugggccagagcaagagaguggacuuuugcggcaagggcuaccaccugaugagcuucccucagucugccccucacggcgugguguuucugcacgugacauaugugcccgcucaagagaagaauuucaccaccgcuccagccaucugccacgacggcaaagcccacuuuccuagagaaggcguguucguguccaacggcacccauugguucgugacacagcggaacuucuacgagccccagaucaucaccaccgacaacaccuucgugucuggcaacugcgacgucgugaucggcauugugaacaauaccguguacgacccucugcagcccgagcuggacagcuucaaagaggaacuggacaaguacuuuaagaaccacacaagccccgacguggaccugggcgauaucagcggaaucaaugccagcgucgugaacauccagaaagagaucgaccggcugaacgagguggccaagaaucugaacgagagccugaucgaccugcaagaacuggggaaguacgagcaguacaucaaguggcccugguacaucuggcugggcuuuaucgccggacugauugccaucgugauggucacaaucaugcuguguugcaugaccagcugcuguagcugccugaagggcuguuguagcuguggcagcugcugcaaguucgacgaggacgauucugagcccgugcugaagggcgugaaacugcacuacacaugaugacucgagcugguacugcaugcacgcaaugcuagcugccccuuucccguccuggguaccccgagucucccccgaccucgggucccagguaugcucccaccuccaccugccccacucaccaccucugcuaguuccagacaccucccaagcacgcagcaaugcagcucaaaacgcuuagccuagccacacccccacgggaaacagcagugauuaaccuuuagcaauaaacgaaaguuuaacuaagcuauacuaaccccaggguuggucaauuucgugccagccacacccuggagcuagcaaaaaaaaaaaaaaaaaaaaaaaaaaaaaagcauaugacuaaaaaaaaaaaaaaaaaaaaaaaaaaaaaaaaaaaaaaaaaaaaaaaaaaaaaaaaaaaaaaaaaaaaaa

SEQ ID NO: 26815 - RNA, 4283 nt, Artificial Sequence
  SARS-CoV-2/Wuhan/WIV05/2019__EPI_ISL_402128 spike protein mRNA gc mod (1-1273)(L18F_T20N_P26S_D138Y_R190S_K417T_E484K_N501Y_D614G_H655Y _T1027I)
agaauaaacuaguauucuucugguccccacagacucagagagaacccgccaccauguucguguuccuggugcugcugccucugguguccagccagugugugaacuucaccaacagaacacagcugccuagcgccuacaccaacagcuuuaccagaggcguguacuaccccgacaagguguucagauccagcgugcugcacucuacccaggaccuguuccugccuuucuucagcaacgugaccugguuccacgccauccacguguccggcaccaauggcaccaagagauucgacaaccccgugcugcccuucaacgacgggguguacuuugccagcaccgagaaguccaacaucaucagaggcuggaucuucggcaccacacuggacagcaagacccagagccugcugaucgugaacaacgccaccaacguggucaucaaagugugcgaguuccaguucugcaacuaccccuuccugggcgucuacuaccacaagaacaacaagagcuggauggaaagcgaguuccggguguacagcagcgccaacaacugcaccuucgaguacgugucccagccuuuccugauggaccuggaaggcaagcagggcaacuucaagaaccugagcgaguucguguuuaagaacaucgacggcuacuucaagaucuacagcaagcacaccccuaucaaccucgugcgggaucugccucagggcuucucugcucuggaaccccugguggaucugcccaucggcaucaacaucacccgguuucagacacugcuggcccugcacagaagcuaccugacaccuggcgauagcagcagcggauggacagcuggugccgccgcuuacuaugugggcuaccugcagccuagaaccuuccugcugaaguacaacgagaacggcaccaucaccgacgccguggauugugcucuggauccucugagcgagacaaagugcacccugaaguccuucaccguggaaaagggcaucuaccagaccagcaacuuccgggugcagcccaccgaauccaucgugcgguuccccaauaucaccaaucugugccccuucggcgagguguucaaugccaccagauucgccucuguguacgccuggaaccggaagcggaucagcaauugcguggccgacuacuccgugcuguacaacuccgccagcuucagcaccuucaagugcuacggcguguccccuaccaagcugaacgaccugugcuucacaaacguguacgccgacagcuucgugauccggggagaugaagugcggcagauugccccuggacagacaggcaccaucgccgacuacaacuacaagcugcccgacgacuucaccggcugugugauugccuggaacagcaacaaccuggacuccaaagucggcggcaacuacaauuaccuguaccggcuguuccggaaguccaaucugaagcccuucgagcgggacaucuccaccgagaucuaucaggccggcagcaccccuuguaacggcgugaagggcuucaacugcuacuucccacugcaguccuacggcuuucagcccacauacggcgugggcuaucagcccuacagagugguggugcugagcuucgaacugcugcaugccccugccacagugugcggcccuaagaaaagcaccaaucucgugaagaacaaaugcgugaacuucaacuucaacggccugaccggcaccggcgugcugacagagagcaacaagaaguuccugccauuccagcaguuuggccgggauaucgccgauaccacagacgccguuagagauccccagacacuggaaauccuggacaucaccccuugcagcuucggcggagugucugugaucaccccuggcaccaacaccagcaaucagguggcagugcuguaccagggcgugaacuguaccgaagugcccguggccauucacgccgaucagcugacaccuacauggcggguguacuccaccggcagcaauguguuucagaccagagccggcugucugaucggagccgaguacgugaacaauagcuacgagugcgacauccccaucggcgcuggaaucugcgccagcuaccagacacagacaaacagcccucggagagccagaagcguggccagccagagcaucauugccuacacaaugucucugggcgccgagaacagcguggccuacuccaacaacucuaucgcuauccccaccaacuucaccaucagcgugaccacagagauccugccuguguccaugaccaagaccagcguggacugcaccauguacaucugcggcgauuccaccgagugcuccaaccugcugcugcaguacggcagcuucugcacccagcugaauagagcccugacagggaucgccguggaacaggacaagaacacccaagagguguucgcccaagugaagcagaucuacaagaccccuccuaucaaggacuucggcggcuucaauuucagccagauucugcccgauccuagcaagcccagcaagcggagcuucaucgaggaccugcuguucaacaaagugacacuggccgacgccggcuucaucaagcaguauggcgauugucugggcgacauugccgccagggaucugauuugcgcccagaaguuuaacggacugacagugcugccuccucugcugaccgaugagaugaucgcccaguacacaucugcccugcuggccggcacaaucacaagcggcuggacauuuggagcaggcgccgcucugcagauccccuuugcuaugcagauggccuaccgguucaacggcaucggagugacccagaaugugcuguacgagaaccagaagcugaucgccaaccaguucaacagcgccaucggcaagauccaggacagccugagcagcacagcaagcgcccugggaaagcugcaggacguggucaaccagaaugcccaggcacugaacacccuggucaagcagcuguccuccaacuucggcgccaucagcucugugcugaacgauauccugagcagacuggacaaggucgaggccgaggugcagaucgacagacugaucacaggcagacugcagagccuccagacauacgugacccagcagcugaucagagccgccgagauuagagccucugccaaucuggccgccaucaagaugucugagugugugcugggccagagcaagagaguggacuuuugcggcaagggcuaccaccugaugagcuucccucagucugccccucacggcgugguguuucugcacgugacauaugugcccgcucaagagaagaauuucaccaccgcuccagccaucugccacgacggcaaagcccacuuuccuagagaaggcguguucguguccaacggcacccauugguucgugacacagcggaacuucuacgagccccagaucaucaccaccgacaacaccuucgugucuggcaacugcgacgucgugaucggcauugugaacaauaccguguacgacccucugcagcccgagcuggacagcuucaaagaggaacuggacaaguacuuuaagaaccacacaagccccgacguggaccugggcgauaucagcggaaucaaugccagcgucgugaacauccagaaagagaucgaccggcugaacgagguggccaagaaucugaacgagagccugaucgaccugcaagaacuggggaaguacgagcaguacaucaaguggcccugguacaucuggcugggcuuuaucgccggacugauugccaucgugauggucacaaucaugcuguguugcaugaccagcugcuguagcugccugaagggcuguuguagcuguggcagcugcugcaaguucgacgaggacgauucugagcccgugcugaagggcgugaaacugcacuacacaugaugacucgagcugguacugcaugcacgcaaugcuagcugccccuuucccguccuggguaccccgagucucccccgaccucgggucccagguaugcucccaccuccaccugccccacucaccaccucugcuaguuccagacaccucccaagcacgcagcaaugcagcucaaaacgcuuagccuagccacacccccacgggaaacagcagugauuaaccuuuagcaauaaacgaaaguuuaacuaagcuauacuaaccccaggguuggucaauuucgugccagccacacccuggagcuagcaaaaaaaaaaaaaaaaaaaaaaaaaaaaaagcauaugacuaaaaaaaaaaaaaaaaaaaaaaaaaaaaaaaaaaaaaaaaaaaaaaaaaaaaaaaaaaaaaaaaaaaaaa

SEQ ID NO: 26816 - RNA, 4283 nt, Artificial Sequence
  SARS-CoV-2/Wuhan/WIV05/2019__EPI_ISL_402128 spike protein mRNA gc mod (1-1273)(S13I_W152C_L452R_D614G)
agaauaaacuaguauucuucugguccccacagacucagagagaacccgccaccauguucguguuccuggugcugcugccucugguguccauccagugugugaaccugaccaccagaacacagcugccuccagccuacaccaacagcuuuaccagaggcguguacuaccccgacaagguguucagauccagcgugcugcacucuacccaggaccuguuccugccuuucuucagcaacgugaccugguuccacgccauccacguguccggcaccaauggcaccaagagauucgacaaccccgugcugcccuucaacgacgggguguacuuugccagcaccgagaaguccaacaucaucagaggcuggaucuucggcaccacacuggacagcaagacccagagccugcugaucgugaacaacgccaccaacguggucaucaaagugugcgaguuccaguucugcaacgaccccuuccugggcgucuacuaccacaagaacaacaagagcugcauggaaagcgaguuccggguguacagcagcgccaacaacugcaccuucgaguacgugucccagccuuuccugauggaccuggaaggcaagcagggcaacuucaagaaccugcgcgaguucguguuuaagaacaucgacggcuacuucaagaucuacagcaagcacaccccuaucaaccucgugcgggaucugccucagggcuucucugcucuggaaccccugguggaucugcccaucggcaucaacaucacccgguuucagacacugcuggcccugcacagaagcuaccugacaccuggcgauagcagcagcggauggacagcuggugccgccgcuuacuaugugggcuaccugcagccuagaaccuuccugcugaaguacaacgagaacggcaccaucaccgacgccguggauugugcucuggauccucugagcgagacaaagugcacccugaaguccuucaccguggaaaagggcaucuaccagaccagcaacuuccgggugcagcccaccgaauccaucgugcgguuccccaauaucaccaaucugugccccuucggcgagguguucaaugccaccagauucgccucuguguacgccuggaaccggaagcggaucagcaauugcguggccgacuacuccgugcuguacaacuccgccagcuucagcaccuucaagugcuacggcguguccccuaccaagcugaacgaccugugcuucacaaacguguacgccgacagcuucgugauccggggagaugaagugcggcagauugccccuggacagacaggcaagaucgccgacuacaacuacaagcugcccgacgacuucaccggcugugugauugccuggaacagcaacaaccuggacuccaaagucggcggcaacuacaauuaccgcuaccggcuguuccggaaguccaaucugaagcccuucgagcgggacaucuccaccgagaucuaucaggccggcagcaccccuuguaacggcguggaaggcuucaacugcuacuucccacugcaguccuacggcuuucagcccacaaauggcgugggcuaucagcccuacagagugguggugcugagcuucgaacugcugcaugccccugccacagugugcggcccuaagaaaagcaccaaucucgugaagaacaaaugcgugaacuucaacuucaacggccugaccggcaccggcgugcugacagagagcaacaagaaguuccugccauuccagcaguuuggccgggauaucgccgauaccacagacgccguuagagauccccagacacuggaaauccuggacaucaccccuugcagcuucggcggagugucugugaucaccccuggcaccaacaccagcaaucagguggcagugcuguaccagggcgugaacuguaccgaagugcccguggccauucacgccgaucagcugacaccuacauggcggguguacuccaccggcagcaauguguuucagaccagagccggcugucugaucggagccgagcacgugaacaauagcuacgagugcgacauccccaucggcgcuggaaucugcgccagcuaccagacacagacaaacagcccucggagagccagaagcguggccagccagagcaucauugccuacacaaugucucugggcgccgagaacagcguggccuacuccaacaacucuaucgcuauccccaccaacuucaccaucagcgugaccacagagauccugccuguguccaugaccaagaccagcguggacugcaccauguacaucugcggcgauuccaccgagugcuccaaccugcugcugcaguacggcagcuucugcacccagcugaauagagcccugacagggaucgccguggaacaggacaagaacacccaagagguguucgcccaagugaagcagaucuacaagaccccuccuaucaaggacuucggcggcuucaauuucagccagauucugcccgauccuagcaagcccagcaagcggagcuucaucgaggaccugcuguucaacaaagugacacuggccgacgccggcuucaucaagcaguauggcgauugucugggcgacauugccgccagggaucugauuugcgcccagaaguuuaacggacugacagugcugccuccucugcugaccgaugagaugaucgcccaguacacaucugcccugcuggccggcacaaucacaagcggcuggacauuuggagcaggcgccgcucugcagauccccuuugcuaugcagauggccuaccgguucaacggcaucggagugacccagaaugugcuguacgagaaccagaagcugaucgccaaccaguucaacagcgccaucggcaagauccaggacagccugagcagcacagcaagcgcccugggaaagcugcaggacguggucaaccagaaugcccaggcacugaacacccuggucaagcagcuguccuccaacuucggcgccaucagcucugugcugaacgauauccugagcagacuggacaaggucgaggccgaggugcagaucgacagacugaucacaggcagacugcagagccuccagacauacgugacccagcagcugaucagagccgccgagauuagagccucugccaaucuggccgccaccaagaugucugagugugugcugggccagagcaagagaguggacuuuugcggcaagggcuaccaccugaugagcuucccucagucugccccucacggcgugguguuucugcacgugacauaugugcccgcucaagagaagaauuucaccaccgcuccagccaucugccacgacggcaaagcccacuuuccuagagaaggcguguucguguccaacggcacccauugguucgugacacagcggaacuucuacgagccccagaucaucaccaccgacaacaccuucgugucuggcaacugcgacgucgugaucggcauugugaacaauaccguguacgacccucugcagcccgagcuggacagcuucaaagaggaacuggacaaguacuuuaagaaccacacaagccccgacguggaccugggcgauaucagcggaaucaaugccagcgucgugaacauccagaaagagaucgaccggcugaacgagguggccaagaaucugaacgagagccugaucgaccugcaagaacuggggaaguacgagcaguacaucaaguggcccugguacaucuggcugggcuuuaucgccggacugauugccaucgugauggucacaaucaugcuguguugcaugaccagcugcuguagcugccugaagggcuguuguagcuguggcagcugcugcaaguucgacgaggacgauucugagcccgugcugaagggcgugaaacugcacuacacaugaugacucgagcugguacugcaugcacgcaaugcuagcugccccuuucccguccuggguaccccgagucucccccgaccucgggucccagguaugcucccaccuccaccugccccacucaccaccucugcuaguuccagacaccucccaagcacgcagcaaugcagcucaaaacgcuuagccuagccacacccccacgggaaacagcagugauuaaccuuuagcaauaaacgaaaguuuaacuaagcuauacuaaccccaggguuggucaauuucgugccagccacacccuggagcuagcaaaaaaaaaaaaaaaaaaaaaaaaaaaaaagcauaugacuaaaaaaaaaaaaaaaaaaaaaaaaaaaaaaaaaaaaaaaaaaaaaaaaaaaaaaaaaaaaaaaaaaaaaa

SEQ ID NO: 26817 - RNA, 4283 nt, Artificial Sequence
  SARS-CoV-2/Wuhan/WIV05/2019__EPI_ISL_402128 spike protein mRNA gc (1-1273)(K986P_V987P)
agaauaaacuaguauucuucugguccccacagacucagagagaacccgccaccauguucguguuccugguccuccugccccuggugagcucccagugcgugaaccucaccacccgcacgcagcugccgcccgccuacaccaacagcuucacccggggcgucuacuaccccgacaagguguuccgcuccagcgugcugcacuccacccaggaccucuuccugcccuucuucagcaacgucacgugguuccacgccauccacguguccgggaccaacggcaccaagcgguucgacaacccggugcugcccuucaacgacggggucuacuucgcgagcaccgagaaguccaacaucauccgcggcuggaucuucgggacgacccucgacagcaagacccagucccugcugaucgugaacaacgccaccaacguggucaucaaggugugcgaguuccaguucugcaacgaccccuuccucggcguguacuaccacaagaacaacaagagcuggauggaguccgaguuccgggucuacagcuccgccaacaacugcacguucgaguacgugagccagcccuuccugauggaccuggagggcaagcaggggaacuucaagaaccuccgcgaguucguguucaagaacaucgacggcuacuucaagaucuacuccaagcacaccccgaucaaccugguccgggaccugccccagggguucagcgcccucgagccccugguggaccugcccaucggcaucaacaucacccgcuuccagacccuccuggcccugcaccgguccuaccucacgccgggggacagcagcuccggcuggaccgcgggcgccgccgccuacuacgugggguaccugcagccccgcaccuuccugcucaaguacaacgagaacggcaccaucacggacgcggucgacugcgcccuggacccccugagcgagaccaagugcacccucaaguccuucaccguggagaaggggaucuaccagacgagcaacuuccgggugcagcccaccgaguccaucguccgcuucccgaacaucaccaaccugugccccuucggcgagguguucaacgccacccgguucgccagcgucuacgccuggaaccgcaagcggaucuccaacugcguggcggacuacagcgugcuguacaacuccgccagcuucuccacguucaagugcuacggcgucagccccaccaagcucaacgaccugugcuucaccaacguguacgccgacuccuucgugauccgcggggacgagguccggcagaucgcccccggccagaccgggaagaucgccgacuacaacuacaagcugccggacgacuucacgggcugcgugaucgcguggaacagcaacaaccucgacuccaaggucgggggcaacuacaacuaccuguaccgccuguuccgcaagagcaaccucaagcccuucgagcgggacaucuccaccgagaucuaccaggccggcagcacccccugcaacgggguggagggcuucaacugcuacuucccccugcaguccuacggguuccagccgaccaacggcgugggguaccagcccuaccggguggucgugcugagcuucgagcuccugcacgcccccgccacggugugcggccccaagaaguccaccaaccuggucaagaacaagugcgugaacuucaacuucaacggccucaccgggaccggcgugcugaccgagagcaacaagaaguuccugccguuccagcaguucgggcgcgacaucgccgacacgaccgacgcgguccgcgacccccagacccuggagauccucgacaucacccccugcagcuucggcgggguguccgugaucacgccgggcaccaacaccagcaaccaggucgccgugcuguaccaggacgugaacugcaccgagguccccguggccauccacgccgaccagcugacgcccaccuggcggguguacuccaccggcagcaacgucuuccagacccgcgccgggugccucaucggcgcggagcacgugaacaacuccuacgagugcgacauccccaucggggccggcaucugcgccagcuaccagacgcagaccaacuccccgcggcgcgcccggagcguggcgucccagagcaucaucgccuacaccaugucccugggcgccgagaacagcgucgccuacuccaacaacagcaucgccauccccaccaacuucacgaucuccgugaccaccgagauccugcccgugagcaugaccaagacgagcgucgacugcaccauguacaucugcggggacuccaccgagugcagcaaccuccugcugcaguacggcuccuucugcacccagcucaaccgcgcgcugacggggaucgccguggagcaggacaagaacacccaggagguguucgcccaggucaagcagaucuacaagacgcccccgaucaaggacuucggcggguucaacuucagccagauccugcccgaccccuccaagcccagcaagcgguccuucaucgaggaccuccuguucaacaaggugacccuggccgacgccggcuucaucaagcaguacggcgacugccucggggacaucgcggcccgcgaccugaucugcgcccagaaguucaacggccugaccgugcucccgccccugcugaccgacgagaugaucgcccaguacaccagcgcccuccuggcggggaccaucacguccggcuggaccuucggggccggcgccgcccugcagauccccuucgcgaugcagauggccuaccgguucaacggcaucggggucacccagaacgugcucuacgagaaccagaagcugaucgccaaccaguucaacagcgccaucggcaagauccaggacucccugagcuccaccgccagcgcgcucgggaagcugcaggacguggucaaccagaacgcccaggcccugaacacgcucgugaagcagcuguccagcaacuucggcgccaucuccagcgugcugaacgacauccucucccgccuggacccgcccgaggccgaggugcagaucgaccggcugaucaccgggcgccuccagagccugcagaccuacgugacccagcagcugauccgggcggccgagauccgcgccagcgccaaccucgccgcgaccaagauguccgagugcguccugggccagagcaagcggguggacuucugcggcaagggguaccaccugauguccuucccccagagcgccccgcacggcguggucuuccuccacgugacguacguccccgcccaggagaagaacuucaccaccgcccccgcgaucugccacgacgggaaggcccacuucccccgcgagggcguguucguguccaacgggacccacugguucgucacgcagcggaacuucuacgagccgcagaucaucaccaccgacaacaccuucgugagcggcaacugcgacguggucaucggcaucgugaacaacacgguguacgacccccugcagcccgagcuggacuccuucaaggaggagcucgacaaguacuucaagaaccacaccagccccgacgucgaccugggggacaucuccggcaucaacgccagcguggugaacauccagaaggagaucgaccgccugaacgaggucgccaagaaccucaacgagucccugaucgaccugcaggagcucgggaaguacgagcaguacaucaaguggccgugguacaucuggcugggcuucaucgccggccugaucgcgaucgugauggugaccaucaugcucugcugcaugaccagcugcugcuccugccugaaggggugcugcagcugcggcuccugcugcaaguucgacgaggacgacagcgagcccguccugaagggggugaagcuccacuacacgugaugacucgagcugguacugcaugcacgcaaugcuagcugccccuuucccguccuggguaccccgagucucccccgaccucgggucccagguaugcucccaccuccaccugccccacucaccaccucugcuaguuccagacaccucccaagcacgcagcaaugcagcucaaaacgcuuagccuagccacacccccacgggaaacagcagugauuaaccuuuagcaauaaacgaaaguuuaacuaagcuauacuaaccccaggguuggucaauuucgugccagccacacccuggagcuagcaaaaaaaaaaaaaaaaaaaaaaaaaaaaaagcauaugacuaaaaaaaaaaaaaaaaaaaaaaaaaaaaaaaaaaaaaaaaaaaaaaaaaaaaaaaaaaaaaaaaaaaaaa

SEQ ID NO: 26818 - RNA, 4283 nt, Artificial Sequence
  SARS-CoV-2/Wuhan/WIV05/2019__EPI_ISL_402128 spike protein mRNA gc (1-1273)(K986P_V987P_ D614G)
agaauaaacuaguauucuucugguccccacagacucagagagaacccgccaccauguucguguuccugguccuccugccccuggugagcucccagugcgugaaccucaccacccgcacgcagcugccgcccgccuacaccaacagcuucacccggggcgucuacuaccccgacaagguguuccgcuccagcgugcugcacuccacccaggaccucuuccugcccuucuucagcaacgucacgugguuccacgccauccacguguccgggaccaacggcaccaagcgguucgacaacccggugcugcccuucaacgacggggucuacuucgcgagcaccgagaaguccaacaucauccgcggcuggaucuucgggacgacccucgacagcaagacccagucccugcugaucgugaacaacgccaccaacguggucaucaaggugugcgaguuccaguucugcaacgaccccuuccucggcguguacuaccacaagaacaacaagagcuggauggaguccgaguuccgggucuacagcuccgccaacaacugcacguucgaguacgugagccagcccuuccugauggaccuggagggcaagcaggggaacuucaagaaccuccgcgaguucguguucaagaacaucgacggcuacuucaagaucuacuccaagcacaccccgaucaaccugguccgggaccugccccagggguucagcgcccucgagccccugguggaccugcccaucggcaucaacaucacccgcuuccagacccuccuggcccugcaccgguccuaccucacgccgggggacagcagcuccggcuggaccgcgggcgccgccgccuacuacgugggguaccugcagccccgcaccuuccugcucaaguacaacgagaacggcaccaucacggacgcggucgacugcgcccuggacccccugagcgagaccaagugcacccucaaguccuucaccguggagaaggggaucuaccagacgagcaacuuccgggugcagcccaccgaguccaucguccgcuucccgaacaucaccaaccugugccccuucggcgagguguucaacgccacccgguucgccagcgucuacgccuggaaccgcaagcggaucuccaacugcguggcggacuacagcgugcuguacaacuccgccagcuucuccacguucaagugcuacggcgucagccccaccaagcucaacgaccugugcuucaccaacguguacgccgacuccuucgugauccgcggggacgagguccggcagaucgcccccggccagaccgggaagaucgccgacuacaacuacaagcugccggacgacuucacgggcugcgugaucgcguggaacagcaacaaccucgacuccaaggucgggggcaacuacaacuaccuguaccgccuguuccgcaagagcaaccucaagcccuucgagcgggacaucuccaccgagaucuaccaggccggcagcacccccugcaacgggguggagggcuucaacugcuacuucccccugcaguccuacggguuccagccgaccaacggcgugggguaccagcccuaccggguggucgugcugagcuucgagcuccugcacgcccccgccacggugugcggccccaagaaguccaccaaccuggucaagaacaagugcgugaacuucaacuucaacggccucaccgggaccggcgugcugaccgagagcaacaagaaguuccugccguuccagcaguucgggcgcgacaucgccgacacgaccgacgcgguccgcgacccccagacccuggagauccucgacaucacccccugcagcuucggcgggguguccgugaucacgccgggcaccaacaccagcaaccaggucgccgugcuguaccagggcgugaacugcaccgagguccccguggccauccacgccgaccagcugacgcccaccuggcggguguacuccaccggcagcaacgucuuccagacccgcgccgggugccucaucggcgcggagcacgugaacaacuccuacgagugcgacauccccaucggggccggcaucugcgccagcuaccagacgcagaccaacuccccgcggcgcgcccggagcguggcgucccagagcaucaucgccuacaccaugucccugggcgccgagaacagcgucgccuacuccaacaacagcaucgccauccccaccaacuucacgaucuccgugaccaccgagauccugcccgugagcaugaccaagacgagcgucgacugcaccauguacaucugcggggacuccaccgagugcagcaaccuccugcugcaguacggcuccuucugcacccagcucaaccgcgcgcugacggggaucgccguggagcaggacaagaacacccaggagguguucgcccaggucaagcagaucuacaagacgcccccgaucaaggacuucggcggguucaacuucagccagauccugcccgaccccuccaagcccagcaagcgguccuucaucgaggaccuccuguucaacaaggugacccuggccgacgccggcuucaucaagcaguacggcgacugccucggggacaucgcggcccgcgaccugaucugcgcccagaaguucaacggccugaccgugcucccgccccugcugaccgacgagaugaucgcccaguacaccagcgcccuccuggcggggaccaucacguccggcuggaccuucggggccggcgccgcccugcagauccccuucgcgaugcagauggccuaccgguucaacggcaucggggucacccagaacgugcucuacgagaaccagaagcugaucgccaaccaguucaacagcgccaucggcaagauccaggacucccugagcuccaccgccagcgcgcucgggaagcugcaggacguggucaaccagaacgcccaggcccugaacacgcucgugaagcagcuguccagcaacuucggcgccaucuccagcgugcugaacgacauccucucccgccuggacccgcccgaggccgaggugcagaucgaccggcugaucaccgggcgccuccagagccugcagaccuacgugacccagcagcugauccgggcggccgagauccgcgccagcgccaaccucgccgcgaccaagauguccgagugcguccugggccagagcaagcggguggacuucugcggcaagggguaccaccugauguccuucccccagagcgccccgcacggcguggucuuccuccacgugacguacguccccgcccaggagaagaacuucaccaccgcccccgcgaucugccacgacgggaaggcccacuucccccgcgagggcguguucguguccaacgggacccacugguucgucacgcagcggaacuucuacgagccgcagaucaucaccaccgacaacaccuucgugagcggcaacugcgacguggucaucggcaucgugaacaacacgguguacgacccccugcagcccgagcuggacuccuucaaggaggagcucgacaaguacuucaagaaccacaccagccccgacgucgaccugggggacaucuccggcaucaacgccagcguggugaacauccagaaggagaucgaccgccugaacgaggucgccaagaaccucaacgagucccugaucgaccugcaggagcucgggaaguacgagcaguacaucaaguggccgugguacaucuggcugggcuucaucgccggccugaucgcgaucgugauggugaccaucaugcucugcugcaugaccagcugcugcuccugccugaaggggugcugcagcugcggcuccugcugcaaguucgacgaggacgacagcgagcccguccugaagggggugaagcuccacuacacgugaugacucgagcugguacugcaugcacgcaaugcuagcugccccuuucccguccuggguaccccgagucucccccgaccucgggucccagguaugcucccaccuccaccugccccacucaccaccucugcuaguuccagacaccucccaagcacgcagcaaugcagcucaaaacgcuuagccuagccacacccccacgggaaacagcagugauuaaccuuuagcaauaaacgaaaguuuaacuaagcuauacuaaccccaggguuggucaauuucgugccagccacacccuggagcuagcaaaaaaaaaaaaaaaaaaaaaaaaaaaaaagcauaugacuaaaaaaaaaaaaaaaaaaaaaaaaaaaaaaaaaaaaaaaaaaaaaaaaaaaaaaaaaaaaaaaaaaaaaa

SEQ ID NO: 26819 - RNA, 4283 nt, Artificial Sequence
  SARS-CoV-2/Wuhan/WIV05/2019__EPI_ISL_402128 spike protein mRNA gc (1-1273)(K986P_V987P_A222V_D614G)
agaauaaacuaguauucuucugguccccacagacucagagagaacccgccaccauguucguguuccugguccuccugccccuggugagcucccagugcgugaaccucaccacccgcacgcagcugccgcccgccuacaccaacagcuucacccggggcgucuacuaccccgacaagguguuccgcuccagcgugcugcacuccacccaggaccucuuccugcccuucuucagcaacgucacgugguuccacgccauccacguguccgggaccaacggcaccaagcgguucgacaacccggugcugcccuucaacgacggggucuacuucgcgagcaccgagaaguccaacaucauccgcggcuggaucuucgggacgacccucgacagcaagacccagucccugcugaucgugaacaacgccaccaacguggucaucaaggugugcgaguuccaguucugcaacgaccccuuccucggcguguacuaccacaagaacaacaagagcuggauggaguccgaguuccgggucuacagcuccgccaacaacugcacguucgaguacgugagccagcccuuccugauggaccuggagggcaagcaggggaacuucaagaaccuccgcgaguucguguucaagaacaucgacggcuacuucaagaucuacuccaagcacaccccgaucaaccugguccgggaccugccccagggguucagcguccucgagccccugguggaccugcccaucggcaucaacaucacccgcuuccagacccuccuggcccugcaccgguccuaccucacgccgggggacagcagcuccggcuggaccgcgggcgccgccgccuacuacgugggguaccugcagccccgcaccuuccugcucaaguacaacgagaacggcaccaucacggacgcggucgacugcgcccuggacccccugagcgagaccaagugcacccucaaguccuucaccguggagaaggggaucuaccagacgagcaacuuccgggugcagcccaccgaguccaucguccgcuucccgaacaucaccaaccugugccccuucggcgagguguucaacgccacccgguucgccagcgucuacgccuggaaccgcaagcggaucuccaacugcguggcggacuacagcgugcuguacaacuccgccagcuucuccacguucaagugcuacggcgucagccccaccaagcucaacgaccugugcuucaccaacguguacgccgacuccuucgugauccgcggggacgagguccggcagaucgcccccggccagaccgggaagaucgccgacuacaacuacaagcugccggacgacuucacgggcugcgugaucgcguggaacagcaacaaccucgacuccaaggucgggggcaacuacaacuaccuguaccgccuguuccgcaagagcaaccucaagcccuucgagcgggacaucuccaccgagaucuaccaggccggcagcacccccugcaacgggguggagggcuucaacugcuacuucccccugcaguccuacggguuccagccgaccaacggcgugggguaccagcccuaccggguggucgugcugagcuucgagcuccugcacgcccccgccacggugugcggccccaagaaguccaccaaccuggucaagaacaagugcgugaacuucaacuucaacggccucaccgggaccggcgugcugaccgagagcaacaagaaguuccugccguuccagcaguucgggcgcgacaucgccgacacgaccgacgcgguccgcgacccccagacccuggagauccucgacaucacccccugcagcuucggcgggguguccgugaucacgccgggcaccaacaccagcaaccaggucgccgugcuguaccagggcgugaacugcaccgagguccccguggccauccacgccgaccagcugacgcccaccuggcggguguacuccaccggcagcaacgucuuccagacccgcgccgggugccucaucggcgcggagcacgugaacaacuccuacgagugcgacauccccaucggggccggcaucugcgccagcuaccagacgcagaccaacuccccgcggcgcgcccggagcguggcgucccagagcaucaucgccuacaccaugucccugggcgccgagaacagcgucgccuacuccaacaacagcaucgccauccccaccaacuucacgaucuccgugaccaccgagauccugcccgugagcaugaccaagacgagcgucgacugcaccauguacaucugcggggacuccaccgagugcagcaaccuccugcugcaguacggcuccuucugcacccagcucaaccgcgcgcugacggggaucgccguggagcaggacaagaacacccaggagguguucgcccaggucaagcagaucuacaagacgcccccgaucaaggacuucggcggguucaacuucagccagauccugcccgaccccuccaagcccagcaagcgguccuucaucgaggaccuccuguucaacaaggugacccuggccgacgccggcuucaucaagcaguacggcgacugccucggggacaucgcggcccgcgaccugaucugcgcccagaaguucaacggccugaccgugcucccgccccugcugaccgacgagaugaucgcccaguacaccagcgcccuccuggcggggaccaucacguccggcuggaccuucggggccggcgccgcccugcagauccccuucgcgaugcagauggccuaccgguucaacggcaucggggucacccagaacgugcucuacgagaaccagaagcugaucgccaaccaguucaacagcgccaucggcaagauccaggacucccugagcuccaccgccagcgcgcucgggaagcugcaggacguggucaaccagaacgcccaggcccugaacacgcucgugaagcagcuguccagcaacuucggcgccaucuccagcgugcugaacgacauccucucccgccuggacccgcccgaggccgaggugcagaucgaccggcugaucaccgggcgccuccagagccugcagaccuacgugacccagcagcugauccgggcggccgagauccgcgccagcgccaaccucgccgcgaccaagauguccgagugcguccugggccagagcaagcggguggacuucugcggcaagggguaccaccugauguccuucccccagagcgccccgcacggcguggucuuccuccacgugacguacguccccgcccaggagaagaacuucaccaccgcccccgcgaucugccacgacgggaaggcccacuucccccgcgagggcguguucguguccaacgggacccacugguucgucacgcagcggaacuucuacgagccgcagaucaucaccaccgacaacaccuucgugagcggcaacugcgacguggucaucggcaucgugaacaacacgguguacgacccccugcagcccgagcuggacuccuucaaggaggagcucgacaaguacuucaagaaccacaccagccccgacgucgaccugggggacaucuccggcaucaacgccagcguggugaacauccagaaggagaucgaccgccugaacgaggucgccaagaaccucaacgagucccugaucgaccugcaggagcucgggaaguacgagcaguacaucaaguggccgugguacaucuggcugggcuucaucgccggccugaucgcgaucgugauggugaccaucaugcucugcugcaugaccagcugcugcuccugccugaaggggugcugcagcugcggcuccugcugcaaguucgacgaggacgacagcgagcccguccugaagggggugaagcuccacuacacgugaugacucgagcugguacugcaugcacgcaaugcuagcugccccuuucccguccuggguaccccgagucucccccgaccucgggucccagguaugcucccaccuccaccugccccacucaccaccucugcuaguuccagacaccucccaagcacgcagcaaugcagcucaaaacgcuuagccuagccacacccccacgggaaacagcagugauuaaccuuuagcaauaaacgaaaguuuaacuaagcuauacuaaccccaggguuggucaauuucgugccagccacacccuggagcuagcaaaaaaaaaaaaaaaaaaaaaaaaaaaaaagcauaugacuaaaaaaaaaaaaaaaaaaaaaaaaaaaaaaaaaaaaaaaaaaaaaaaaaaaaaaaaaaaaaaaaaaaaaa

SEQ ID NO: 26820 - RNA, 4283 nt, Artificial Sequence
  SARS-CoV-2/Wuhan/WIV05/2019__EPI_ISL_402128 spike protein mRNA gc (1-1273)(K986P_V987P_N439K_D614G)
agaauaaacuaguauucuucugguccccacagacucagagagaacccgccaccauguucguguuccugguccuccugccccuggugagcucccagugcgugaaccucaccacccgcacgcagcugccgcccgccuacaccaacagcuucacccggggcgucuacuaccccgacaagguguuccgcuccagcgugcugcacuccacccaggaccucuuccugcccuucuucagcaacgucacgugguuccacgccauccacguguccgggaccaacggcaccaagcgguucgacaacccggugcugcccuucaacgacggggucuacuucgcgagcaccgagaaguccaacaucauccgcggcuggaucuucgggacgacccucgacagcaagacccagucccugcugaucgugaacaacgccaccaacguggucaucaaggugugcgaguuccaguucugcaacgaccccuuccucggcguguacuaccacaagaacaacaagagcuggauggaguccgaguuccgggucuacagcuccgccaacaacugcacguucgaguacgugagccagcccuuccugauggaccuggagggcaagcaggggaacuucaagaaccuccgcgaguucguguucaagaacaucgacggcuacuucaagaucuacuccaagcacaccccgaucaaccugguccgggaccugccccagggguucagcgcccucgagccccugguggaccugcccaucggcaucaacaucacccgcuuccagacccuccuggcccugcaccgguccuaccucacgccgggggacagcagcuccggcuggaccgcgggcgccgccgccuacuacgugggguaccugcagccccgcaccuuccugcucaaguacaacgagaacggcaccaucacggacgcggucgacugcgcccuggacccccugagcgagaccaagugcacccucaaguccuucaccguggagaaggggaucuaccagacgagcaacuuccgggugcagcccaccgaguccaucguccgcuucccgaacaucaccaaccugugccccuucggcgagguguucaacgccacccgguucgccagcgucuacgccuggaaccgcaagcggaucuccaacugcguggcggacuacagcgugcuguacaacuccgccagcuucuccacguucaagugcuacggcgucagccccaccaagcucaacgaccugugcuucaccaacguguacgccgacuccuucgugauccgcggggacgagguccggcagaucgcccccggccagaccgggaagaucgccgacuacaacuacaagcugccggacgacuucacgggcugcgugaucgcguggaacagcaagaaccucgacuccaaggucgggggcaacuacaacuaccuguaccgccuguuccgcaagagcaaccucaagcccuucgagcgggacaucuccaccgagaucuaccaggccggcagcacccccugcaacgggguggagggcuucaacugcuacuucccccugcaguccuacggguuccagccgaccaacggcgugggguaccagcccuaccggguggucgugcugagcuucgagcuccugcacgcccccgccacggugugcggccccaagaaguccaccaaccuggucaagaacaagugcgugaacuucaacuucaacggccucaccgggaccggcgugcugaccgagagcaacaagaaguuccugccguuccagcaguucgggcgcgacaucgccgacacgaccgacgcgguccgcgacccccagacccuggagauccucgacaucacccccugcagcuucggcgggguguccgugaucacgccgggcaccaacaccagcaaccaggucgccgugcuguaccagggcgugaacugcaccgagguccccguggccauccacgccgaccagcugacgcccaccuggcggguguacuccaccggcagcaacgucuuccagacccgcgccgggugccucaucggcgcggagcacgugaacaacuccuacgagugcgacauccccaucggggccggcaucugcgccagcuaccagacgcagaccaacuccccgcggcgcgcccggagcguggcgucccagagcaucaucgccuacaccaugucccugggcgccgagaacagcgucgccuacuccaacaacagcaucgccauccccaccaacuucacgaucuccgugaccaccgagauccugcccgugagcaugaccaagacgagcgucgacugcaccauguacaucugcggggacuccaccgagugcagcaaccuccugcugcaguacggcuccuucugcacccagcucaaccgcgcgcugacggggaucgccguggagcaggacaagaacacccaggagguguucgcccaggucaagcagaucuacaagacgcccccgaucaaggacuucggcggguucaacuucagccagauccugcccgaccccuccaagcccagcaagcgguccuucaucgaggaccuccuguucaacaaggugacccuggccgacgccggcuucaucaagcaguacggcgacugccucggggacaucgcggcccgcgaccugaucugcgcccagaaguucaacggccugaccgugcucccgccccugcugaccgacgagaugaucgcccaguacaccagcgcccuccuggcggggaccaucacguccggcuggaccuucggggccggcgccgcccugcagauccccuucgcgaugcagauggccuaccgguucaacggcaucggggucacccagaacgugcucuacgagaaccagaagcugaucgccaaccaguucaacagcgccaucggcaagauccaggacucccugagcuccaccgccagcgcgcucgggaagcugcaggacguggucaaccagaacgcccaggcccugaacacgcucgugaagcagcuguccagcaacuucggcgccaucuccagcgugcugaacgacauccucucccgccuggacccgcccgaggccgaggugcagaucgaccggcugaucaccgggcgccuccagagccugcagaccuacgugacccagcagcugauccgggcggccgagauccgcgccagcgccaaccucgccgcgaccaagauguccgagugcguccugggccagagcaagcggguggacuucugcggcaagggguaccaccugauguccuucccccagagcgccccgcacggcguggucuuccuccacgugacguacguccccgcccaggagaagaacuucaccaccgcccccgcgaucugccacgacgggaaggcccacuucccccgcgagggcguguucguguccaacgggacccacugguucgucacgcagcggaacuucuacgagccgcagaucaucaccaccgacaacaccuucgugagcggcaacugcgacguggucaucggcaucgugaacaacacgguguacgacccccugcagcccgagcuggacuccuucaaggaggagcucgacaaguacuucaagaaccacaccagccccgacgucgaccugggggacaucuccggcaucaacgccagcguggugaacauccagaaggagaucgaccgccugaacgaggucgccaagaaccucaacgagucccugaucgaccugcaggagcucgggaaguacgagcaguacaucaaguggccgugguacaucuggcugggcuucaucgccggccugaucgcgaucgugauggugaccaucaugcucugcugcaugaccagcugcugcuccugccugaaggggugcugcagcugcggcuccugcugcaaguucgacgaggacgacagcgagcccguccugaagggggugaagcuccacuacacgugaugacucgagcugguacugcaugcacgcaaugcuagcugccccuuucccguccuggguaccccgagucucccccgaccucgggucccagguaugcucccaccuccaccugccccacucaccaccucugcuaguuccagacaccucccaagcacgcagcaaugcagcucaaaacgcuuagccuagccacacccccacgggaaacagcagugauuaaccuuuagcaauaaacgaaaguuuaacuaagcuauacuaaccccaggguuggucaauuucgugccagccacacccuggagcuagcaaaaaaaaaaaaaaaaaaaaaaaaaaaaaagcauaugacuaaaaaaaaaaaaaaaaaaaaaaaaaaaaaaaaaaaaaaaaaaaaaaaaaaaaaaaaaaaaaaaaaaaaaa

SEQ ID NO: 26821 - RNA, 4283 nt, Artificial Sequence
  SARS-CoV-2/Wuhan/WIV05/2019__EPI_ISL_402128 spike protein mRNA gc (1-1273)(K986P_V987P_S477N_D614G)
agaauaaacuaguauucuucugguccccacagacucagagagaacccgccaccauguucguguuccugguccuccugccccuggugagcucccagugcgugaaccucaccacccgcacgcagcugccgcccgccuacaccaacagcuucacccggggcgucuacuaccccgacaagguguuccgcuccagcgugcugcacuccacccaggaccucuuccugcccuucuucagcaacgucacgugguuccacgccauccacguguccgggaccaacggcaccaagcgguucgacaacccggugcugcccuucaacgacggggucuacuucgcgagcaccgagaaguccaacaucauccgcggcuggaucuucgggacgacccucgacagcaagacccagucccugcugaucgugaacaacgccaccaacguggucaucaaggugugcgaguuccaguucugcaacgaccccuuccucggcguguacuaccacaagaacaacaagagcuggauggaguccgaguuccgggucuacagcuccgccaacaacugcacguucgaguacgugagccagcccuuccugauggaccuggagggcaagcaggggaacuucaagaaccuccgcgaguucguguucaagaacaucgacggcuacuucaagaucuacuccaagcacaccccgaucaaccugguccgggaccugccccagggguucagcgcccucgagccccugguggaccugcccaucggcaucaacaucacccgcuuccagacccuccuggcccugcaccgguccuaccucacgccgggggacagcagcuccggcuggaccgcgggcgccgccgccuacuacgugggguaccugcagccccgcaccuuccugcucaaguacaacgagaacggcaccaucacggacgcggucgacugcgcccuggacccccugagcgagaccaagugcacccucaaguccuucaccguggagaaggggaucuaccagacgagcaacuuccgggugcagcccaccgaguccaucguccgcuucccgaacaucaccaaccugugccccuucggcgagguguucaacgccacccgguucgccagcgucuacgccuggaaccgcaagcggaucuccaacugcguggcggacuacagcgugcuguacaacuccgccagcuucuccacguucaagugcuacggcgucagccccaccaagcucaacgaccugugcuucaccaacguguacgccgacuccuucgugauccgcggggacgagguccggcagaucgcccccggccagaccgggaagaucgccgacuacaacuacaagcugccggacgacuucacgggcugcgugaucgcguggaacagcaacaaccucgacuccaaggucgggggcaacuacaacuaccuguaccgccuguuccgcaagagcaaccucaagcccuucgagcgggacaucuccaccgagaucuaccaggccggcaacacccccugcaacgggguggagggcuucaacugcuacuucccccugcaguccuacggguuccagccgaccaacggcgugggguaccagcccuaccggguggucgugcugagcuucgagcuccugcacgcccccgccacggugugcggccccaagaaguccaccaaccuggucaagaacaagugcgugaacuucaacuucaacggccucaccgggaccggcgugcugaccgagagcaacaagaaguuccugccguuccagcaguucgggcgcgacaucgccgacacgaccgacgcgguccgcgacccccagacccuggagauccucgacaucacccccugcagcuucggcgggguguccgugaucacgccgggcaccaacaccagcaaccaggucgccgugcuguaccagggcgugaacugcaccgagguccccguggccauccacgccgaccagcugacgcccaccuggcggguguacuccaccggcagcaacgucuuccagacccgcgccgggugccucaucggcgcggagcacgugaacaacuccuacgagugcgacauccccaucggggccggcaucugcgccagcuaccagacgcagaccaacuccccgcggcgcgcccggagcguggcgucccagagcaucaucgccuacaccaugucccugggcgccgagaacagcgucgccuacuccaacaacagcaucgccauccccaccaacuucacgaucuccgugaccaccgagauccugcccgugagcaugaccaagacgagcgucgacugcaccauguacaucugcggggacuccaccgagugcagcaaccuccugcugcaguacggcuccuucugcacccagcucaaccgcgcgcugacggggaucgccguggagcaggacaagaacacccaggagguguucgcccaggucaagcagaucuacaagacgcccccgaucaaggacuucggcggguucaacuucagccagauccugcccgaccccuccaagcccagcaagcgguccuucaucgaggaccuccuguucaacaaggugacccuggccgacgccggcuucaucaagcaguacggcgacugccucggggacaucgcggcccgcgaccugaucugcgcccagaaguucaacggccugaccgugcucccgccccugcugaccgacgagaugaucgcccaguacaccagcgcccuccuggcggggaccaucacguccggcuggaccuucggggccggcgccgcccugcagauccccuucgcgaugcagauggccuaccgguucaacggcaucggggucacccagaacgugcucuacgagaaccagaagcugaucgccaaccaguucaacagcgccaucggcaagauccaggacucccugagcuccaccgccagcgcgcucgggaagcugcaggacguggucaaccagaacgcccaggcccugaacacgcucgugaagcagcuguccagcaacuucggcgccaucuccagcgugcugaacgacauccucucccgccuggacccgcccgaggccgaggugcagaucgaccggcugaucaccgggcgccuccagagccugcagaccuacgugacccagcagcugauccgggcggccgagauccgcgccagcgccaaccucgccgcgaccaagauguccgagugcguccugggccagagcaagcggguggacuucugcggcaagggguaccaccugauguccuucccccagagcgccccgcacggcguggucuuccuccacgugacguacguccccgcccaggagaagaacuucaccaccgcccccgcgaucugccacgacgggaaggcccacuucccccgcgagggcguguucguguccaacgggacccacugguucgucacgcagcggaacuucuacgagccgcagaucaucaccaccgacaacaccuucgugagcggcaacugcgacguggucaucggcaucgugaacaacacgguguacgacccccugcagcccgagcuggacuccuucaaggaggagcucgacaaguacuucaagaaccacaccagccccgacgucgaccugggggacaucuccggcaucaacgccagcguggugaacauccagaaggagaucgaccgccugaacgaggucgccaagaaccucaacgagucccugaucgaccugcaggagcucgggaaguacgagcaguacaucaaguggccgugguacaucuggcugggcuucaucgccggccugaucgcgaucgugauggugaccaucaugcucugcugcaugaccagcugcugcuccugccugaaggggugcugcagcugcggcuccugcugcaaguucgacgaggacgacagcgagcccguccugaagggggugaagcuccacuacacgugaugacucgagcugguacugcaugcacgcaaugcuagcugccccuuucccguccuggguaccccgagucucccccgaccucgggucccagguaugcucccaccuccaccugccccacucaccaccucugcuaguuccagacaccucccaagcacgcagcaaugcagcucaaaacgcuuagccuagccacacccccacgggaaacagcagugauuaaccuuuagcaauaaacgaaaguuuaacuaagcuauacuaaccccaggguuggucaauuucgugccagccacacccuggagcuagcaaaaaaaaaaaaaaaaaaaaaaaaaaaaaagcauaugacuaaaaaaaaaaaaaaaaaaaaaaaaaaaaaaaaaaaaaaaaaaaaaaaaaaaaaaaaaaaaaaaaaaaaaa

SEQ ID NO: 26822 - RNA, 4283 nt, Artificial Sequence
  SARS-CoV-2/Wuhan/WIV05/2019__EPI_ISL_402128 spike protein mRNA gc (1-1273)(K986P_V987P_N501Y_D614G)
agaauaaacuaguauucuucugguccccacagacucagagagaacccgccaccauguucguguuccugguccuccugccccuggugagcucccagugcgugaaccucaccacccgcacgcagcugccgcccgccuacaccaacagcuucacccggggcgucuacuaccccgacaagguguuccgcuccagcgugcugcacuccacccaggaccucuuccugcccuucuucagcaacgucacgugguuccacgccauccacguguccgggaccaacggcaccaagcgguucgacaacccggugcugcccuucaacgacggggucuacuucgcgagcaccgagaaguccaacaucauccgcggcuggaucuucgggacgacccucgacagcaagacccagucccugcugaucgugaacaacgccaccaacguggucaucaaggugugcgaguuccaguucugcaacgaccccuuccucggcguguacuaccacaagaacaacaagagcuggauggaguccgaguuccgggucuacagcuccgccaacaacugcacguucgaguacgugagccagcccuuccugauggaccuggagggcaagcaggggaacuucaagaaccuccgcgaguucguguucaagaacaucgacggcuacuucaagaucuacuccaagcacaccccgaucaaccugguccgggaccugccccagggguucagcgcccucgagccccugguggaccugcccaucggcaucaacaucacccgcuuccagacccuccuggcccugcaccgguccuaccucacgccgggggacagcagcuccggcuggaccgcgggcgccgccgccuacuacgugggguaccugcagccccgcaccuuccugcucaaguacaacgagaacggcaccaucacggacgcggucgacugcgcccuggacccccugagcgagaccaagugcacccucaaguccuucaccguggagaaggggaucuaccagacgagcaacuuccgggugcagcccaccgaguccaucguccgcuucccgaacaucaccaaccugugccccuucggcgagguguucaacgccacccgguucgccagcgucuacgccuggaaccgcaagcggaucuccaacugcguggcggacuacagcgugcuguacaacuccgccagcuucuccacguucaagugcuacggcgucagccccaccaagcucaacgaccugugcuucaccaacguguacgccgacuccuucgugauccgcggggacgagguccggcagaucgcccccggccagaccgggaagaucgccgacuacaacuacaagcugccggacgacuucacgggcugcgugaucgcguggaacagcaacaaccucgacuccaaggucgggggcaacuacaacuaccuguaccgccuguuccgcaagagcaaccucaagcccuucgagcgggacaucuccaccgagaucuaccaggccggcagcacccccugcaacgggguggagggcuucaacugcuacuucccccugcaguccuacggguuccagccgaccuacggcgugggguaccagcccuaccggguggucgugcugagcuucgagcuccugcacgcccccgccacggugugcggccccaagaaguccaccaaccuggucaagaacaagugcgugaacuucaacuucaacggccucaccgggaccggcgugcugaccgagagcaacaagaaguuccugccguuccagcaguucgggcgcgacaucgccgacacgaccgacgcgguccgcgacccccagacccuggagauccucgacaucacccccugcagcuucggcgggguguccgugaucacgccgggcaccaacaccagcaaccaggucgccgugcuguaccagggcgugaacugcaccgagguccccguggccauccacgccgaccagcugacgcccaccuggcggguguacuccaccggcagcaacgucuuccagacccgcgccgggugccucaucggcgcggagcacgugaacaacuccuacgagugcgacauccccaucggggccggcaucugcgccagcuaccagacgcagaccaacuccccgcggcgcgcccggagcguggcgucccagagcaucaucgccuacaccaugucccugggcgccgagaacagcgucgccuacuccaacaacagcaucgccauccccaccaacuucacgaucuccgugaccaccgagauccugcccgugagcaugaccaagacgagcgucgacugcaccauguacaucugcggggacuccaccgagugcagcaaccuccugcugcaguacggcuccuucugcacccagcucaaccgcgcgcugacggggaucgccguggagcaggacaagaacacccaggagguguucgcccaggucaagcagaucuacaagacgcccccgaucaaggacuucggcggguucaacuucagccagauccugcccgaccccuccaagcccagcaagcgguccuucaucgaggaccuccuguucaacaaggugacccuggccgacgccggcuucaucaagcaguacggcgacugccucggggacaucgcggcccgcgaccugaucugcgcccagaaguucaacggccugaccgugcucccgccccugcugaccgacgagaugaucgcccaguacaccagcgcccuccuggcggggaccaucacguccggcuggaccuucggggccggcgccgcccugcagauccccuucgcgaugcagauggccuaccgguucaacggcaucggggucacccagaacgugcucuacgagaaccagaagcugaucgccaaccaguucaacagcgccaucggcaagauccaggacucccugagcuccaccgccagcgcgcucgggaagcugcaggacguggucaaccagaacgcccaggcccugaacacgcucgugaagcagcuguccagcaacuucggcgccaucuccagcgugcugaacgacauccucucccgccuggacccgcccgaggccgaggugcagaucgaccggcugaucaccgggcgccuccagagccugcagaccuacgugacccagcagcugauccgggcggccgagauccgcgccagcgccaaccucgccgcgaccaagauguccgagugcguccugggccagagcaagcggguggacuucugcggcaagggguaccaccugauguccuucccccagagcgccccgcacggcguggucuuccuccacgugacguacguccccgcccaggagaagaacuucaccaccgcccccgcgaucugccacgacgggaaggcccacuucccccgcgagggcguguucguguccaacgggacccacugguucgucacgcagcggaacuucuacgagccgcagaucaucaccaccgacaacaccuucgugagcggcaacugcgacguggucaucggcaucgugaacaacacgguguacgacccccugcagcccgagcuggacuccuucaaggaggagcucgacaaguacuucaagaaccacaccagccccgacgucgaccugggggacaucuccggcaucaacgccagcguggugaacauccagaaggagaucgaccgccugaacgaggucgccaagaaccucaacgagucccugaucgaccugcaggagcucgggaaguacgagcaguacaucaaguggccgugguacaucuggcugggcuucaucgccggccugaucgcgaucgugauggugaccaucaugcucugcugcaugaccagcugcugcuccugccugaaggggugcugcagcugcggcuccugcugcaaguucgacgaggacgacagcgagcccguccugaagggggugaagcuccacuacacgugaugacucgagcugguacugcaugcacgcaaugcuagcugccccuuucccguccuggguaccccgagucucccccgaccucgggucccagguaugcucccaccuccaccugccccacucaccaccucugcuaguuccagacaccucccaagcacgcagcaaugcagcucaaaacgcuuagccuagccacacccccacgggaaacagcagugauuaaccuuuagcaauaaacgaaaguuuaacuaagcuauacuaaccccaggguuggucaauuucgugccagccacacccuggagcuagcaaaaaaaaaaaaaaaaaaaaaaaaaaaaaagcauaugacuaaaaaaaaaaaaaaaaaaaaaaaaaaaaaaaaaaaaaaaaaaaaaaaaaaaaaaaaaaaaaaaaaaaaaa

SEQ ID NO: 26823 - RNA, 4277 nt, Artificial Sequence
  SARS-CoV-2/Wuhan/WIV05/2019__EPI_ISL_402128 spike protein mRNA gc (1-1273)(K986P_V987P_H69del_V70del_D614G)
agaauaaacuaguauucuucugguccccacagacucagagagaacccgccaccauguucguguuccugguccuccugccccuggugagcucccagugcgugaaccucaccacccgcacgcagcugccgcccgccuacaccaacagcuucacccggggcgucuacuaccccgacaagguguuccgcuccagcgugcugcacuccacccaggaccucuuccugcccuucuucagcaacgucacgugguuccacgccaucuccgggaccaacggcaccaagcgguucgacaacccggugcugcccuucaacgacggggucuacuucgcgagcaccgagaaguccaacaucauccgcggcuggaucuucgggacgacccucgacagcaagacccagucccugcugaucgugaacaacgccaccaacguggucaucaaggugugcgaguuccaguucugcaacgaccccuuccucggcguguacuaccacaagaacaacaagagcuggauggaguccgaguuccgggucuacagcuccgccaacaacugcacguucgaguacgugagccagcccuuccugauggaccuggagggcaagcaggggaacuucaagaaccuccgcgaguucguguucaagaacaucgacggcuacuucaagaucuacuccaagcacaccccgaucaaccugguccgggaccugccccagggguucagcgcccucgagccccugguggaccugcccaucggcaucaacaucacccgcuuccagacccuccuggcccugcaccgguccuaccucacgccgggggacagcagcuccggcuggaccgcgggcgccgccgccuacuacgugggguaccugcagccccgcaccuuccugcucaaguacaacgagaacggcaccaucacggacgcggucgacugcgcccuggacccccugagcgagaccaagugcacccucaaguccuucaccguggagaaggggaucuaccagacgagcaacuuccgggugcagcccaccgaguccaucguccgcuucccgaacaucaccaaccugugccccuucggcgagguguucaacgccacccgguucgccagcgucuacgccuggaaccgcaagcggaucuccaacugcguggcggacuacagcgugcuguacaacuccgccagcuucuccacguucaagugcuacggcgucagccccaccaagcucaacgaccugugcuucaccaacguguacgccgacuccuucgugauccgcggggacgagguccggcagaucgcccccggccagaccgggaagaucgccgacuacaacuacaagcugccggacgacuucacgggcugcgugaucgcguggaacagcaacaaccucgacuccaaggucgggggcaacuacaacuaccuguaccgccuguuccgcaagagcaaccucaagcccuucgagcgggacaucuccaccgagaucuaccaggccggcagcacccccugcaacgggguggagggcuucaacugcuacuucccccugcaguccuacggguuccagccgaccaacggcgugggguaccagcccuaccggguggucgugcugagcuucgagcuccugcacgcccccgccacggugugcggccccaagaaguccaccaaccuggucaagaacaagugcgugaacuucaacuucaacggccucaccgggaccggcgugcugaccgagagcaacaagaaguuccugccguuccagcaguucgggcgcgacaucgccgacacgaccgacgcgguccgcgacccccagacccuggagauccucgacaucacccccugcagcuucggcgggguguccgugaucacgccgggcaccaacaccagcaaccaggucgccgugcuguaccagggcgugaacugcaccgagguccccguggccauccacgccgaccagcugacgcccaccuggcggguguacuccaccggcagcaacgucuuccagacccgcgccgggugccucaucggcgcggagcacgugaacaacuccuacgagugcgacauccccaucggggccggcaucugcgccagcuaccagacgcagaccaacuccccgcggcgcgcccggagcguggcgucccagagcaucaucgccuacaccaugucccugggcgccgagaacagcgucgccuacuccaacaacagcaucgccauccccaccaacuucacgaucuccgugaccaccgagauccugcccgugagcaugaccaagacgagcgucgacugcaccauguacaucugcggggacuccaccgagugcagcaaccuccugcugcaguacggcuccuucugcacccagcucaaccgcgcgcugacggggaucgccguggagcaggacaagaacacccaggagguguucgcccaggucaagcagaucuacaagacgcccccgaucaaggacuucggcggguucaacuucagccagauccugcccgaccccuccaagcccagcaagcgguccuucaucgaggaccuccuguucaacaaggugacccuggccgacgccggcuucaucaagcaguacggcgacugccucggggacaucgcggcccgcgaccugaucugcgcccagaaguucaacggccugaccgugcucccgccccugcugaccgacgagaugaucgcccaguacaccagcgcccuccuggcggggaccaucacguccggcuggaccuucggggccggcgccgcccugcagauccccuucgcgaugcagauggccuaccgguucaacggcaucggggucacccagaacgugcucuacgagaaccagaagcugaucgccaaccaguucaacagcgccaucggcaagauccaggacucccugagcuccaccgccagcgcgcucgggaagcugcaggacguggucaaccagaacgcccaggcccugaacacgcucgugaagcagcuguccagcaacuucggcgccaucuccagcgugcugaacgacauccucucccgccuggacccgcccgaggccgaggugcagaucgaccggcugaucaccgggcgccuccagagccugcagaccuacgugacccagcagcugauccgggcggccgagauccgcgccagcgccaaccucgccgcgaccaagauguccgagugcguccugggccagagcaagcggguggacuucugcggcaagggguaccaccugauguccuucccccagagcgccccgcacggcguggucuuccuccacgugacguacguccccgcccaggagaagaacuucaccaccgcccccgcgaucugccacgacgggaaggcccacuucccccgcgagggcguguucguguccaacgggacccacugguucgucacgcagcggaacuucuacgagccgcagaucaucaccaccgacaacaccuucgugagcggcaacugcgacguggucaucggcaucgugaacaacacgguguacgacccccugcagcccgagcuggacuccuucaaggaggagcucgacaaguacuucaagaaccacaccagccccgacgucgaccugggggacaucuccggcaucaacgccagcguggugaacauccagaaggagaucgaccgccugaacgaggucgccaagaaccucaacgagucccugaucgaccugcaggagcucgggaaguacgagcaguacaucaaguggccgugguacaucuggcugggcuucaucgccggccugaucgcgaucgugauggugaccaucaugcucugcugcaugaccagcugcugcuccugccugaaggggugcugcagcugcggcuccugcugcaaguucgacgaggacgacagcgagcccguccugaagggggugaagcuccacuacacgugaugacucgagcugguacugcaugcacgcaaugcuagcugccccuuucccguccuggguaccccgagucucccccgaccucgggucccagguaugcucccaccuccaccugccccacucaccaccucugcuaguuccagacaccucccaagcacgcagcaaugcagcucaaaacgcuuagccuagccacacccccacgggaaacagcagugauuaaccuuuagcaauaaacgaaaguuuaacuaagcuauacuaaccccaggguuggucaauuucgugccagccacacccuggagcuagcaaaaaaaaaaaaaaaaaaaaaaaaaaaaaagcauaugacuaaaaaaaaaaaaaaaaaaaaaaaaaaaaaaaaaaaaaaaaaaaaaaaaaaaaaaaaaaaaaaaaaaaaaa

SEQ ID NO: 26824 - RNA, 4283 nt, Artificial Sequence
  SARS-CoV-2/Wuhan/WIV05/2019__EPI_ISL_402128 spike protein mRNA gc (1-1273)(K986P_V987P_Y453F_D614G)
agaauaaacuaguauucuucugguccccacagacucagagagaacccgccaccauguucguguuccugguccuccugccccuggugagcucccagugcgugaaccucaccacccgcacgcagcugccgcccgccuacaccaacagcuucacccggggcgucuacuaccccgacaagguguuccgcuccagcgugcugcacuccacccaggaccucuuccugcccuucuucagcaacgucacgugguuccacgccauccacguguccgggaccaacggcaccaagcgguucgacaacccggugcugcccuucaacgacggggucuacuucgcgagcaccgagaaguccaacaucauccgcggcuggaucuucgggacgacccucgacagcaagacccagucccugcugaucgugaacaacgccaccaacguggucaucaaggugugcgaguuccaguucugcaacgaccccuuccucggcguguacuaccacaagaacaacaagagcuggauggaguccgaguuccgggucuacagcuccgccaacaacugcacguucgaguacgugagccagcccuuccugauggaccuggagggcaagcaggggaacuucaagaaccuccgcgaguucguguucaagaacaucgacggcuacuucaagaucuacuccaagcacaccccgaucaaccugguccgggaccugccccagggguucagcgcccucgagccccugguggaccugcccaucggcaucaacaucacccgcuuccagacccuccuggcccugcaccgguccuaccucacgccgggggacagcagcuccggcuggaccgcgggcgccgccgccuacuacgugggguaccugcagccccgcaccuuccugcucaaguacaacgagaacggcaccaucacggacgcggucgacugcgcccuggacccccugagcgagaccaagugcacccucaaguccuucaccguggagaaggggaucuaccagacgagcaacuuccgggugcagcccaccgaguccaucguccgcuucccgaacaucaccaaccugugccccuucggcgagguguucaacgccacccgguucgccagcgucuacgccuggaaccgcaagcggaucuccaacugcguggcggacuacagcgugcuguacaacuccgccagcuucuccacguucaagugcuacggcgucagccccaccaagcucaacgaccugugcuucaccaacguguacgccgacuccuucgugauccgcggggacgagguccggcagaucgcccccggccagaccgggaagaucgccgacuacaacuacaagcugccggacgacuucacgggcugcgugaucgcguggaacagcaacaaccucgacuccaaggucgggggcaacuacaacuaccuguuccgccuguuccgcaagagcaaccucaagcccuucgagcgggacaucuccaccgagaucuaccaggccggcagcacccccugcaacgggguggagggcuucaacugcuacuucccccugcaguccuacggguuccagccgaccaacggcgugggguaccagcccuaccggguggucgugcugagcuucgagcuccugcacgcccccgccacggugugcggccccaagaaguccaccaaccuggucaagaacaagugcgugaacuucaacuucaacggccucaccgggaccggcgugcugaccgagagcaacaagaaguuccugccguuccagcaguucgggcgcgacaucgccgacacgaccgacgcgguccgcgacccccagacccuggagauccucgacaucacccccugcagcuucggcgggguguccgugaucacgccgggcaccaacaccagcaaccaggucgccgugcuguaccagggcgugaacugcaccgagguccccguggccauccacgccgaccagcugacgcccaccuggcggguguacuccaccggcagcaacgucuuccagacccgcgccgggugccucaucggcgcggagcacgugaacaacuccuacgagugcgacauccccaucggggccggcaucugcgccagcuaccagacgcagaccaacuccccgcggcgcgcccggagcguggcgucccagagcaucaucgccuacaccaugucccugggcgccgagaacagcgucgccuacuccaacaacagcaucgccauccccaccaacuucacgaucuccgugaccaccgagauccugcccgugagcaugaccaagacgagcgucgacugcaccauguacaucugcggggacuccaccgagugcagcaaccuccugcugcaguacggcuccuucugcacccagcucaaccgcgcgcugacggggaucgccguggagcaggacaagaacacccaggagguguucgcccaggucaagcagaucuacaagacgcccccgaucaaggacuucggcggguucaacuucagccagauccugcccgaccccuccaagcccagcaagcgguccuucaucgaggaccuccuguucaacaaggugacccuggccgacgccggcuucaucaagcaguacggcgacugccucggggacaucgcggcccgcgaccugaucugcgcccagaaguucaacggccugaccgugcucccgccccugcugaccgacgagaugaucgcccaguacaccagcgcccuccuggcggggaccaucacguccggcuggaccuucggggccggcgccgcccugcagauccccuucgcgaugcagauggccuaccgguucaacggcaucggggucacccagaacgugcucuacgagaaccagaagcugaucgccaaccaguucaacagcgccaucggcaagauccaggacucccugagcuccaccgccagcgcgcucgggaagcugcaggacguggucaaccagaacgcccaggcccugaacacgcucgugaagcagcuguccagcaacuucggcgccaucuccagcgugcugaacgacauccucucccgccuggacccgcccgaggccgaggugcagaucgaccggcugaucaccgggcgccuccagagccugcagaccuacgugacccagcagcugauccgggcggccgagauccgcgccagcgccaaccucgccgcgaccaagauguccgagugcguccugggccagagcaagcggguggacuucugcggcaagggguaccaccugauguccuucccccagagcgccccgcacggcguggucuuccuccacgugacguacguccccgcccaggagaagaacuucaccaccgcccccgcgaucugccacgacgggaaggcccacuucccccgcgagggcguguucguguccaacgggacccacugguucgucacgcagcggaacuucuacgagccgcagaucaucaccaccgacaacaccuucgugagcggcaacugcgacguggucaucggcaucgugaacaacacgguguacgacccccugcagcccgagcuggacuccuucaaggaggagcucgacaaguacuucaagaaccacaccagccccgacgucgaccugggggacaucuccggcaucaacgccagcguggugaacauccagaaggagaucgaccgccugaacgaggucgccaagaaccucaacgagucccugaucgaccugcaggagcucgggaaguacgagcaguacaucaaguggccgugguacaucuggcugggcuucaucgccggccugaucgcgaucgugauggugaccaucaugcucugcugcaugaccagcugcugcuccugccugaaggggugcugcagcugcggcuccugcugcaaguucgacgaggacgacagcgagcccguccugaagggggugaagcuccacuacacgugaugacucgagcugguacugcaugcacgcaaugcuagcugccccuuucccguccuggguaccccgagucucccccgaccucgggucccagguaugcucccaccuccaccugccccacucaccaccucugcuaguuccagacaccucccaagcacgcagcaaugcagcucaaaacgcuuagccuagccacacccccacgggaaacagcagugauuaaccuuuagcaauaaacgaaaguuuaacuaagcuauacuaaccccaggguuggucaauuucgugccagccacacccuggagcuagcaaaaaaaaaaaaaaaaaaaaaaaaaaaaaagcauaugacuaaaaaaaaaaaaaaaaaaaaaaaaaaaaaaaaaaaaaaaaaaaaaaaaaaaaaaaaaaaaaaaaaaaaaa

SEQ ID NO: 26825 - RNA, 4283 nt, Artificial Sequence
  SARS-CoV-2/Wuhan/WIV05/2019__EPI_ISL_402128 spike protein mRNA gc (1-1273)(K986P_V987P_D614G_I692V)
agaauaaacuaguauucuucugguccccacagacucagagagaacccgccaccauguucguguuccugguccuccugccccuggugagcucccagugcgugaaccucaccacccgcacgcagcugccgcccgccuacaccaacagcuucacccggggcgucuacuaccccgacaagguguuccgcuccagcgugcugcacuccacccaggaccucuuccugcccuucuucagcaacgucacgugguuccacgccauccacguguccgggaccaacggcaccaagcgguucgacaacccggugcugcccuucaacgacggggucuacuucgcgagcaccgagaaguccaacaucauccgcggcuggaucuucgggacgacccucgacagcaagacccagucccugcugaucgugaacaacgccaccaacguggucaucaaggugugcgaguuccaguucugcaacgaccccuuccucggcguguacuaccacaagaacaacaagagcuggauggaguccgaguuccgggucuacagcuccgccaacaacugcacguucgaguacgugagccagcccuuccugauggaccuggagggcaagcaggggaacuucaagaaccuccgcgaguucguguucaagaacaucgacggcuacuucaagaucuacuccaagcacaccccgaucaaccugguccgggaccugccccagggguucagcgcccucgagccccugguggaccugcccaucggcaucaacaucacccgcuuccagacccuccuggcccugcaccgguccuaccucacgccgggggacagcagcuccggcuggaccgcgggcgccgccgccuacuacgugggguaccugcagccccgcaccuuccugcucaaguacaacgagaacggcaccaucacggacgcggucgacugcgcccuggacccccugagcgagaccaagugcacccucaaguccuucaccguggagaaggggaucuaccagacgagcaacuuccgggugcagcccaccgaguccaucguccgcuucccgaacaucaccaaccugugccccuucggcgagguguucaacgccacccgguucgccagcgucuacgccuggaaccgcaagcggaucuccaacugcguggcggacuacagcgugcuguacaacuccgccagcuucuccacguucaagugcuacggcgucagccccaccaagcucaacgaccugugcuucaccaacguguacgccgacuccuucgugauccgcggggacgagguccggcagaucgcccccggccagaccgggaagaucgccgacuacaacuacaagcugccggacgacuucacgggcugcgugaucgcguggaacagcaacaaccucgacuccaaggucgggggcaacuacaacuaccuguaccgccuguuccgcaagagcaaccucaagcccuucgagcgggacaucuccaccgagaucuaccaggccggcagcacccccugcaacgggguggagggcuucaacugcuacuucccccugcaguccuacggguuccagccgaccaacggcgugggguaccagcccuaccggguggucgugcugagcuucgagcuccugcacgcccccgccacggugugcggccccaagaaguccaccaaccuggucaagaacaagugcgugaacuucaacuucaacggccucaccgggaccggcgugcugaccgagagcaacaagaaguuccugccguuccagcaguucgggcgcgacaucgccgacacgaccgacgcgguccgcgacccccagacccuggagauccucgacaucacccccugcagcuucggcgggguguccgugaucacgccgggcaccaacaccagcaaccaggucgccgugcuguaccagggcgugaacugcaccgagguccccguggccauccacgccgaccagcugacgcccaccuggcggguguacuccaccggcagcaacgucuuccagacccgcgccgggugccucaucggcgcggagcacgugaacaacuccuacgagugcgacauccccaucggggccggcaucugcgccagcuaccagacgcagaccaacuccccgcggcgcgcccggagcguggcgucccagagcgucaucgccuacaccaugucccugggcgccgagaacagcgucgccuacuccaacaacagcaucgccauccccaccaacuucacgaucuccgugaccaccgagauccugcccgugagcaugaccaagacgagcgucgacugcaccauguacaucugcggggacuccaccgagugcagcaaccuccugcugcaguacggcuccuucugcacccagcucaaccgcgcgcugacggggaucgccguggagcaggacaagaacacccaggagguguucgcccaggucaagcagaucuacaagacgcccccgaucaaggacuucggcggguucaacuucagccagauccugcccgaccccuccaagcccagcaagcgguccuucaucgaggaccuccuguucaacaaggugacccuggccgacgccggcuucaucaagcaguacggcgacugccucggggacaucgcggcccgcgaccugaucugcgcccagaaguucaacggccugaccgugcucccgccccugcugaccgacgagaugaucgcccaguacaccagcgcccuccuggcggggaccaucacguccggcuggaccuucggggccggcgccgcccugcagauccccuucgcgaugcagauggccuaccgguucaacggcaucggggucacccagaacgugcucuacgagaaccagaagcugaucgccaaccaguucaacagcgccaucggcaagauccaggacucccugagcuccaccgccagcgcgcucgggaagcugcaggacguggucaaccagaacgcccaggcccugaacacgcucgugaagcagcuguccagcaacuucggcgccaucuccagcgugcugaacgacauccucucccgccuggacccgcccgaggccgaggugcagaucgaccggcugaucaccgggcgccuccagagccugcagaccuacgugacccagcagcugauccgggcggccgagauccgcgccagcgccaaccucgccgcgaccaagauguccgagugcguccugggccagagcaagcggguggacuucugcggcaagggguaccaccugauguccuucccccagagcgccccgcacggcguggucuuccuccacgugacguacguccccgcccaggagaagaacuucaccaccgcccccgcgaucugccacgacgggaaggcccacuucccccgcgagggcguguucguguccaacgggacccacugguucgucacgcagcggaacuucuacgagccgcagaucaucaccaccgacaacaccuucgugagcggcaacugcgacguggucaucggcaucgugaacaacacgguguacgacccccugcagcccgagcuggacuccuucaaggaggagcucgacaaguacuucaagaaccacaccagccccgacgucgaccugggggacaucuccggcaucaacgccagcguggugaacauccagaaggagaucgaccgccugaacgaggucgccaagaaccucaacgagucccugaucgaccugcaggagcucgggaaguacgagcaguacaucaaguggccgugguacaucuggcugggcuucaucgccggccugaucgcgaucgugauggugaccaucaugcucugcugcaugaccagcugcugcuccugccugaaggggugcugcagcugcggcuccugcugcaaguucgacgaggacgacagcgagcccguccugaagggggugaagcuccacuacacgugaugacucgagcugguacugcaugcacgcaaugcuagcugccccuuucccguccuggguaccccgagucucccccgaccucgggucccagguaugcucccaccuccaccugccccacucaccaccucugcuaguuccagacaccucccaagcacgcagcaaugcagcucaaaacgcuuagccuagccacacccccacgggaaacagcagugauuaaccuuuagcaauaaacgaaaguuuaacuaagcuauacuaaccccaggguuggucaauuucgugccagccacacccuggagcuagcaaaaaaaaaaaaaaaaaaaaaaaaaaaaaagcauaugacuaaaaaaaaaaaaaaaaaaaaaaaaaaaaaaaaaaaaaaaaaaaaaaaaaaaaaaaaaaaaaaaaaaaaaa

SEQ ID NO: 26826 - RNA, 4283 nt, Artificial Sequence
  SARS-CoV-2/Wuhan/WIV05/2019__EPI_ISL_402128 spike protein mRNA gc (1-1273)(K986P_V987P_D614G_M1229I)
agaauaaacuaguauucuucugguccccacagacucagagagaacccgccaccauguucguguuccugguccuccugccccuggugagcucccagugcgugaaccucaccacccgcacgcagcugccgcccgccuacaccaacagcuucacccggggcgucuacuaccccgacaagguguuccgcuccagcgugcugcacuccacccaggaccucuuccugcccuucuucagcaacgucacgugguuccacgccauccacguguccgggaccaacggcaccaagcgguucgacaacccggugcugcccuucaacgacggggucuacuucgcgagcaccgagaaguccaacaucauccgcggcuggaucuucgggacgacccucgacagcaagacccagucccugcugaucgugaacaacgccaccaacguggucaucaaggugugcgaguuccaguucugcaacgaccccuuccucggcguguacuaccacaagaacaacaagagcuggauggaguccgaguuccgggucuacagcuccgccaacaacugcacguucgaguacgugagccagcccuuccugauggaccuggagggcaagcaggggaacuucaagaaccuccgcgaguucguguucaagaacaucgacggcuacuucaagaucuacuccaagcacaccccgaucaaccugguccgggaccugccccagggguucagcgcccucgagccccugguggaccugcccaucggcaucaacaucacccgcuuccagacccuccuggcccugcaccgguccuaccucacgccgggggacagcagcuccggcuggaccgcgggcgccgccgccuacuacgugggguaccugcagccccgcaccuuccugcucaaguacaacgagaacggcaccaucacggacgcggucgacugcgcccuggacccccugagcgagaccaagugcacccucaaguccuucaccguggagaaggggaucuaccagacgagcaacuuccgggugcagcccaccgaguccaucguccgcuucccgaacaucaccaaccugugccccuucggcgagguguucaacgccacccgguucgccagcgucuacgccuggaaccgcaagcggaucuccaacugcguggcggacuacagcgugcuguacaacuccgccagcuucuccacguucaagugcuacggcgucagccccaccaagcucaacgaccugugcuucaccaacguguacgccgacuccuucgugauccgcggggacgagguccggcagaucgcccccggccagaccgggaagaucgccgacuacaacuacaagcugccggacgacuucacgggcugcgugaucgcguggaacagcaacaaccucgacuccaaggucgggggcaacuacaacuaccuguaccgccuguuccgcaagagcaaccucaagcccuucgagcgggacaucuccaccgagaucuaccaggccggcagcacccccugcaacgggguggagggcuucaacugcuacuucccccugcaguccuacggguuccagccgaccaacggcgugggguaccagcccuaccggguggucgugcugagcuucgagcuccugcacgcccccgccacggugugcggccccaagaaguccaccaaccuggucaagaacaagugcgugaacuucaacuucaacggccucaccgggaccggcgugcugaccgagagcaacaagaaguuccugccguuccagcaguucgggcgcgacaucgccgacacgaccgacgcgguccgcgacccccagacccuggagauccucgacaucacccccugcagcuucggcgggguguccgugaucacgccgggcaccaacaccagcaaccaggucgccgugcuguaccagggcgugaacugcaccgagguccccguggccauccacgccgaccagcugacgcccaccuggcggguguacuccaccggcagcaacgucuuccagacccgcgccgggugccucaucggcgcggagcacgugaacaacuccuacgagugcgacauccccaucggggccggcaucugcgccagcuaccagacgcagaccaacuccccgcggcgcgcccggagcguggcgucccagagcaucaucgccuacaccaugucccugggcgccgagaacagcgucgccuacuccaacaacagcaucgccauccccaccaacuucacgaucuccgugaccaccgagauccugcccgugagcaugaccaagacgagcgucgacugcaccauguacaucugcggggacuccaccgagugcagcaaccuccugcugcaguacggcuccuucugcacccagcucaaccgcgcgcugacggggaucgccguggagcaggacaagaacacccaggagguguucgcccaggucaagcagaucuacaagacgcccccgaucaaggacuucggcggguucaacuucagccagauccugcccgaccccuccaagcccagcaagcgguccuucaucgaggaccuccuguucaacaaggugacccuggccgacgccggcuucaucaagcaguacggcgacugccucggggacaucgcggcccgcgaccugaucugcgcccagaaguucaacggccugaccgugcucccgccccugcugaccgacgagaugaucgcccaguacaccagcgcccuccuggcggggaccaucacguccggcuggaccuucggggccggcgccgcccugcagauccccuucgcgaugcagauggccuaccgguucaacggcaucggggucacccagaacgugcucuacgagaaccagaagcugaucgccaaccaguucaacagcgccaucggcaagauccaggacucccugagcuccaccgccagcgcgcucgggaagcugcaggacguggucaaccagaacgcccaggcccugaacacgcucgugaagcagcuguccagcaacuucggcgccaucuccagcgugcugaacgacauccucucccgccuggacccgcccgaggccgaggugcagaucgaccggcugaucaccgggcgccuccagagccugcagaccuacgugacccagcagcugauccgggcggccgagauccgcgccagcgccaaccucgccgcgaccaagauguccgagugcguccugggccagagcaagcggguggacuucugcggcaagggguaccaccugauguccuucccccagagcgccccgcacggcguggucuuccuccacgugacguacguccccgcccaggagaagaacuucaccaccgcccccgcgaucugccacgacgggaaggcccacuucccccgcgagggcguguucguguccaacgggacccacugguucgucacgcagcggaacuucuacgagccgcagaucaucaccaccgacaacaccuucgugagcggcaacugcgacguggucaucggcaucgugaacaacacgguguacgacccccugcagcccgagcuggacuccuucaaggaggagcucgacaaguacuucaagaaccacaccagccccgacgucgaccugggggacaucuccggcaucaacgccagcguggugaacauccagaaggagaucgaccgccugaacgaggucgccaagaaccucaacgagucccugaucgaccugcaggagcucgggaaguacgagcaguacaucaaguggccgugguacaucuggcugggcuucaucgccggccugaucgcgaucgugaucgugaccaucaugcucugcugcaugaccagcugcugcuccugccugaaggggugcugcagcugcggcuccugcugcaaguucgacgaggacgacagcgagcccguccugaagggggugaagcuccacuacacgugaugacucgagcugguacugcaugcacgcaaugcuagcugccccuuucccguccuggguaccccgagucucccccgaccucgggucccagguaugcucccaccuccaccugccccacucaccaccucugcuaguuccagacaccucccaagcacgcagcaaugcagcucaaaacgcuuagccuagccacacccccacgggaaacagcagugauuaaccuuuagcaauaaacgaaaguuuaacuaagcuauacuaaccccaggguuggucaauuucgugccagccacacccuggagcuagcaaaaaaaaaaaaaaaaaaaaaaaaaaaaaagcauaugacuaaaaaaaaaaaaaaaaaaaaaaaaaaaaaaaaaaaaaaaaaaaaaaaaaaaaaaaaaaaaaaaaaaaaaa

SEQ ID NO: 26827 - RNA, 4277 nt, Artificial Sequence
  SARS-CoV-2/Wuhan/WIV05/2019__EPI_ISL_402128 spike protein mRNA gc (1-1273)(K986P_V987P_H69del_V70del_A222V_Y453F_S477N_D614G_I692V)
agaauaaacuaguauucuucugguccccacagacucagagagaacccgccaccauguucguguuccugguccuccugccccuggugagcucccagugcgugaaccucaccacccgcacgcagcugccgcccgccuacaccaacagcuucacccggggcgucuacuaccccgacaagguguuccgcuccagcgugcugcacuccacccaggaccucuuccugcccuucuucagcaacgucacgugguuccacgccaucuccgggaccaacggcaccaagcgguucgacaacccggugcugcccuucaacgacggggucuacuucgcgagcaccgagaaguccaacaucauccgcggcuggaucuucgggacgacccucgacagcaagacccagucccugcugaucgugaacaacgccaccaacguggucaucaaggugugcgaguuccaguucugcaacgaccccuuccucggcguguacuaccacaagaacaacaagagcuggauggaguccgaguuccgggucuacagcuccgccaacaacugcacguucgaguacgugagccagcccuuccugauggaccuggagggcaagcaggggaacuucaagaaccuccgcgaguucguguucaagaacaucgacggcuacuucaagaucuacuccaagcacaccccgaucaaccugguccgggaccugccccagggguucagcguccucgagccccugguggaccugcccaucggcaucaacaucacccgcuuccagacccuccuggcccugcaccgguccuaccucacgccgggggacagcagcuccggcuggaccgcgggcgccgccgccuacuacgugggguaccugcagccccgcaccuuccugcucaaguacaacgagaacggcaccaucacggacgcggucgacugcgcccuggacccccugagcgagaccaagugcacccucaaguccuucaccguggagaaggggaucuaccagacgagcaacuuccgggugcagcccaccgaguccaucguccgcuucccgaacaucaccaaccugugccccuucggcgagguguucaacgccacccgguucgccagcgucuacgccuggaaccgcaagcggaucuccaacugcguggcggacuacagcgugcuguacaacuccgccagcuucuccacguucaagugcuacggcgucagccccaccaagcucaacgaccugugcuucaccaacguguacgccgacuccuucgugauccgcggggacgagguccggcagaucgcccccggccagaccgggaagaucgccgacuacaacuacaagcugccggacgacuucacgggcugcgugaucgcguggaacagcaacaaccucgacuccaaggucgggggcaacuacaacuaccuguuccgccuguuccgcaagagcaaccucaagcccuucgagcgggacaucuccaccgagaucuaccaggccggcaacacccccugcaacgggguggagggcuucaacugcuacuucccccugcaguccuacggguuccagccgaccaacggcgugggguaccagcccuaccggguggucgugcugagcuucgagcuccugcacgcccccgccacggugugcggccccaagaaguccaccaaccuggucaagaacaagugcgugaacuucaacuucaacggccucaccgggaccggcgugcugaccgagagcaacaagaaguuccugccguuccagcaguucgggcgcgacaucgccgacacgaccgacgcgguccgcgacccccagacccuggagauccucgacaucacccccugcagcuucggcgggguguccgugaucacgccgggcaccaacaccagcaaccaggucgccgugcuguaccagggcgugaacugcaccgagguccccguggccauccacgccgaccagcugacgcccaccuggcggguguacuccaccggcagcaacgucuuccagacccgcgccgggugccucaucggcgcggagcacgugaacaacuccuacgagugcgacauccccaucggggccggcaucugcgccagcuaccagacgcagaccaacuccccgcggcgcgcccggagcguggcgucccagagcgucaucgccuacaccaugucccugggcgccgagaacagcgucgccuacuccaacaacagcaucgccauccccaccaacuucacgaucuccgugaccaccgagauccugcccgugagcaugaccaagacgagcgucgacugcaccauguacaucugcggggacuccaccgagugcagcaaccuccugcugcaguacggcuccuucugcacccagcucaaccgcgcgcugacggggaucgccguggagcaggacaagaacacccaggagguguucgcccaggucaagcagaucuacaagacgcccccgaucaaggacuucggcggguucaacuucagccagauccugcccgaccccuccaagcccagcaagcgguccuucaucgaggaccuccuguucaacaaggugacccuggccgacgccggcuucaucaagcaguacggcgacugccucggggacaucgcggcccgcgaccugaucugcgcccagaaguucaacggccugaccgugcucccgccccugcugaccgacgagaugaucgcccaguacaccagcgcccuccuggcggggaccaucacguccggcuggaccuucggggccggcgccgcccugcagauccccuucgcgaugcagauggccuaccgguucaacggcaucggggucacccagaacgugcucuacgagaaccagaagcugaucgccaaccaguucaacagcgccaucggcaagauccaggacucccugagcuccaccgccagcgcgcucgggaagcugcaggacguggucaaccagaacgcccaggcccugaacacgcucgugaagcagcuguccagcaacuucggcgccaucuccagcgugcugaacgacauccucucccgccuggacccgcccgaggccgaggugcagaucgaccggcugaucaccgggcgccuccagagccugcagaccuacgugacccagcagcugauccgggcggccgagauccgcgccagcgccaaccucgccgcgaccaagauguccgagugcguccugggccagagcaagcggguggacuucugcggcaagggguaccaccugauguccuucccccagagcgccccgcacggcguggucuuccuccacgugacguacguccccgcccaggagaagaacuucaccaccgcccccgcgaucugccacgacgggaaggcccacuucccccgcgagggcguguucguguccaacgggacccacugguucgucacgcagcggaacuucuacgagccgcagaucaucaccaccgacaacaccuucgugagcggcaacugcgacguggucaucggcaucgugaacaacacgguguacgacccccugcagcccgagcuggacuccuucaaggaggagcucgacaaguacuucaagaaccacaccagccccgacgucgaccugggggacaucuccggcaucaacgccagcguggugaacauccagaaggagaucgaccgccugaacgaggucgccaagaaccucaacgagucccugaucgaccugcaggagcucgggaaguacgagcaguacaucaaguggccgugguacaucuggcugggcuucaucgccggccugaucgcgaucgugauggugaccaucaugcucugcugcaugaccagcugcugcuccugccugaaggggugcugcagcugcggcuccugcugcaaguucgacgaggacgacagcgagcccguccugaagggggugaagcuccacuacacgugaugacucgagcugguacugcaugcacgcaaugcuagcugccccuuucccguccuggguaccccgagucucccccgaccucgggucccagguaugcucccaccuccaccugccccacucaccaccucugcuaguuccagacaccucccaagcacgcagcaaugcagcucaaaacgcuuagccuagccacacccccacgggaaacagcagugauuaaccuuuagcaauaaacgaaaguuuaacuaagcuauacuaaccccaggguuggucaauuucgugccagccacacccuggagcuagcaaaaaaaaaaaaaaaaaaaaaaaaaaaaaagcauaugacuaaaaaaaaaaaaaaaaaaaaaaaaaaaaaaaaaaaaaaaaaaaaaaaaaaaaaaaaaaaaaaaaaaaaaa

SEQ ID NO: 26828 - RNA, 4277 nt, Artificial Sequence
  SARS-CoV-2/Wuhan/WIV05/2019__EPI_ISL_402128 spike protein mRNA gc (1-1273)(K986P_V987P_H69del_V70del_Y453F_D614G_I692V_M1229I)
agaauaaacuaguauucuucugguccccacagacucagagagaacccgccaccauguucguguuccugguccuccugccccuggugagcucccagugcgugaaccucaccacccgcacgcagcugccgcccgccuacaccaacagcuucacccggggcgucuacuaccccgacaagguguuccgcuccagcgugcugcacuccacccaggaccucuuccugcccuucuucagcaacgucacgugguuccacgccaucuccgggaccaacggcaccaagcgguucgacaacccggugcugcccuucaacgacggggucuacuucgcgagcaccgagaaguccaacaucauccgcggcuggaucuucgggacgacccucgacagcaagacccagucccugcugaucgugaacaacgccaccaacguggucaucaaggugugcgaguuccaguucugcaacgaccccuuccucggcguguacuaccacaagaacaacaagagcuggauggaguccgaguuccgggucuacagcuccgccaacaacugcacguucgaguacgugagccagcccuuccugauggaccuggagggcaagcaggggaacuucaagaaccuccgcgaguucguguucaagaacaucgacggcuacuucaagaucuacuccaagcacaccccgaucaaccugguccgggaccugccccagggguucagcgcccucgagccccugguggaccugcccaucggcaucaacaucacccgcuuccagacccuccuggcccugcaccgguccuaccucacgccgggggacagcagcuccggcuggaccgcgggcgccgccgccuacuacgugggguaccugcagccccgcaccuuccugcucaaguacaacgagaacggcaccaucacggacgcggucgacugcgcccuggacccccugagcgagaccaagugcacccucaaguccuucaccguggagaaggggaucuaccagacgagcaacuuccgggugcagcccaccgaguccaucguccgcuucccgaacaucaccaaccugugccccuucggcgagguguucaacgccacccgguucgccagcgucuacgccuggaaccgcaagcggaucuccaacugcguggcggacuacagcgugcuguacaacuccgccagcuucuccacguucaagugcuacggcgucagccccaccaagcucaacgaccugugcuucaccaacguguacgccgacuccuucgugauccgcggggacgagguccggcagaucgcccccggccagaccgggaagaucgccgacuacaacuacaagcugccggacgacuucacgggcugcgugaucgcguggaacagcaacaaccucgacuccaaggucgggggcaacuacaacuaccuguuccgccuguuccgcaagagcaaccucaagcccuucgagcgggacaucuccaccgagaucuaccaggccggcagcacccccugcaacgggguggagggcuucaacugcuacuucccccugcaguccuacggguuccagccgaccaacggcgugggguaccagcccuaccggguggucgugcugagcuucgagcuccugcacgcccccgccacggugugcggccccaagaaguccaccaaccuggucaagaacaagugcgugaacuucaacuucaacggccucaccgggaccggcgugcugaccgagagcaacaagaaguuccugccguuccagcaguucgggcgcgacaucgccgacacgaccgacgcgguccgcgacccccagacccuggagauccucgacaucacccccugcagcuucggcgggguguccgugaucacgccgggcaccaacaccagcaaccaggucgccgugcuguaccagggcgugaacugcaccgagguccccguggccauccacgccgaccagcugacgcccaccuggcggguguacuccaccggcagcaacgucuuccagacccgcgccgggugccucaucggcgcggagcacgugaacaacuccuacgagugcgacauccccaucggggccggcaucugcgccagcuaccagacgcagaccaacuccccgcggcgcgcccggagcguggcgucccagagcgugaucgccuacaccaugucccugggcgccgagaacagcgucgccuacuccaacaacagcaucgccauccccaccaacuucacgaucuccgugaccaccgagauccugcccgugagcaugaccaagacgagcgucgacugcaccauguacaucugcggggacuccaccgagugcagcaaccuccugcugcaguacggcuccuucugcacccagcucaaccgcgcgcugacggggaucgccguggagcaggacaagaacacccaggagguguucgcccaggucaagcagaucuacaagacgcccccgaucaaggacuucggcggguucaacuucagccagauccugcccgaccccuccaagcccagcaagcgguccuucaucgaggaccuccuguucaacaaggugacccuggccgacgccggcuucaucaagcaguacggcgacugccucggggacaucgcggcccgcgaccugaucugcgcccagaaguucaacggccugaccgugcucccgccccugcugaccgacgagaugaucgcccaguacaccagcgcccuccuggcggggaccaucacguccggcuggaccuucggggccggcgccgcccugcagauccccuucgcgaugcagauggccuaccgguucaacggcaucggggucacccagaacgugcucuacgagaaccagaagcugaucgccaaccaguucaacagcgccaucggcaagauccaggacucccugagcuccaccgccagcgcgcucgggaagcugcaggacguggucaaccagaacgcccaggcccugaacacgcucgugaagcagcuguccagcaacuucggcgccaucuccagcgugcugaacgacauccucucccgccuggacccgcccgaggccgaggugcagaucgaccggcugaucaccgggcgccuccagagccugcagaccuacgugacccagcagcugauccgggcggccgagauccgcgccagcgccaaccucgccgcgaccaagauguccgagugcguccugggccagagcaagcggguggacuucugcggcaagggguaccaccugauguccuucccccagagcgccccgcacggcguggucuuccuccacgugacguacguccccgcccaggagaagaacuucaccaccgcccccgcgaucugccacgacgggaaggcccacuucccccgcgagggcguguucguguccaacgggacccacugguucgucacgcagcggaacuucuacgagccgcagaucaucaccaccgacaacaccuucgugagcggcaacugcgacguggucaucggcaucgugaacaacacgguguacgacccccugcagcccgagcuggacuccuucaaggaggagcucgacaaguacuucaagaaccacaccagccccgacgucgaccugggggacaucuccggcaucaacgccagcguggugaacauccagaaggagaucgaccgccugaacgaggucgccaagaaccucaacgagucccugaucgaccugcaggagcucgggaaguacgagcaguacaucaaguggccgugguacaucuggcugggcuucaucgccggccugaucgcgaucgugaucgugaccaucaugcucugcugcaugaccagcugcugcuccugccugaaggggugcugcagcugcggcuccugcugcaaguucgacgaggacgacagcgagcccguccugaagggggugaagcuccacuacacgugaugacucgagcugguacugcaugcacgcaaugcuagcugccccuuucccguccuggguaccccgagucucccccgaccucgggucccagguaugcucccaccuccaccugccccacucaccaccucugcuaguuccagacaccucccaagcacgcagcaaugcagcucaaaacgcuuagccuagccacacccccacgggaaacagcagugauuaaccuuuagcaauaaacgaaaguuuaacuaagcuauacuaaccccaggguuggucaauuucgugccagccacacccuggagcuagcaaaaaaaaaaaaaaaaaaaaaaaaaaaaaagcauaugacuaaaaaaaaaaaaaaaaaaaaaaaaaaaaaaaaaaaaaaaaaaaaaaaaaaaaaaaaaaaaaaaaaaaaaa

SEQ ID NO: 26829 - RNA, 4274 nt, Artificial Sequence
  SARS-CoV-2/Wuhan/WIV05/2019__EPI_ISL_402128 spike protein mRNA gc (1-1273)(K986P_V987P_K986P_V987P_H69del_V70del_Y144del_N501Y_A570 D_D614G_P681H_T716I_S982A_D1118H)
agaauaaacuaguauucuucugguccccacagacucagagagaacccgccaccauguucguguuccugguccuccugccccuggugagcucccagugcgugaaccucaccacccgcacgcagcugccgcccgccuacaccaacagcuucacccggggcgucuacuaccccgacaagguguuccgcuccagcgugcugcacuccacccaggaccucuuccugcccuucuucagcaacgucacgugguuccacgccaucuccgggaccaacggcaccaagcgguucgacaacccggugcugcccuucaacgacggggucuacuucgcgagcaccgagaaguccaacaucauccgcggcuggaucuucgggacgacccucgacagcaagacccagucccugcugaucgugaacaacgccaccaacguggucaucaaggugugcgaguuccaguucugcaacgaccccuuccucggcguguaccacaagaacaacaagagcuggauggaguccgaguuccgggucuacagcuccgccaacaacugcacguucgaguacgugagccagcccuuccugauggaccuggagggcaagcaggggaacuucaagaaccuccgcgaguucguguucaagaacaucgacggcuacuucaagaucuacuccaagcacaccccgaucaaccugguccgggaccugccccagggguucagcgcccucgagccccugguggaccugcccaucggcaucaacaucacccgcuuccagacccuccuggcccugcaccgguccuaccucacgccgggggacagcagcuccggcuggaccgcgggcgccgccgccuacuacgugggguaccugcagccccgcaccuuccugcucaaguacaacgagaacggcaccaucacggacgcggucgacugcgcccuggacccccugagcgagaccaagugcacccucaaguccuucaccguggagaaggggaucuaccagacgagcaacuuccgggugcagcccaccgaguccaucguccgcuucccgaacaucaccaaccugugccccuucggcgagguguucaacgccacccgguucgccagcgucuacgccuggaaccgcaagcggaucuccaacugcguggcggacuacagcgugcuguacaacuccgccagcuucuccacguucaagugcuacggcgucagccccaccaagcucaacgaccugugcuucaccaacguguacgccgacuccuucgugauccgcggggacgagguccggcagaucgcccccggccagaccgggaagaucgccgacuacaacuacaagcugccggacgacuucacgggcugcgugaucgcguggaacagcaacaaccucgacuccaaggucgggggcaacuacaacuaccuguaccgccuguuccgcaagagcaaccucaagcccuucgagcgggacaucuccaccgagaucuaccaggccggcagcacccccugcaacgggguggagggcuucaacugcuacuucccccugcaguccuacggguuccagccgaccuacggcgugggguaccagcccuaccggguggucgugcugagcuucgagcuccugcacgcccccgccacggugugcggccccaagaaguccaccaaccuggucaagaacaagugcgugaacuucaacuucaacggccucaccgggaccggcgugcugaccgagagcaacaagaaguuccugccguuccagcaguucgggcgcgacaucgacgacacgaccgacgcgguccgcgacccccagacccuggagauccucgacaucacccccugcagcuucggcgggguguccgugaucacgccgggcaccaacaccagcaaccaggucgccgugcuguaccagggcgugaacugcaccgagguccccguggccauccacgccgaccagcugacgcccaccuggcggguguacuccaccggcagcaacgucuuccagacccgcgccgggugccucaucggcgcggagcacgugaacaacuccuacgagugcgacauccccaucggggccggcaucugcgccagcuaccagacgcagaccaacucccaccggcgcgcccggagcguggcgucccagagcaucaucgccuacaccaugucccugggcgccgagaacagcgucgccuacuccaacaacagcaucgccauccccaucaacuucacgaucuccgugaccaccgagauccugcccgugagcaugaccaagacgagcgucgacugcaccauguacaucugcggggacuccaccgagugcagcaaccuccugcugcaguacggcuccuucugcacccagcucaaccgcgcgcugacggggaucgccguggagcaggacaagaacacccaggagguguucgcccaggucaagcagaucuacaagacgcccccgaucaaggacuucggcggguucaacuucagccagauccugcccgaccccuccaagcccagcaagcgguccuucaucgaggaccuccuguucaacaaggugacccuggccgacgccggcuucaucaagcaguacggcgacugccucggggacaucgcggcccgcgaccugaucugcgcccagaaguucaacggccugaccgugcucccgccccugcugaccgacgagaugaucgcccaguacaccagcgcccuccuggcggggaccaucacguccggcuggaccuucggggccggcgccgcccugcagauccccuucgcgaugcagauggccuaccgguucaacggcaucggggucacccagaacgugcucuacgagaaccagaagcugaucgccaaccaguucaacagcgccaucggcaagauccaggacucccugagcuccaccgccagcgcgcucgggaagcugcaggacguggucaaccagaacgcccaggcccugaacacgcucgugaagcagcuguccagcaacuucggcgccaucuccagcgugcugaacgacauccucgcccgccuggacccgcccgaggccgaggugcagaucgaccggcugaucaccgggcgccuccagagccugcagaccuacgugacccagcagcugauccgggcggccgagauccgcgccagcgccaaccucgccgcgaccaagauguccgagugcguccugggccagagcaagcggguggacuucugcggcaagggguaccaccugauguccuucccccagagcgccccgcacggcguggucuuccuccacgugacguacguccccgcccaggagaagaacuucaccaccgcccccgcgaucugccacgacgggaaggcccacuucccccgcgagggcguguucguguccaacgggacccacugguucgucacgcagcggaacuucuacgagccgcagaucaucaccacccacaacaccuucgugagcggcaacugcgacguggucaucggcaucgugaacaacacgguguacgacccccugcagcccgagcuggacuccuucaaggaggagcucgacaaguacuucaagaaccacaccagccccgacgucgaccugggggacaucuccggcaucaacgccagcguggugaacauccagaaggagaucgaccgccugaacgaggucgccaagaaccucaacgagucccugaucgaccugcaggagcucgggaaguacgagcaguacaucaaguggccgugguacaucuggcugggcuucaucgccggccugaucgcgaucgugauggugaccaucaugcucugcugcaugaccagcugcugcuccugccugaaggggugcugcagcugcggcuccugcugcaaguucgacgaggacgacagcgagcccguccugaagggggugaagcuccacuacacgugaugacucgagcugguacugcaugcacgcaaugcuagcugccccuuucccguccuggguaccccgagucucccccgaccucgggucccagguaugcucccaccuccaccugccccacucaccaccucugcuaguuccagacaccucccaagcacgcagcaaugcagcucaaaacgcuuagccuagccacacccccacgggaaacagcagugauuaaccuuuagcaauaaacgaaaguuuaacuaagcuauacuaaccccaggguuggucaauuucgugccagccacacccuggagcuagcaaaaaaaaaaaaaaaaaaaaaaaaaaaaaagcauaugacuaaaaaaaaaaaaaaaaaaaaaaaaaaaaaaaaaaaaaaaaaaaaaaaaaaaaaaaaaaaaaaaaaaaaaa

SEQ ID NO: 26830 - RNA, 4283 nt, Artificial Sequence
  SARS-CoV-2/Wuhan/WIV05/2019__EPI_ISL_402128 spike protein mRNA gc (1-1273)(K986P_V987P_K986P_V987P_K417N_E484K_N501Y_D614G)
agaauaaacuaguauucuucugguccccacagacucagagagaacccgccaccauguucguguuccugguccuccugccccuggugagcucccagugcgugaaccucaccacccgcacgcagcugccgcccgccuacaccaacagcuucacccggggcgucuacuaccccgacaagguguuccgcuccagcgugcugcacuccacccaggaccucuuccugcccuucuucagcaacgucacgugguuccacgccauccacguguccgggaccaacggcaccaagcgguucgacaacccggugcugcccuucaacgacggggucuacuucgcgagcaccgagaaguccaacaucauccgcggcuggaucuucgggacgacccucgacagcaagacccagucccugcugaucgugaacaacgccaccaacguggucaucaaggugugcgaguuccaguucugcaacgaccccuuccucggcguguacuaccacaagaacaacaagagcuggauggaguccgaguuccgggucuacagcuccgccaacaacugcacguucgaguacgugagccagcccuuccugauggaccuggagggcaagcaggggaacuucaagaaccuccgcgaguucguguucaagaacaucgacggcuacuucaagaucuacuccaagcacaccccgaucaaccugguccgggaccugccccagggguucagcgcccucgagccccugguggaccugcccaucggcaucaacaucacccgcuuccagacccuccuggcccugcaccgguccuaccucacgccgggggacagcagcuccggcuggaccgcgggcgccgccgccuacuacgugggguaccugcagccccgcaccuuccugcucaaguacaacgagaacggcaccaucacggacgcggucgacugcgcccuggacccccugagcgagaccaagugcacccucaaguccuucaccguggagaaggggaucuaccagacgagcaacuuccgggugcagcccaccgaguccaucguccgcuucccgaacaucaccaaccugugccccuucggcgagguguucaacgccacccgguucgccagcgucuacgccuggaaccgcaagcggaucuccaacugcguggcggacuacagcgugcuguacaacuccgccagcuucuccacguucaagugcuacggcgucagccccaccaagcucaacgaccugugcuucaccaacguguacgccgacuccuucgugauccgcggggacgagguccggcagaucgcccccggccagaccgggaacaucgccgacuacaacuacaagcugccggacgacuucacgggcugcgugaucgcguggaacagcaacaaccucgacuccaaggucgggggcaacuacaacuaccuguaccgccuguuccgcaagagcaaccucaagcccuucgagcgggacaucuccaccgagaucuaccaggccggcagcacccccugcaacggggugaagggcuucaacugcuacuucccccugcaguccuacggguuccagccgaccuacggcgugggguaccagcccuaccggguggucgugcugagcuucgagcuccugcacgcccccgccacggugugcggccccaagaaguccaccaaccuggucaagaacaagugcgugaacuucaacuucaacggccucaccgggaccggcgugcugaccgagagcaacaagaaguuccugccguuccagcaguucgggcgcgacaucgccgacacgaccgacgcgguccgcgacccccagacccuggagauccucgacaucacccccugcagcuucggcgggguguccgugaucacgccgggcaccaacaccagcaaccaggucgccgugcuguaccagggcgugaacugcaccgagguccccguggccauccacgccgaccagcugacgcccaccuggcggguguacuccaccggcagcaacgucuuccagacccgcgccgggugccucaucggcgcggagcacgugaacaacuccuacgagugcgacauccccaucggggccggcaucugcgccagcuaccagacgcagaccaacuccccgcggcgcgcccggagcguggcgucccagagcaucaucgccuacaccaugucccugggcgccgagaacagcgucgccuacuccaacaacagcaucgccauccccaccaacuucacgaucuccgugaccaccgagauccugcccgugagcaugaccaagacgagcgucgacugcaccauguacaucugcggggacuccaccgagugcagcaaccuccugcugcaguacggcuccuucugcacccagcucaaccgcgcgcugacggggaucgccguggagcaggacaagaacacccaggagguguucgcccaggucaagcagaucuacaagacgcccccgaucaaggacuucggcggguucaacuucagccagauccugcccgaccccuccaagcccagcaagcgguccuucaucgaggaccuccuguucaacaaggugacccuggccgacgccggcuucaucaagcaguacggcgacugccucggggacaucgcggcccgcgaccugaucugcgcccagaaguucaacggccugaccgugcucccgccccugcugaccgacgagaugaucgcccaguacaccagcgcccuccuggcggggaccaucacguccggcuggaccuucggggccggcgccgcccugcagauccccuucgcgaugcagauggccuaccgguucaacggcaucggggucacccagaacgugcucuacgagaaccagaagcugaucgccaaccaguucaacagcgccaucggcaagauccaggacucccugagcuccaccgccagcgcgcucgggaagcugcaggacguggucaaccagaacgcccaggcccugaacacgcucgugaagcagcuguccagcaacuucggcgccaucuccagcgugcugaacgacauccucucccgccuggacccgcccgaggccgaggugcagaucgaccggcugaucaccgggcgccuccagagccugcagaccuacgugacccagcagcugauccgggcggccgagauccgcgccagcgccaaccucgccgcgaccaagauguccgagugcguccugggccagagcaagcggguggacuucugcggcaagggguaccaccugauguccuucccccagagcgccccgcacggcguggucuuccuccacgugacguacguccccgcccaggagaagaacuucaccaccgcccccgcgaucugccacgacgggaaggcccacuucccccgcgagggcguguucguguccaacgggacccacugguucgucacgcagcggaacuucuacgagccgcagaucaucaccaccgacaacaccuucgugagcggcaacugcgacguggucaucggcaucgugaacaacacgguguacgacccccugcagcccgagcuggacuccuucaaggaggagcucgacaaguacuucaagaaccacaccagccccgacgucgaccugggggacaucuccggcaucaacgccagcguggugaacauccagaaggagaucgaccgccugaacgaggucgccaagaaccucaacgagucccugaucgaccugcaggagcucgggaaguacgagcaguacaucaaguggccgugguacaucuggcugggcuucaucgccggccugaucgcgaucgugauggugaccaucaugcucugcugcaugaccagcugcugcuccugccugaaggggugcugcagcugcggcuccugcugcaaguucgacgaggacgacagcgagcccguccugaagggggugaagcuccacuacacgugaugacucgagcugguacugcaugcacgcaaugcuagcugccccuuucccguccuggguaccccgagucucccccgaccucgggucccagguaugcucccaccuccaccugccccacucaccaccucugcuaguuccagacaccucccaagcacgcagcaaugcagcucaaaacgcuuagccuagccacacccccacgggaaacagcagugauuaaccuuuagcaauaaacgaaaguuuaacuaagcuauacuaaccccaggguuggucaauuucgugccagccacacccuggagcuagcaaaaaaaaaaaaaaaaaaaaaaaaaaaaaagcauaugacuaaaaaaaaaaaaaaaaaaaaaaaaaaaaaaaaaaaaaaaaaaaaaaaaaaaaaaaaaaaaaaaaaaaaaa

SEQ ID NO: 26831 - RNA, 4274 nt, Artificial Sequence
  SARS-CoV-2/Wuhan/WIV05/2019__EPI_ISL_402128 spike protein mRNA gc (1-1273)(K986P_V987P_K986P_V987P_L18F_D80A_D215G_L242del_A243del_ L244del_R246I_K417N_E484K_N501Y_D614G_A701V)
agaauaaacuaguauucuucugguccccacagacucagagagaacccgccaccauguucguguuccugguccuccugccccuggugagcucccagugcgugaacuucaccacccgcacgcagcugccgcccgccuacaccaacagcuucacccggggcgucuacuaccccgacaagguguuccgcuccagcgugcugcacuccacccaggaccucuuccugcccuucuucagcaacgucacgugguuccacgccauccacguguccgggaccaacggcaccaagcgguucgccaacccggugcugcccuucaacgacggggucuacuucgcgagcaccgagaaguccaacaucauccgcggcuggaucuucgggacgacccucgacagcaagacccagucccugcugaucgugaacaacgccaccaacguggucaucaaggugugcgaguuccaguucugcaacgaccccuuccucggcguguacuaccacaagaacaacaagagcuggauggaguccgaguuccgggucuacagcuccgccaacaacugcacguucgaguacgugagccagcccuuccugauggaccuggagggcaagcaggggaacuucaagaaccuccgcgaguucguguucaagaacaucgacggcuacuucaagaucuacuccaagcacaccccgaucaaccugguccggggccugccccagggguucagcgcccucgagccccugguggaccugcccaucggcaucaacaucacccgcuuccagacccuccacaucuccuaccucacgccgggggacagcagcuccggcuggaccgcgggcgccgccgccuacuacgugggguaccugcagccccgcaccuuccugcucaaguacaacgagaacggcaccaucacggacgcggucgacugcgcccuggacccccugagcgagaccaagugcacccucaaguccuucaccguggagaaggggaucuaccagacgagcaacuuccgggugcagcccaccgaguccaucguccgcuucccgaacaucaccaaccugugccccuucggcgagguguucaacgccacccgguucgccagcgucuacgccuggaaccgcaagcggaucuccaacugcguggcggacuacagcgugcuguacaacuccgccagcuucuccacguucaagugcuacggcgucagccccaccaagcucaacgaccugugcuucaccaacguguacgccgacuccuucgugauccgcggggacgagguccggcagaucgcccccggccagaccgggaacaucgccgacuacaacuacaagcugccggacgacuucacgggcugcgugaucgcguggaacagcaacaaccucgacuccaaggucgggggcaacuacaacuaccuguaccgccuguuccgcaagagcaaccucaagcccuucgagcgggacaucuccaccgagaucuaccaggccggcagcacccccugcaacggggugaagggcuucaacugcuacuucccccugcaguccuacggguuccagccgaccuacggcgugggguaccagcccuaccggguggucgugcugagcuucgagcuccugcacgcccccgccacggugugcggccccaagaaguccaccaaccuggucaagaacaagugcgugaacuucaacuucaacggccucaccgggaccggcgugcugaccgagagcaacaagaaguuccugccguuccagcaguucgggcgcgacaucgccgacacgaccgacgcgguccgcgacccccagacccuggagauccucgacaucacccccugcagcuucggcgggguguccgugaucacgccgggcaccaacaccagcaaccaggucgccgugcuguaccagggcgugaacugcaccgagguccccguggccauccacgccgaccagcugacgcccaccuggcggguguacuccaccggcagcaacgucuuccagacccgcgccgggugccucaucggcgcggagcacgugaacaacuccuacgagugcgacauccccaucggggccggcaucugcgccagcuaccagacgcagaccaacuccccgcggcgcgcccggagcguggcgucccagagcaucaucgccuacaccaugucccugggcguggagaacagcgucgccuacuccaacaacagcaucgccauccccaccaacuucacgaucuccgugaccaccgagauccugcccgugagcaugaccaagacgagcgucgacugcaccauguacaucugcggggacuccaccgagugcagcaaccuccugcugcaguacggcuccuucugcacccagcucaaccgcgcgcugacggggaucgccguggagcaggacaagaacacccaggagguguucgcccaggucaagcagaucuacaagacgcccccgaucaaggacuucggcggguucaacuucagccagauccugcccgaccccuccaagcccagcaagcgguccuucaucgaggaccuccuguucaacaaggugacccuggccgacgccggcuucaucaagcaguacggcgacugccucggggacaucgcggcccgcgaccugaucugcgcccagaaguucaacggccugaccgugcucccgccccugcugaccgacgagaugaucgcccaguacaccagcgcccuccuggcggggaccaucacguccggcuggaccuucggggccggcgccgcccugcagauccccuucgcgaugcagauggccuaccgguucaacggcaucggggucacccagaacgugcucuacgagaaccagaagcugaucgccaaccaguucaacagcgccaucggcaagauccaggacucccugagcuccaccgccagcgcgcucgggaagcugcaggacguggucaaccagaacgcccaggcccugaacacgcucgugaagcagcuguccagcaacuucggcgccaucuccagcgugcugaacgacauccucucccgccuggacccgcccgaggccgaggugcagaucgaccggcugaucaccgggcgccuccagagccugcagaccuacgugacccagcagcugauccgggcggccgagauccgcgccagcgccaaccucgccgcgaccaagauguccgagugcguccugggccagagcaagcggguggacuucugcggcaagggguaccaccugauguccuucccccagagcgccccgcacggcguggucuuccuccacgugacguacguccccgcccaggagaagaacuucaccaccgcccccgcgaucugccacgacgggaaggcccacuucccccgcgagggcguguucguguccaacgggacccacugguucgucacgcagcggaacuucuacgagccgcagaucaucaccaccgacaacaccuucgugagcggcaacugcgacguggucaucggcaucgugaacaacacgguguacgacccccugcagcccgagcuggacuccuucaaggaggagcucgacaaguacuucaagaaccacaccagccccgacgucgaccugggggacaucuccggcaucaacgccagcguggugaacauccagaaggagaucgaccgccugaacgaggucgccaagaaccucaacgagucccugaucgaccugcaggagcucgggaaguacgagcaguacaucaaguggccgugguacaucuggcugggcuucaucgccggccugaucgcgaucgugauggugaccaucaugcucugcugcaugaccagcugcugcuccugccugaaggggugcugcagcugcggcuccugcugcaaguucgacgaggacgacagcgagcccguccugaagggggugaagcuccacuacacgugaugacucgagcugguacugcaugcacgcaaugcuagcugccccuuucccguccuggguaccccgagucucccccgaccucgggucccagguaugcucccaccuccaccugccccacucaccaccucugcuaguuccagacaccucccaagcacgcagcaaugcagcucaaaacgcuuagccuagccacacccccacgggaaacagcagugauuaaccuuuagcaauaaacgaaaguuuaacuaagcuauacuaaccccaggguuggucaauuucgugccagccacacccuggagcuagcaaaaaaaaaaaaaaaaaaaaaaaaaaaaaagcauaugacuaaaaaaaaaaaaaaaaaaaaaaaaaaaaaaaaaaaaaaaaaaaaaaaaaaaaaaaaaaaaaaaaaaaaaa

SEQ ID NO: 26832 - RNA, 4283 nt, Artificial Sequence
  SARS-CoV-2/Wuhan/WIV05/2019__EPI_ISL_402128 spike protein mRNA gc (1-1273)(K986P_V987P_K986P_V987P_E484K_D614G)
agaauaaacuaguauucuucugguccccacagacucagagagaacccgccaccauguucguguuccugguccuccugccccuggugagcucccagugcgugaaccucaccacccgcacgcagcugccgcccgccuacaccaacagcuucacccggggcgucuacuaccccgacaagguguuccgcuccagcgugcugcacuccacccaggaccucuuccugcccuucuucagcaacgucacgugguuccacgccauccacguguccgggaccaacggcaccaagcgguucgacaacccggugcugcccuucaacgacggggucuacuucgcgagcaccgagaaguccaacaucauccgcggcuggaucuucgggacgacccucgacagcaagacccagucccugcugaucgugaacaacgccaccaacguggucaucaaggugugcgaguuccaguucugcaacgaccccuuccucggcguguacuaccacaagaacaacaagagcuggauggaguccgaguuccgggucuacagcuccgccaacaacugcacguucgaguacgugagccagcccuuccugauggaccuggagggcaagcaggggaacuucaagaaccuccgcgaguucguguucaagaacaucgacggcuacuucaagaucuacuccaagcacaccccgaucaaccugguccgggaccugccccagggguucagcgcccucgagccccugguggaccugcccaucggcaucaacaucacccgcuuccagacccuccuggcccugcaccgguccuaccucacgccgggggacagcagcuccggcuggaccgcgggcgccgccgccuacuacgugggguaccugcagccccgcaccuuccugcucaaguacaacgagaacggcaccaucacggacgcggucgacugcgcccuggacccccugagcgagaccaagugcacccucaaguccuucaccguggagaaggggaucuaccagacgagcaacuuccgggugcagcccaccgaguccaucguccgcuucccgaacaucaccaaccugugccccuucggcgagguguucaacgccacccgguucgccagcgucuacgccuggaaccgcaagcggaucuccaacugcguggcggacuacagcgugcuguacaacuccgccagcuucuccacguucaagugcuacggcgucagccccaccaagcucaacgaccugugcuucaccaacguguacgccgacuccuucgugauccgcggggacgagguccggcagaucgcccccggccagaccgggaagaucgccgacuacaacuacaagcugccggacgacuucacgggcugcgugaucgcguggaacagcaacaaccucgacuccaaggucgggggcaacuacaacuaccuguaccgccuguuccgcaagagcaaccucaagcccuucgagcgggacaucuccaccgagaucuaccaggccggcagcacccccugcaacggggugaagggcuucaacugcuacuucccccugcaguccuacggguuccagccgaccaacggcgugggguaccagcccuaccggguggucgugcugagcuucgagcuccugcacgcccccgccacggugugcggccccaagaaguccaccaaccuggucaagaacaagugcgugaacuucaacuucaacggccucaccgggaccggcgugcugaccgagagcaacaagaaguuccugccguuccagcaguucgggcgcgacaucgccgacacgaccgacgcgguccgcgacccccagacccuggagauccucgacaucacccccugcagcuucggcgggguguccgugaucacgccgggcaccaacaccagcaaccaggucgccgugcuguaccagggcgugaacugcaccgagguccccguggccauccacgccgaccagcugacgcccaccuggcggguguacuccaccggcagcaacgucuuccagacccgcgccgggugccucaucggcgcggagcacgugaacaacuccuacgagugcgacauccccaucggggccggcaucugcgccagcuaccagacgcagaccaacuccccgcggcgcgcccggagcguggcgucccagagcaucaucgccuacaccaugucccugggcgccgagaacagcgucgccuacuccaacaacagcaucgccauccccaccaacuucacgaucuccgugaccaccgagauccugcccgugagcaugaccaagacgagcgucgacugcaccauguacaucugcggggacuccaccgagugcagcaaccuccugcugcaguacggcuccuucugcacccagcucaaccgcgcgcugacggggaucgccguggagcaggacaagaacacccaggagguguucgcccaggucaagcagaucuacaagacgcccccgaucaaggacuucggcggguucaacuucagccagauccugcccgaccccuccaagcccagcaagcgguccuucaucgaggaccuccuguucaacaaggugacccuggccgacgccggcuucaucaagcaguacggcgacugccucggggacaucgcggcccgcgaccugaucugcgcccagaaguucaacggccugaccgugcucccgccccugcugaccgacgagaugaucgcccaguacaccagcgcccuccuggcggggaccaucacguccggcuggaccuucggggccggcgccgcccugcagauccccuucgcgaugcagauggccuaccgguucaacggcaucggggucacccagaacgugcucuacgagaaccagaagcugaucgccaaccaguucaacagcgccaucggcaagauccaggacucccugagcuccaccgccagcgcgcucgggaagcugcaggacguggucaaccagaacgcccaggcccugaacacgcucgugaagcagcuguccagcaacuucggcgccaucuccagcgugcugaacgacauccucucccgccuggacccgcccgaggccgaggugcagaucgaccggcugaucaccgggcgccuccagagccugcagaccuacgugacccagcagcugauccgggcggccgagauccgcgccagcgccaaccucgccgcgaccaagauguccgagugcguccugggccagagcaagcggguggacuucugcggcaagggguaccaccugauguccuucccccagagcgccccgcacggcguggucuuccuccacgugacguacguccccgcccaggagaagaacuucaccaccgcccccgcgaucugccacgacgggaaggcccacuucccccgcgagggcguguucguguccaacgggacccacugguucgucacgcagcggaacuucuacgagccgcagaucaucaccaccgacaacaccuucgugagcggcaacugcgacguggucaucggcaucgugaacaacacgguguacgacccccugcagcccgagcuggacuccuucaaggaggagcucgacaaguacuucaagaaccacaccagccccgacgucgaccugggggacaucuccggcaucaacgccagcguggugaacauccagaaggagaucgaccgccugaacgaggucgccaagaaccucaacgagucccugaucgaccugcaggagcucgggaaguacgagcaguacaucaaguggccgugguacaucuggcugggcuucaucgccggccugaucgcgaucgugauggugaccaucaugcucugcugcaugaccagcugcugcuccugccugaaggggugcugcagcugcggcuccugcugcaaguucgacgaggacgacagcgagcccguccugaagggggugaagcuccacuacacgugaugacucgagcugguacugcaugcacgcaaugcuagcugccccuuucccguccuggguaccccgagucucccccgaccucgggucccagguaugcucccaccuccaccugccccacucaccaccucugcuaguuccagacaccucccaagcacgcagcaaugcagcucaaaacgcuuagccuagccacacccccacgggaaacagcagugauuaaccuuuagcaauaaacgaaaguuuaacuaagcuauacuaaccccaggguuggucaauuucgugccagccacacccuggagcuagcaaaaaaaaaaaaaaaaaaaaaaaaaaaaaagcauaugacuaaaaaaaaaaaaaaaaaaaaaaaaaaaaaaaaaaaaaaaaaaaaaaaaaaaaaaaaaaaaaaaaaaaaaa

SEQ ID NO: 26833 - RNA, 4283 nt, Artificial Sequence
  SARS-CoV-2/Wuhan/WIV05/2019__EPI_ISL_402128 spike protein mRNA gc (1-1273)(K986P_V987P_K986P_V987P_L18F_T20N_P26S_D138Y_R190S_K417T _E484K_N501Y_D614G_H655Y_T1027I)
agaauaaacuaguauucuucugguccccacagacucagagagaacccgccaccauguucguguuccugguccuccugccccuggugagcucccagugcgugaacuucaccaaccgcacgcagcugccgagcgccuacaccaacagcuucacccggggcgucuacuaccccgacaagguguuccgcuccagcgugcugcacuccacccaggaccucuuccugcccuucuucagcaacgucacgugguuccacgccauccacguguccgggaccaacggcaccaagcgguucgacaacccggugcugcccuucaacgacggggucuacuucgcgagcaccgagaaguccaacaucauccgcggcuggaucuucgggacgacccucgacagcaagacccagucccugcugaucgugaacaacgccaccaacguggucaucaaggugugcgaguuccaguucugcaacuaccccuuccucggcguguacuaccacaagaacaacaagagcuggauggaguccgaguuccgggucuacagcuccgccaacaacugcacguucgaguacgugagccagcccuuccugauggaccuggagggcaagcaggggaacuucaagaaccucagcgaguucguguucaagaacaucgacggcuacuucaagaucuacuccaagcacaccccgaucaaccugguccgggaccugccccagggguucagcgcccucgagccccugguggaccugcccaucggcaucaacaucacccgcuuccagacccuccuggcccugcaccgguccuaccucacgccgggggacagcagcuccggcuggaccgcgggcgccgccgccuacuacgugggguaccugcagccccgcaccuuccugcucaaguacaacgagaacggcaccaucacggacgcggucgacugcgcccuggacccccugagcgagaccaagugcacccucaaguccuucaccguggagaaggggaucuaccagacgagcaacuuccgggugcagcccaccgaguccaucguccgcuucccgaacaucaccaaccugugccccuucggcgagguguucaacgccacccgguucgccagcgucuacgccuggaaccgcaagcggaucuccaacugcguggcggacuacagcgugcuguacaacuccgccagcuucuccacguucaagugcuacggcgucagccccaccaagcucaacgaccugugcuucaccaacguguacgccgacuccuucgugauccgcggggacgagguccggcagaucgcccccggccagaccgggaccaucgccgacuacaacuacaagcugccggacgacuucacgggcugcgugaucgcguggaacagcaacaaccucgacuccaaggucgggggcaacuacaacuaccuguaccgccuguuccgcaagagcaaccucaagcccuucgagcgggacaucuccaccgagaucuaccaggccggcagcacccccugcaacggggugaagggcuucaacugcuacuucccccugcaguccuacggguuccagccgaccuacggcgugggguaccagcccuaccggguggucgugcugagcuucgagcuccugcacgcccccgccacggugugcggccccaagaaguccaccaaccuggucaagaacaagugcgugaacuucaacuucaacggccucaccgggaccggcgugcugaccgagagcaacaagaaguuccugccguuccagcaguucgggcgcgacaucgccgacacgaccgacgcgguccgcgacccccagacccuggagauccucgacaucacccccugcagcuucggcgggguguccgugaucacgccgggcaccaacaccagcaaccaggucgccgugcuguaccagggcgugaacugcaccgagguccccguggccauccacgccgaccagcugacgcccaccuggcggguguacuccaccggcagcaacgucuuccagacccgcgccgggugccucaucggcgcggaguacgugaacaacuccuacgagugcgacauccccaucggggccggcaucugcgccagcuaccagacgcagaccaacuccccgcggcgcgcccggagcguggcgucccagagcaucaucgccuacaccaugucccugggcgccgagaacagcgucgccuacuccaacaacagcaucgccauccccaccaacuucacgaucuccgugaccaccgagauccugcccgugagcaugaccaagacgagcgucgacugcaccauguacaucugcggggacuccaccgagugcagcaaccuccugcugcaguacggcuccuucugcacccagcucaaccgcgcgcugacggggaucgccguggagcaggacaagaacacccaggagguguucgcccaggucaagcagaucuacaagacgcccccgaucaaggacuucggcggguucaacuucagccagauccugcccgaccccuccaagcccagcaagcgguccuucaucgaggaccuccuguucaacaaggugacccuggccgacgccggcuucaucaagcaguacggcgacugccucggggacaucgcggcccgcgaccugaucugcgcccagaaguucaacggccugaccgugcucccgccccugcugaccgacgagaugaucgcccaguacaccagcgcccuccuggcggggaccaucacguccggcuggaccuucggggccggcgccgcccugcagauccccuucgcgaugcagauggccuaccgguucaacggcaucggggucacccagaacgugcucuacgagaaccagaagcugaucgccaaccaguucaacagcgccaucggcaagauccaggacucccugagcuccaccgccagcgcgcucgggaagcugcaggacguggucaaccagaacgcccaggcccugaacacgcucgugaagcagcuguccagcaacuucggcgccaucuccagcgugcugaacgacauccucucccgccuggacccgcccgaggccgaggugcagaucgaccggcugaucaccgggcgccuccagagccugcagaccuacgugacccagcagcugauccgggcggccgagauccgcgccagcgccaaccucgccgcgaucaagauguccgagugcguccugggccagagcaagcggguggacuucugcggcaagggguaccaccugauguccuucccccagagcgccccgcacggcguggucuuccuccacgugacguacguccccgcccaggagaagaacuucaccaccgcccccgcgaucugccacgacgggaaggcccacuucccccgcgagggcguguucguguccaacgggacccacugguucgucacgcagcggaacuucuacgagccgcagaucaucaccaccgacaacaccuucgugagcggcaacugcgacguggucaucggcaucgugaacaacacgguguacgacccccugcagcccgagcuggacuccuucaaggaggagcucgacaaguacuucaagaaccacaccagccccgacgucgaccugggggacaucuccggcaucaacgccagcguggugaacauccagaaggagaucgaccgccugaacgaggucgccaagaaccucaacgagucccugaucgaccugcaggagcucgggaaguacgagcaguacaucaaguggccgugguacaucuggcugggcuucaucgccggccugaucgcgaucgugauggugaccaucaugcucugcugcaugaccagcugcugcuccugccugaaggggugcugcagcugcggcuccugcugcaaguucgacgaggacgacagcgagcccguccugaagggggugaagcuccacuacacgugaugacucgagcugguacugcaugcacgcaaugcuagcugccccuuucccguccuggguaccccgagucucccccgaccucgggucccagguaugcucccaccuccaccugccccacucaccaccucugcuaguuccagacaccucccaagcacgcagcaaugcagcucaaaacgcuuagccuagccacacccccacgggaaacagcagugauuaaccuuuagcaauaaacgaaaguuuaacuaagcuauacuaaccccaggguuggucaauuucgugccagccacacccuggagcuagcaaaaaaaaaaaaaaaaaaaaaaaaaaaaaagcauaugacuaaaaaaaaaaaaaaaaaaaaaaaaaaaaaaaaaaaaaaaaaaaaaaaaaaaaaaaaaaaaaaaaaaaaaa

SEQ ID NO: 26834 - RNA, 4283 nt, Artificial Sequence
  SARS-CoV-2/Wuhan/WIV05/2019__EPI_ISL_402128 spike protein mRNA gc (1-1273)(K986P_V987P_K986P_V987P_S13I_W152C_L452R_D614G)
agaauaaacuaguauucuucugguccccacagacucagagagaacccgccaccauguucguguuccugguccuccugccccuggugagcauccagugcgugaaccucaccacccgcacgcagcugccgcccgccuacaccaacagcuucacccggggcgucuacuaccccgacaagguguuccgcuccagcgugcugcacuccacccaggaccucuuccugcccuucuucagcaacgucacgugguuccacgccauccacguguccgggaccaacggcaccaagcgguucgacaacccggugcugcccuucaacgacggggucuacuucgcgagcaccgagaaguccaacaucauccgcggcuggaucuucgggacgacccucgacagcaagacccagucccugcugaucgugaacaacgccaccaacguggucaucaaggugugcgaguuccaguucugcaacgaccccuuccucggcguguacuaccacaagaacaacaagagcugcauggaguccgaguuccgggucuacagcuccgccaacaacugcacguucgaguacgugagccagcccuuccugauggaccuggagggcaagcaggggaacuucaagaaccuccgcgaguucguguucaagaacaucgacggcuacuucaagaucuacuccaagcacaccccgaucaaccugguccgggaccugccccagggguucagcgcccucgagccccugguggaccugcccaucggcaucaacaucacccgcuuccagacccuccuggcccugcaccgguccuaccucacgccgggggacagcagcuccggcuggaccgcgggcgccgccgccuacuacgugggguaccugcagccccgcaccuuccugcucaaguacaacgagaacggcaccaucacggacgcggucgacugcgcccuggacccccugagcgagaccaagugcacccucaaguccuucaccguggagaaggggaucuaccagacgagcaacuuccgggugcagcccaccgaguccaucguccgcuucccgaacaucaccaaccugugccccuucggcgagguguucaacgccacccgguucgccagcgucuacgccuggaaccgcaagcggaucuccaacugcguggcggacuacagcgugcuguacaacuccgccagcuucuccacguucaagugcuacggcgucagccccaccaagcucaacgaccugugcuucaccaacguguacgccgacuccuucgugauccgcggggacgagguccggcagaucgcccccggccagaccgggaagaucgccgacuacaacuacaagcugccggacgacuucacgggcugcgugaucgcguggaacagcaacaaccucgacuccaaggucgggggcaacuacaacuaccgcuaccgccuguuccgcaagagcaaccucaagcccuucgagcgggacaucuccaccgagaucuaccaggccggcagcacccccugcaacgggguggagggcuucaacugcuacuucccccugcaguccuacggguuccagccgaccaacggcgugggguaccagcccuaccggguggucgugcugagcuucgagcuccugcacgcccccgccacggugugcggccccaagaaguccaccaaccuggucaagaacaagugcgugaacuucaacuucaacggccucaccgggaccggcgugcugaccgagagcaacaagaaguuccugccguuccagcaguucgggcgcgacaucgccgacacgaccgacgcgguccgcgacccccagacccuggagauccucgacaucacccccugcagcuucggcgggguguccgugaucacgccgggcaccaacaccagcaaccaggucgccgugcuguaccagggcgugaacugcaccgagguccccguggccauccacgccgaccagcugacgcccaccuggcggguguacuccaccggcagcaacgucuuccagacccgcgccgggugccucaucggcgcggagcacgugaacaacuccuacgagugcgacauccccaucggggccggcaucugcgccagcuaccagacgcagaccaacuccccgcggcgcgcccggagcguggcgucccagagcaucaucgccuacaccaugucccugggcgccgagaacagcgucgccuacuccaacaacagcaucgccauccccaccaacuucacgaucuccgugaccaccgagauccugcccgugagcaugaccaagacgagcgucgacugcaccauguacaucugcggggacuccaccgagugcagcaaccuccugcugcaguacggcuccuucugcacccagcucaaccgcgcgcugacggggaucgccguggagcaggacaagaacacccaggagguguucgcccaggucaagcagaucuacaagacgcccccgaucaaggacuucggcggguucaacuucagccagauccugcccgaccccuccaagcccagcaagcgguccuucaucgaggaccuccuguucaacaaggugacccuggccgacgccggcuucaucaagcaguacggcgacugccucggggacaucgcggcccgcgaccugaucugcgcccagaaguucaacggccugaccgugcucccgccccugcugaccgacgagaugaucgcccaguacaccagcgcccuccuggcggggaccaucacguccggcuggaccuucggggccggcgccgcccugcagauccccuucgcgaugcagauggccuaccgguucaacggcaucggggucacccagaacgugcucuacgagaaccagaagcugaucgccaaccaguucaacagcgccaucggcaagauccaggacucccugagcuccaccgccagcgcgcucgggaagcugcaggacguggucaaccagaacgcccaggcccugaacacgcucgugaagcagcuguccagcaacuucggcgccaucuccagcgugcugaacgacauccucucccgccuggacccgcccgaggccgaggugcagaucgaccggcugaucaccgggcgccuccagagccugcagaccuacgugacccagcagcugauccgggcggccgagauccgcgccagcgccaaccucgccgcgaccaagauguccgagugcguccugggccagagcaagcggguggacuucugcggcaagggguaccaccugauguccuucccccagagcgccccgcacggcguggucuuccuccacgugacguacguccccgcccaggagaagaacuucaccaccgcccccgcgaucugccacgacgggaaggcccacuucccccgcgagggcguguucguguccaacgggacccacugguucgucacgcagcggaacuucuacgagccgcagaucaucaccaccgacaacaccuucgugagcggcaacugcgacguggucaucggcaucgugaacaacacgguguacgacccccugcagcccgagcuggacuccuucaaggaggagcucgacaaguacuucaagaaccacaccagccccgacgucgaccugggggacaucuccggcaucaacgccagcguggugaacauccagaaggagaucgaccgccugaacgaggucgccaagaaccucaacgagucccugaucgaccugcaggagcucgggaaguacgagcaguacaucaaguggccgugguacaucuggcugggcuucaucgccggccugaucgcgaucgugauggugaccaucaugcucugcugcaugaccagcugcugcuccugccugaaggggugcugcagcugcggcuccugcugcaaguucgacgaggacgacagcgagcccguccugaagggggugaagcuccacuacacgugaugacucgagcugguacugcaugcacgcaaugcuagcugccccuuucccguccuggguaccccgagucucccccgaccucgggucccagguaugcucccaccuccaccugccccacucaccaccucugcuaguuccagacaccucccaagcacgcagcaaugcagcucaaaacgcuuagccuagccacacccccacgggaaacagcagugauuaaccuuuagcaauaaacgaaaguuuaacuaagcuauacuaaccccaggguuggucaauuucgugccagccacacccuggagcuagcaaaaaaaaaaaaaaaaaaaaaaaaaaaaaagcauaugacuaaaaaaaaaaaaaaaaaaaaaaaaaaaaaaaaaaaaaaaaaaaaaaaaaaaaaaaaaaaaaaaaaaaaaa

SEQ ID NO: 26835 - RNA, 4283 nt, Artificial Sequence
  SARS-CoV-2/Wuhan/WIV05/2019__EPI_ISL_402128 spike protein mRNA gc (1-1273)(K986P_V987P)
agaauaaacuaguauucuucugguccccacagacucagagagaacccgccaccauguucguguuccugguccuccugccccuggugagcucccagugcgugaaccucaccacccgcacgcagcugccgcccgccuacaccaacagcuucacccggggcgucuacuaccccgacaagguguuccgcuccagcgugcugcacuccacccaggaccucuuccugcccuucuucagcaacgucacgugguuccacgccauccacguguccgggaccaacggcaccaagcgguucgacaacccggugcugcccuucaacgacggggucuacuucgcgagcaccgagaaguccaacaucauccgcggcuggaucuucgggacgacccucgacagcaagacccagucccugcugaucgugaacaacgccaccaacguggucaucaaggugugcgaguuccaguucugcaacgaccccuuccucggcguguacuaccacaagaacaacaagagcuggauggaguccgaguuccgggucuacagcuccgccaacaacugcacguucgaguacgugagccagcccuuccugauggaccuggagggcaagcaggggaacuucaagaaccuccgcgaguucguguucaagaacaucgacggcuacuucaagaucuacuccaagcacaccccgaucaaccugguccgggaccugccccagggguucagcgcccucgagccccugguggaccugcccaucggcaucaacaucacccgcuuccagacccuccuggcccugcaccgguccuaccucacgccgggggacagcagcuccggcuggaccgcgggcgccgccgccuacuacgugggguaccugcagccccgcaccuuccugcucaaguacaacgagaacggcaccaucacggacgcggucgacugcgcccuggacccccugagcgagaccaagugcacccucaaguccuucaccguggagaaggggaucuaccagacgagcaacuuccgggugcagcccaccgaguccaucguccgcuucccgaacaucaccaaccugugccccuucggcgagguguucaacgccacccgguucgccagcgucuacgccuggaaccgcaagcggaucuccaacugcguggcggacuacagcgugcuguacaacuccgccagcuucuccacguucaagugcuacggcgucagccccaccaagcucaacgaccugugcuucaccaacguguacgccgacuccuucgugauccgcggggacgagguccggcagaucgcccccggccagaccgggaagaucgccgacuacaacuacaagcugccggacgacuucacgggcugcgugaucgcguggaacagcaacaaccucgacuccaaggucgggggcaacuacaacuaccuguaccgccuguuccgcaagagcaaccucaagcccuucgagcgggacaucuccaccgagaucuaccaggccggcagcacccccugcaacgggguggagggcuucaacugcuacuucccccugcaguccuacggguuccagccgaccaacggcgugggguaccagcccuaccggguggucgugcugagcuucgagcuccugcacgcccccgccacggugugcggccccaagaaguccaccaaccuggucaagaacaagugcgugaacuucaacuucaacggccucaccgggaccggcgugcugaccgagagcaacaagaaguuccugccguuccagcaguucgggcgcgacaucgccgacacgaccgacgcgguccgcgacccccagacccuggagauccucgacaucacccccugcagcuucggcgggguguccgugaucacgccgggcaccaacaccagcaaccaggucgccgugcuguaccaggacgugaacugcaccgagguccccguggccauccacgccgaccagcugacgcccaccuggcggguguacuccaccggcagcaacgucuuccagacccgcgccgggugccucaucggcgcggagcacgugaacaacuccuacgagugcgacauccccaucggggccggcaucugcgccagcuaccagacgcagaccaacuccccgcggcgcgcccggagcguggcgucccagagcaucaucgccuacaccaugucccugggcgccgagaacagcgucgccuacuccaacaacagcaucgccauccccaccaacuucacgaucuccgugaccaccgagauccugcccgugagcaugaccaagacgagcgucgacugcaccauguacaucugcggggacuccaccgagugcagcaaccuccugcugcaguacggcuccuucugcacccagcucaaccgcgcgcugacggggaucgccguggagcaggacaagaacacccaggagguguucgcccaggucaagcagaucuacaagacgcccccgaucaaggacuucggcggguucaacuucagccagauccugcccgaccccuccaagcccagcaagcgguccuucaucgaggaccuccuguucaacaaggugacccuggccgacgccggcuucaucaagcaguacggcgacugccucggggacaucgcggcccgcgaccugaucugcgcccagaaguucaacggccugaccgugcucccgccccugcugaccgacgagaugaucgcccaguacaccagcgcccuccuggcggggaccaucacguccggcuggaccuucggggccggcgccgcccugcagauccccuucgcgaugcagauggccuaccgguucaacggcaucggggucacccagaacgugcucuacgagaaccagaagcugaucgccaaccaguucaacagcgccaucggcaagauccaggacucccugagcuccaccgccagcgcgcucgggaagcugcaggacguggucaaccagaacgcccaggcccugaacacgcucgugaagcagcuguccagcaacuucggcgccaucuccagcgugcugaacgacauccucucccgccuggacccgcccgaggccgagguccagaucgaccggcugaucaccgggcgccuccagagccugcagaccuacgugacccagcagcugauccgggcggccgagauccgcgccagcgccaaccucgccgcgaccaagauguccgagugcgugcugggccagagcaagcgggucgacuucugcggcaagggguaccaccugauguccuucccccagagcgcgccccacggcgugguguuccuccacgucacguacgugcccgcccaggagaagaacuucaccaccgccccggccaucugccacgacgggaaggcccacuucccccgcgagggcgucuucguguccaacgggacccacugguucgugacgcagcggaacuucuacgagccccagaucaucaccaccgacaacaccuucgucagcggcaacugcgacguggugaucggcaucgucaacaacacgguguacgacccccugcagccggagcuggacuccuucaaggaggagcucgacaaguacuucaagaaccacaccagccccgacguggaccugggggacaucuccggcaucaacgccagcgucgugaacauccagaaggagaucgaccgccugaacgagguggccaagaaccucaacgagucccugaucgaccugcaggagcucgggaaguacgagcaguacaucaaguggcccugguacaucuggcugggcuucaucgccggccugaucgcgaucgucauggugaccaucaugcucugcugcaugaccagcugcugcuccugccugaaggggugcugcagcugcggcuccugcugcaaguucgacgaggacgacagcgagccggugcugaagggggucaagcuccacuacacgugaugacucgagcugguacugcaugcacgcaaugcuagcugccccuuucccguccuggguaccccgagucucccccgaccucgggucccagguaugcucccaccuccaccugccccacucaccaccucugcuaguuccagacaccucccaagcacgcagcaaugcagcucaaaacgcuuagccuagccacacccccacgggaaacagcagugauuaaccuuuagcaauaaacgaaaguuuaacuaagcuauacuaaccccaggguuggucaauuucgugccagccacacccuggagcuagcaaaaaaaaaaaaaaaaaaaaaaaaaaaaaagcauaugacuaaaaaaaaaaaaaaaaaaaaaaaaaaaaaaaaaaaaaaaaaaaaaaaaaaaaaaaaaaaaaaaaaaaaaa

SEQ ID NO: 26836 - RNA, 4283 nt, Artificial Sequence
  SARS-CoV-2/Wuhan/WIV05/2019__EPI_ISL_402128 spike protein mRNA gc (1-1273)(K986P_V987P_ D614G)
agaauaaacuaguauucuucugguccccacagacucagagagaacccgccaccauguucguguuccugguccuccugccccuggugagcucccagugcgugaaccucaccacccgcacgcagcugccgcccgccuacaccaacagcuucacccggggcgucuacuaccccgacaagguguuccgcuccagcgugcugcacuccacccaggaccucuuccugcccuucuucagcaacgucacgugguuccacgccauccacguguccgggaccaacggcaccaagcgguucgacaacccggugcugcccuucaacgacggggucuacuucgcgagcaccgagaaguccaacaucauccgcggcuggaucuucgggacgacccucgacagcaagacccagucccugcugaucgugaacaacgccaccaacguggucaucaaggugugcgaguuccaguucugcaacgaccccuuccucggcguguacuaccacaagaacaacaagagcuggauggaguccgaguuccgggucuacagcuccgccaacaacugcacguucgaguacgugagccagcccuuccugauggaccuggagggcaagcaggggaacuucaagaaccuccgcgaguucguguucaagaacaucgacggcuacuucaagaucuacuccaagcacaccccgaucaaccugguccgggaccugccccagggguucagcgcccucgagccccugguggaccugcccaucggcaucaacaucacccgcuuccagacccuccuggcccugcaccgguccuaccucacgccgggggacagcagcuccggcuggaccgcgggcgccgccgccuacuacgugggguaccugcagccccgcaccuuccugcucaaguacaacgagaacggcaccaucacggacgcggucgacugcgcccuggacccccugagcgagaccaagugcacccucaaguccuucaccguggagaaggggaucuaccagacgagcaacuuccgggugcagcccaccgaguccaucguccgcuucccgaacaucaccaaccugugccccuucggcgagguguucaacgccacccgguucgccagcgucuacgccuggaaccgcaagcggaucuccaacugcguggcggacuacagcgugcuguacaacuccgccagcuucuccacguucaagugcuacggcgucagccccaccaagcucaacgaccugugcuucaccaacguguacgccgacuccuucgugauccgcggggacgagguccggcagaucgcccccggccagaccgggaagaucgccgacuacaacuacaagcugccggacgacuucacgggcugcgugaucgcguggaacagcaacaaccucgacuccaaggucgggggcaacuacaacuaccuguaccgccuguuccgcaagagcaaccucaagcccuucgagcgggacaucuccaccgagaucuaccaggccggcagcacccccugcaacgggguggagggcuucaacugcuacuucccccugcaguccuacggguuccagccgaccaacggcgugggguaccagcccuaccggguggucgugcugagcuucgagcuccugcacgcccccgccacggugugcggccccaagaaguccaccaaccuggucaagaacaagugcgugaacuucaacuucaacggccucaccgggaccggcgugcugaccgagagcaacaagaaguuccugccguuccagcaguucgggcgcgacaucgccgacacgaccgacgcgguccgcgacccccagacccuggagauccucgacaucacccccugcagcuucggcgggguguccgugaucacgccgggcaccaacaccagcaaccaggucgccgugcuguaccagggcgugaacugcaccgagguccccguggccauccacgccgaccagcugacgcccaccuggcggguguacuccaccgggagcaacgucuuccagacccgcgccggcugccucaucggggcggagcacgugaacaacuccuacgagugcgacauccccaucggcgccggcaucugcgccagcuaccagacgcagaccaacuccccgcggcgcgcccggagcguggcgucccagagcaucaucgccuacaccaugucccugggggccgagaacagcgucgccuacuccaacaacagcaucgccauccccaccaacuucacgaucuccgugaccaccgagauccugcccgugagcaugaccaagacgagcgucgacugcaccauguacaucugcggcgacuccaccgagugcagcaaccuccugcugcaguacggguccuucugcacccagcucaaccgcgcgcugacgggcaucgccguggagcaggacaagaacacccaggagguguucgcccaggucaagcagaucuacaagacgcccccgaucaaggacuucgggggcuucaacuucagccagauccugcccgaccccuccaagcccagcaagcgguccuucaucgaggaccuccuguucaacaaggugacccuggccgacgccggcuucaucaagcaguacggggacugccucggcgacaucgcggcccgcgaccugaucugcgcccagaaguucaacgggcugaccgugcucccgccccugcugaccgacgagaugaucgcccaguacaccagcgcccuccuggcgggcaccaucacguccggguggaccuucggcgccggcgccgcccugcagauccccuucgcgaugcagauggccuaccgguucaacgggaucggcgucacccagaacgugcucuacgagaaccagaagcugaucgccaaccaguucaacagcgccaucgggaagauccaggacucccugagcuccaccgccagcgcgcucggcaagcugcaggacguggucaaccagaacgcccaggcccugaacacgcucgugaagcagcuguccagcaacuucggggccaucuccagcgugcugaacgacauccucucccgccuggacccgcccgaggccgagguccagaucgaccggcugaucaccggccgccuccagagccugcagaccuacgugacccagcagcugauccgggcggccgagauccgcgccagcgccaaccucgccgcgaccaagauguccgagugcgugcugggccagagcaagcgggucgacuucugcgggaagggcuaccaccugauguccuucccccagagcgcgccccacggggugguguuccuccacgucacguacgugcccgcccaggagaagaacuucaccaccgccccggccaucugccacgacggcaaggcccacuucccccgcgagggggucuucguguccaacggcacccacugguucgugacgcagcggaacuucuacgagccccagaucaucaccaccgacaacaccuucgucagcggcaacugcgacguggugaucgggaucgucaacaacacgguguacgacccccugcagccggagcuggacuccuucaaggaggagcucgacaaguacuucaagaaccacaccagccccgacguggaccugggcgacaucuccgggaucaacgccagcgucgugaacauccagaaggagaucgaccgccugaacgagguggccaagaaccucaacgagucccugaucgaccugcaggagcucggcaaguacgagcaguacaucaaguggcccugguacaucuggcugggcuucaucgccgggcugaucgcgaucgucauggugaccaucaugcucugcugcaugaccagcugcugcuccugccugaagggcugcugcagcugcggguccugcugcaaguucgacgaggacgacagcgagccggugcugaagggcgucaagcuccacuacacgugaugacucgagcugguacugcaugcacgcaaugcuagcugccccuuucccguccuggguaccccgagucucccccgaccucgggucccagguaugcucccaccuccaccugccccacucaccaccucugcuaguuccagacaccucccaagcacgcagcaaugcagcucaaaacgcuuagccuagccacacccccacgggaaacagcagugauuaaccuuuagcaauaaacgaaaguuuaacuaagcuauacuaaccccaggguuggucaauuucgugccagccacacccuggagcuagcaaaaaaaaaaaaaaaaaaaaaaaaaaaaaagcauaugacuaaaaaaaaaaaaaaaaaaaaaaaaaaaaaaaaaaaaaaaaaaaaaaaaaaaaaaaaaaaaaaaaaaaaaa

SEQ ID NO: 26837 - RNA, 4283 nt, Artificial Sequence
  SARS-CoV-2/Wuhan/WIV05/2019__EPI_ISL_402128 spike protein mRNA gc (1-1273)(K986P_V987P_A222V_D614G)
agaauaaacuaguauucuucugguccccacagacucagagagaacccgccaccauguucguguuccugguccuccugccccuggugagcucccagugcgugaaccucaccacccgcacgcagcugccgcccgccuacaccaacagcuucacccggggcgucuacuaccccgacaagguguuccgcuccagcgugcugcacuccacccaggaccucuuccugcccuucuucagcaacgucacgugguuccacgccauccacguguccgggaccaacggcaccaagcgguucgacaacccggugcugcccuucaacgacggggucuacuucgcgagcaccgagaaguccaacaucauccgcggcuggaucuucgggacgacccucgacagcaagacccagucccugcugaucgugaacaacgccaccaacguggucaucaaggugugcgaguuccaguucugcaacgaccccuuccucggcguguacuaccacaagaacaacaagagcuggauggaguccgaguuccgggucuacagcuccgccaacaacugcacguucgaguacgugagccagcccuuccugauggaccuggagggcaagcaggggaacuucaagaaccuccgcgaguucguguucaagaacaucgacggcuacuucaagaucuacuccaagcacaccccgaucaaccugguccgggaccugccccagggguucagcgugcucgagccccugguggaccugcccaucggcaucaacaucacccgcuuccagacccuccuggcccugcaccgguccuaccucacgccgggggacagcagcuccggcuggaccgccggcgcggccgccuacuacgucggguaccugcagccccgcaccuuccugcucaaguacaacgagaacggcaccaucacggacgccguggacugcgcgcuggacccccugagcgagaccaagugcacccucaaguccuucaccguggagaaggggaucuaccagacgagcaacuuccggguccagcccaccgaguccaucgugcgcuucccgaacaucaccaaccugugccccuucggcgaggucuucaacgccacccgguucgccagcguguacgccuggaaccgcaagcggaucuccaacugcguggccgacuacagcguccuguacaacuccgcgagcuucuccacguucaagugcuacggcgugagccccaccaagcucaacgaccugugcuucaccaacguguacgccgacuccuucgucauccgcggggacgaggugcggcagaucgcccccggccagaccgggaagaucgccgacuacaacuacaagcugccggacgacuucacgggcugcgugaucgccuggaacagcaacaaccucgacuccaaggucgggggcaacuacaacuaccuguaccgccuguuccgcaagagcaaccucaagcccuucgagcgggacaucuccaccgagaucuaccaggcgggcagcacccccugcaacgggguggagggcuucaacugcuacuucccccugcaguccuacggguuccagccgaccaacggcgugggguaccagcccuaccgggucguggugcugagcuucgagcuccugcacgcccccgccacggucugcggccccaagaaguccaccaaccuggugaagaacaagugcgugaacuucaacuucaacggccucaccgggaccggcguccugaccgagagcaacaagaaguuccugccguuccagcaguucgggcgcgacaucgccgacacgaccgacgccgugcgcgacccccagacccuggagauccucgacaucacccccugcagcuucggcgggguguccgucaucacgccgggcaccaacaccagcaaccagguggcggugcuguaccagggcgucaacugcaccgaggugcccguggccauccacgccgaccagcugacgcccaccuggcgggucuacuccaccgggagcaacguguuccagacccgcgccggcugccucaucggggccgagcacgugaacaacuccuacgagugcgacauccccaucggcgcgggcaucugcgccagcuaccagacgcagaccaacuccccgcggcgcgcccggagcgucgccucccagagcaucaucgcguacaccaugucccugggggccgagaacagcguggccuacuccaacaacagcaucgccauccccaccaacuucacgaucuccgugaccaccgagauccugcccgucagcaugaccaagacgagcguggacugcaccauguacaucugcggcgacuccaccgagugcagcaaccuccugcugcaguacggguccuucugcacccagcucaaccgcgcccugacgggcaucgcgguggagcaggacaagaacacccaggaggucuucgcccaggugaagcagaucuacaagacgcccccgaucaaggacuucgggggcuucaacuucagccagauccugcccgaccccuccaagcccagcaagcgguccuucaucgaggaccuccuguucaacaaggugacccuggccgacgccggcuucaucaagcaguacggggacugccucggcgacaucgccgcgcgcgaccugaucugcgcccagaaguucaacgggcugaccguccucccgccccugcugaccgacgagaugaucgcccaguacaccagcgcccuccuggccggcaccaucacguccggguggaccuucggcgcgggcgccgcccugcagauccccuucgccaugcagauggcguaccgguucaacgggaucggcgugacccagaacgugcucuacgagaaccagaagcugaucgccaaccaguucaacagcgccaucgggaagauccaggacucccugagcuccaccgccagcgcccucggcaagcugcaggacgucgugaaccagaacgcgcaggcccugaacacgcucgugaagcagcuguccagcaacuucggggccaucuccagcguccugaacgacauccucucccgccuggacccgcccgaggccgaggugcagaucgaccggcugaucaccggccgccuccagagccugcagaccuacgugacccagcagcugauccgggccgcggagauccgcgccagcgccaaccucgccgccaccaagauguccgagugcguccugggccagagcaagcggguggacuucugcgggaagggcuaccaccugauguccuucccccagagcgcgccccacgggguggucuuccuccacgugacguacguccccgcccaggagaagaacuucaccaccgccccggccaucugccacgacggcaaggcgcacuucccccgcgaggggguguucguguccaacggcacccacugguucgucacgcagcggaacuucuacgagccccagaucaucaccaccgacaacaccuucgugagcggcaacugcgacguggucaucgggaucgugaacaacacgguguacgacccccugcagccggagcuggacuccuucaaggaggagcucgacaaguacuucaagaaccacaccagccccgacgucgaccugggcgacaucuccgggaucaacgccagcguggugaacauccagaaggagaucgaccgccugaacgaggucgccaagaaccucaacgagucccugaucgaccugcaggagcucggcaaguacgagcaguacaucaaguggcccugguacaucuggcugggcuucaucgccgggcugaucgccaucgugauggugaccaucaugcucugcugcaugaccagcugcugcuccugccugaagggcugcugcagcugcggguccugcugcaaguucgacgaggacgacagcgagccgguccugaagggcgugaagcuccacuacacgugaugacucgagcugguacugcaugcacgcaaugcuagcugccccuuucccguccuggguaccccgagucucccccgaccucgggucccagguaugcucccaccuccaccugccccacucaccaccucugcuaguuccagacaccucccaagcacgcagcaaugcagcucaaaacgcuuagccuagccacacccccacgggaaacagcagugauuaaccuuuagcaauaaacgaaaguuuaacuaagcuauacuaaccccaggguuggucaauuucgugccagccacacccuggagcuagcaaaaaaaaaaaaaaaaaaaaaaaaaaaaaagcauaugacuaaaaaaaaaaaaaaaaaaaaaaaaaaaaaaaaaaaaaaaaaaaaaaaaaaaaaaaaaaaaaaaaaaaaaa

SEQ ID NO: 26838 - RNA, 4283 nt, Artificial Sequence
  SARS-CoV-2/Wuhan/WIV05/2019__EPI_ISL_402128 spike protein mRNA gc (1-1273)(K986P_V987P_N439K_D614G)
agaauaaacuaguauucuucugguccccacagacucagagagaacccgccaccauguucguguuccugguccuccugccccuggugagcucccagugcgugaaccucaccacccgcacgcagcugccgcccgccuacaccaacagcuucacccggggcgucuacuaccccgacaagguguuccgcuccagcgugcugcacuccacccaggaccucuuccugcccuucuucagcaacgucacgugguuccacgccauccacguguccgggaccaacggcaccaagcgguucgacaacccggugcugcccuucaacgacggggucuacuucgcgagcaccgagaaguccaacaucauccgcggcuggaucuucgggacgacccucgacagcaagacccagucccugcugaucgugaacaacgccaccaacguggucaucaaggugugcgaguuccaguucugcaacgaccccuuccucggcguguacuaccacaagaacaacaagagcuggauggaguccgaguuccgggucuacagcuccgccaacaacugcacguucgaguacgugagccagcccuuccugauggaccuggagggcaagcaggggaacuucaagaaccuccgcgaguucguguucaagaacaucgacggcuacuucaagaucuacuccaagcacaccccgaucaaccugguccgggaccugccccagggguucagcgcccucgagccccugguggaccugcccaucggcaucaacaucacccgcuuccagacccuccuggcccugcaccgguccuaccucacgccgggggacagcagcuccggcuggaccgcgggcgccgccgccuacuacgugggguaccugcagccccgcaccuuccugcucaaguacaacgagaacggcaccaucacggacgcggucgacugcgcccuggacccccugagcgagaccaagugcacccucaaguccuucaccguggagaaggggaucuaccagacgagcaacuuccgggugcagcccaccgaguccaucguccgcuucccgaacaucaccaaccugugccccuucggcgagguguucaacgccacccgguucgccagcgucuacgccuggaaccgcaagcggaucuccaacugcguggcggacuacagcgugcuguacaacuccgccagcuucuccacguucaagugcuacggcgucagccccaccaagcucaacgaccugugcuucaccaacguguacgccgacuccuucgugauccgcggggacgagguccggcagaucgcccccggccagaccgggaagaucgccgacuacaacuacaagcugccggacgacuucacgggcugcgugaucgcguggaacagcaagaaccucgacuccaaggucgggggcaacuacaacuaccuguaccgccuguuccgcaagagcaaccucaagcccuucgagcgggacaucuccaccgagaucuaccaggccggcagcacccccugcaacgggguggagggcuucaacugcuacuucccccugcaguccuacggguuccagccgaccaacggcgugggguaccagcccuaccggguggucgugcugagcuucgagcuccugcacgcccccgccacggugugcggccccaagaaguccaccaaccuggucaagaacaagugcgugaacuucaacuucaacggccucaccgggaccggcgugcugaccgagagcaacaagaaguuccugccguuccagcaguucgggcgcgacaucgccgacacgaccgacgcgguccgcgacccccagacccuggagauccucgacaucacccccugcagcuucggcgggguguccgugaucacgccgggcaccaacaccagcaaccaggucgccgugcuguaccagggcgugaacugcaccgagguccccguggccauccacgccgaccagcugacgcccaccuggcggguguacuccaccgggagcaacgucuuccagacccgcgccggcugccucaucggggcggagcacgugaacaacuccuacgagugcgacauccccaucggcgccggcaucugcgccagcuaccagacgcagaccaacuccccgcggcgcgcccggagcguggcgucccagagcaucaucgccuacaccaugucccugggggccgagaacagcgucgccuacuccaacaacagcaucgccauccccaccaacuucacgaucuccgugaccaccgagauccugcccgugagcaugaccaagacgagcgucgacugcaccauguacaucugcggcgacuccaccgagugcagcaaccuccugcugcaguacggguccuucugcacccagcucaaccgcgcgcugacgggcaucgccguggagcaggacaagaacacccaggagguguucgcccaggucaagcagaucuacaagacgcccccgaucaaggacuucgggggcuucaacuucagccagauccugcccgaccccuccaagcccagcaagcgguccuucaucgaggaccuccuguucaacaaggugacccuggccgacgccggcuucaucaagcaguacggggacugccucggcgacaucgcggcccgcgaccugaucugcgcccagaaguucaacgggcugaccgugcucccgccccugcugaccgacgagaugaucgcccaguacaccagcgcccuccuggcgggcaccaucacguccggguggaccuucggcgccggcgccgcccugcagauccccuucgcgaugcagauggccuaccgguucaacgggaucggcgucacccagaacgugcucuacgagaaccagaagcugaucgccaaccaguucaacagcgccaucgggaagauccaggacucccugagcuccaccgccagcgcgcucggcaagcugcaggacguggucaaccagaacgcccaggcccugaacacgcucgugaagcagcuguccagcaacuucggggccaucuccagcgugcugaacgacauccucucccgccuggacccgcccgaggccgagguccagaucgaccggcugaucaccggccgccuccagagccugcagaccuacgugacccagcagcugauccgggcggccgagauccgcgccagcgccaaccucgccgcgaccaagauguccgagugcgugcugggccagagcaagcgggucgacuucugcgggaagggcuaccaccugauguccuucccccagagcgcgccccacggggugguguuccuccacgucacguacgugcccgcccaggagaagaacuucaccaccgccccggccaucugccacgacggcaaggcccacuucccccgcgagggggucuucguguccaacggcacccacugguucgugacgcagcggaacuucuacgagccccagaucaucaccaccgacaacaccuucgucagcggcaacugcgacguggugaucgggaucgucaacaacacgguguacgacccccugcagccggagcuggacuccuucaaggaggagcucgacaaguacuucaagaaccacaccagccccgacguggaccugggcgacaucuccgggaucaacgccagcgucgugaacauccagaaggagaucgaccgccugaacgagguggccaagaaccucaacgagucccugaucgaccugcaggagcucggcaaguacgagcaguacaucaaguggcccugguacaucuggcugggcuucaucgccgggcugaucgcgaucgucauggugaccaucaugcucugcugcaugaccagcugcugcuccugccugaagggcugcugcagcugcggguccugcugcaaguucgacgaggacgacagcgagccggugcugaagggcgucaagcuccacuacacgugaugacucgagcugguacugcaugcacgcaaugcuagcugccccuuucccguccuggguaccccgagucucccccgaccucgggucccagguaugcucccaccuccaccugccccacucaccaccucugcuaguuccagacaccucccaagcacgcagcaaugcagcucaaaacgcuuagccuagccacacccccacgggaaacagcagugauuaaccuuuagcaauaaacgaaaguuuaacuaagcuauacuaaccccaggguuggucaauuucgugccagccacacccuggagcuagcaaaaaaaaaaaaaaaaaaaaaaaaaaaaaagcauaugacuaaaaaaaaaaaaaaaaaaaaaaaaaaaaaaaaaaaaaaaaaaaaaaaaaaaaaaaaaaaaaaaaaaaaaa

SEQ ID NO: 26839 - RNA, 4283 nt, Artificial Sequence
  SARS-CoV-2/Wuhan/WIV05/2019__EPI_ISL_402128 spike protein mRNA gc (1-1273)(K986P_V987P_S477N_D614G)
agaauaaacuaguauucuucugguccccacagacucagagagaacccgccaccauguucguguuccugguccuccugccccuggugagcucccagugcgugaaccucaccacccgcacgcagcugccgcccgccuacaccaacagcuucacccggggcgucuacuaccccgacaagguguuccgcuccagcgugcugcacuccacccaggaccucuuccugcccuucuucagcaacgucacgugguuccacgccauccacguguccgggaccaacggcaccaagcgguucgacaacccggugcugcccuucaacgacggggucuacuucgcgagcaccgagaaguccaacaucauccgcggcuggaucuucgggacgacccucgacagcaagacccagucccugcugaucgugaacaacgccaccaacguggucaucaaggugugcgaguuccaguucugcaacgaccccuuccucggcguguacuaccacaagaacaacaagagcuggauggaguccgaguuccgggucuacagcuccgccaacaacugcacguucgaguacgugagccagcccuuccugauggaccuggagggcaagcaggggaacuucaagaaccuccgcgaguucguguucaagaacaucgacggcuacuucaagaucuacuccaagcacaccccgaucaaccugguccgggaccugccccagggguucagcgcccucgagccccugguggaccugcccaucggcaucaacaucacccgcuuccagacccuccuggcccugcaccgguccuaccucacgccgggggacagcagcuccggcuggaccgcgggcgccgccgccuacuacgugggguaccugcagccccgcaccuuccugcucaaguacaacgagaacggcaccaucacggacgcggucgacugcgcccuggacccccugagcgagaccaagugcacccucaaguccuucaccguggagaaggggaucuaccagacgagcaacuuccgggugcagcccaccgaguccaucguccgcuucccgaacaucaccaaccugugccccuucggcgagguguucaacgccacccgguucgccagcgucuacgccuggaaccgcaagcggaucuccaacugcguggcggacuacagcgugcuguacaacuccgccagcuucuccacguucaagugcuacggcgucagccccaccaagcucaacgaccugugcuucaccaacguguacgccgacuccuucgugauccgcggggacgagguccggcagaucgcccccggccagaccgggaagaucgccgacuacaacuacaagcugccggacgacuucacgggcugcgugaucgcguggaacagcaacaaccucgacuccaaggucgggggcaacuacaacuaccuguaccgccuguuccgcaagagcaaccucaagcccuucgagcgggacaucuccaccgagaucuaccaggccggcaacacccccugcaacgggguggagggcuucaacugcuacuucccccugcagagcuacggguuccagccgaccaacggcgugggguaccagcccuaccggguggucgugcuguccuucgagcuccugcacgcccccgccacggugugcggccccaagaaguccaccaaccuggucaagaacaagugcgugaacuucaacuucaacggccucaccgggaccggcgugcugaccgagagcaacaagaaguuccugccguuccagcaguucgggcgcgacaucgccgacacgaccgacgcgguccgcgacccccagacccuggagauccucgacaucacccccugcagcuucggcggggugagcgugaucacgccgggcaccaacaccuccaaccaggucgccgugcuguaccagggcgugaacugcaccgagguccccguggccauccacgccgaccagcugacgcccaccuggcggguguacagcaccggguccaacgucuuccagacccgcgccggcugccucaucggggcggagcacgugaacaacagcuacgagugcgacauccccaucggcgccggcaucugcgccuccuaccagacgcagaccaacagcccgcggcgcgcccgguccguggcgagccaguccaucaucgccuacaccaugagccugggggccgagaacuccgucgccuacagcaacaacuccaucgccauccccaccaacuucacgaucagcgugaccaccgagauccugcccguguccaugaccaagacgagcgucgacugcaccauguacaucugcggcgacagcaccgagugcuccaaccuccugcugcaguacgggagcuucugcacccagcucaaccgcgcgcugacgggcaucgccguggagcaggacaagaacacccaggagguguucgcccaggucaagcagaucuacaagacgcccccgaucaaggacuucgggggcuucaacuucucccagauccugcccgaccccagcaagcccuccaagcggagcuucaucgaggaccuccuguucaacaaggugacccuggccgacgccggcuucaucaagcaguacggggacugccucggcgacaucgcggcccgcgaccugaucugcgcccagaaguucaacgggcugaccgugcucccgccccugcugaccgacgagaugaucgcccaguacaccuccgcccuccuggcgggcaccaucacgagcggguggaccuucggcgccggcgccgcccugcagauccccuucgcgaugcagauggccuaccgguucaacgggaucggcgucacccagaacgugcucuacgagaaccagaagcugaucgccaaccaguucaacuccgccaucgggaagauccaggacagccuguccagcaccgccuccgcgcucggcaagcugcaggacguggucaaccagaacgcccaggcccugaacacgcucgugaagcagcugagcuccaacuucggggccaucagcuccgugcugaacgacauccucagccgccuggacccgcccgaggccgagguccagaucgaccggcugaucaccggccgccuccagucccugcagaccuacgugacccagcagcugauccgggcggccgagauccgcgccagcgccaaccucgccgcgaccaagaugagcgagugcgugcugggccaguccaagcgggucgacuucugcgggaagggcuaccaccugaugagcuucccccaguccgcgccccacggggugguguuccuccacgucacguacgugcccgcccaggagaagaacuucaccaccgccccggccaucugccacgacggcaaggcccacuucccccgcgagggggucuucgugagcaacggcacccacugguucgugacgcagcggaacuucuacgagccccagaucaucaccaccgacaacaccuucgucuccggcaacugcgacguggugaucgggaucgucaacaacacgguguacgacccccugcagccggagcuggacagcuucaaggaggagcucgacaaguacuucaagaaccacaccucccccgacguggaccugggcgacaucagcgggaucaacgccuccgucgugaacauccagaaggagaucgaccgccugaacgagguggccaagaaccucaacgagagccugaucgaccugcaggagcucggcaaguacgagcaguacaucaaguggcccugguacaucuggcugggcuucaucgccgggcugaucgcgaucgucauggugaccaucaugcucugcugcaugaccuccugcugcagcugccugaagggcugcugcuccugcgggagcugcugcaaguucgacgaggacgacuccgagccggugcugaagggcgucaagcuccacuacacgugaugacucgagcugguacugcaugcacgcaaugcuagcugccccuuucccguccuggguaccccgagucucccccgaccucgggucccagguaugcucccaccuccaccugccccacucaccaccucugcuaguuccagacaccucccaagcacgcagcaaugcagcucaaaacgcuuagccuagccacacccccacgggaaacagcagugauuaaccuuuagcaauaaacgaaaguuuaacuaagcuauacuaaccccaggguuggucaauuucgugccagccacacccuggagcuagcaaaaaaaaaaaaaaaaaaaaaaaaaaaaaagcauaugacuaaaaaaaaaaaaaaaaaaaaaaaaaaaaaaaaaaaaaaaaaaaaaaaaaaaaaaaaaaaaaaaaaaaaaa

SEQ ID NO: 26840 - RNA, 4283 nt, Artificial Sequence
  SARS-CoV-2/Wuhan/WIV05/2019__EPI_ISL_402128 spike protein mRNA gc (1-1273)(K986P_V987P_N501Y_D614G)
agaauaaacuaguauucuucugguccccacagacucagagagaacccgccaccauguucguguuccugguccuccugccccuggugagcucccagugcgugaaccucaccacccgcacgcagcugccgcccgccuacaccaacagcuucacccggggcgucuacuaccccgacaagguguuccgcuccagcgugcugcacuccacccaggaccucuuccugcccuucuucagcaacgucacgugguuccacgccauccacguguccgggaccaacggcaccaagcgguucgacaacccggugcugcccuucaacgacggggucuacuucgcgagcaccgagaaguccaacaucauccgcggcuggaucuucgggacgacccucgacagcaagacccagucccugcugaucgugaacaacgccaccaacguggucaucaaggugugcgaguuccaguucugcaacgaccccuuccucggcguguacuaccacaagaacaacaagagcuggauggaguccgaguuccgggucuacagcuccgccaacaacugcacguucgaguacgugagccagcccuuccugauggaccuggagggcaagcaggggaacuucaagaaccuccgcgaguucguguucaagaacaucgacggcuacuucaagaucuacuccaagcacaccccgaucaaccugguccgggaccugccccagggguucagcgcccucgagccccugguggaccugcccaucggcaucaacaucacccgcuuccagacccuccuggcccugcaccgguccuaccucacgccgggggacagcagcuccggcuggaccgcgggcgccgccgccuacuacgugggguaccugcagccccgcaccuuccugcucaaguacaacgagaacggcaccaucacggacgcggucgacugcgcccuggacccccugagcgagaccaagugcacccucaaguccuucaccguggagaaggggaucuaccagacgagcaacuuccgggugcagcccaccgaguccaucguccgcuucccgaacaucaccaaccugugccccuucggcgagguguucaacgccacccgguucgccagcgucuacgccuggaaccgcaagcggaucuccaacugcguggcggacuacagcgugcuguacaacuccgccagcuucuccacguucaagugcuacggcgucagccccaccaagcucaacgaccugugcuucaccaacguguacgccgacuccuucgugauccgcggggacgagguccggcagaucgcccccggccagaccgggaagaucgccgacuacaacuacaagcugccggacgacuucacgggcugcgugaucgcguggaacagcaacaaccucgacuccaaggucgggggcaacuacaacuaccuguaccgccuguuccgcaagagcaaccucaagcccuucgagcgggacaucuccaccgagaucuaccaggccggcagcacccccugcaacgggguggagggcuucaacugcuacuucccccugcaguccuacggguuccagccgaccuacggcgugggguaccagcccuaccggguggucgugcugagcuucgagcuccugcacgcccccgccacggugugcggccccaagaaguccaccaaccuggucaagaacaagugcgugaacuucaacuucaacggccucaccgggaccggcgugcugaccgagagcaacaagaaguuccugccguuccagcaguucgggcgcgacaucgccgacacgaccgacgcgguccgcgacccccagacccuggagauccucgacaucacccccugcagcuucggcgggguguccgugaucacgccgggcaccaacaccagcaaccaggucgccgugcuguaccagggcgugaacugcaccgagguccccguggccauccacgccgaccagcugacgcccaccuggcggguguacuccaccgggagcaacgucuuccagacccgcgccggcugccucaucggggcggagcacgugaacaacuccuacgagugcgacauccccaucggcgccggcaucugcgccagcuaccagacgcagaccaacuccccgcggcgcgcccggagcguggcgucccagagcaucaucgccuacaccaugucccugggggccgagaacagcgucgccuacuccaacaacagcaucgccauccccaccaacuucacgaucuccgugaccaccgagauccugcccgugagcaugaccaagacgagcgucgacugcaccauguacaucugcggcgacuccaccgagugcagcaaccuccugcugcaguacggguccuucugcacccagcucaaccgcgcgcugacgggcaucgccguggagcaggacaagaacacccaggagguguucgcccaggucaagcagaucuacaagacgcccccgaucaaggacuucgggggcuucaacuucagccagauccugcccgaccccuccaagcccagcaagcgguccuucaucgaggaccuccuguucaacaaggugacccuggccgacgccggcuucaucaagcaguacggggacugccucggcgacaucgcggcccgcgaccugaucugcgcccagaaguucaacgggcugaccgugcucccgccccugcugaccgacgagaugaucgcccaguacaccagcgcccuccuggcgggcaccaucacguccggguggaccuucggcgccggcgccgcccugcagauccccuucgcgaugcagauggccuaccgguucaacgggaucggcgucacccagaacgugcucuacgagaaccagaagcugaucgccaaccaguucaacagcgccaucgggaagauccaggacucccugagcuccaccgccagcgcgcucggcaagcugcaggacguggucaaccagaacgcccaggcccugaacacgcucgugaagcagcuguccagcaacuucggggccaucuccagcgugcugaacgacauccucucccgccuggacccgcccgaggccgagguccagaucgaccggcugaucaccggccgccuccagagccugcagaccuacgugacccagcagcugauccgggcggccgagauccgcgccagcgccaaccucgccgcgaccaagauguccgagugcgugcugggccagagcaagcgggucgacuucugcgggaagggcuaccaccugauguccuucccccagagcgcgccccacggggugguguuccuccacgucacguacgugcccgcccaggagaagaacuucaccaccgccccggccaucugccacgacggcaaggcccacuucccccgcgagggggucuucguguccaacggcacccacugguucgugacgcagcggaacuucuacgagccccagaucaucaccaccgacaacaccuucgucagcggcaacugcgacguggugaucgggaucgucaacaacacgguguacgacccccugcagccggagcuggacuccuucaaggaggagcucgacaaguacuucaagaaccacaccagccccgacguggaccugggcgacaucuccgggaucaacgccagcgucgugaacauccagaaggagaucgaccgccugaacgagguggccaagaaccucaacgagucccugaucgaccugcaggagcucggcaaguacgagcaguacaucaaguggcccugguacaucuggcugggcuucaucgccgggcugaucgcgaucgucauggugaccaucaugcucugcugcaugaccagcugcugcuccugccugaagggcugcugcagcugcggguccugcugcaaguucgacgaggacgacagcgagccggugcugaagggcgucaagcuccacuacacgugaugacucgagcugguacugcaugcacgcaaugcuagcugccccuuucccguccuggguaccccgagucucccccgaccucgggucccagguaugcucccaccuccaccugccccacucaccaccucugcuaguuccagacaccucccaagcacgcagcaaugcagcucaaaacgcuuagccuagccacacccccacgggaaacagcagugauuaaccuuuagcaauaaacgaaaguuuaacuaagcuauacuaaccccaggguuggucaauuucgugccagccacacccuggagcuagcaaaaaaaaaaaaaaaaaaaaaaaaaaaaaagcauaugacuaaaaaaaaaaaaaaaaaaaaaaaaaaaaaaaaaaaaaaaaaaaaaaaaaaaaaaaaaaaaaaaaaaaaaa

SEQ ID NO: 26841 - RNA, 4277 nt, Artificial Sequence
  SARS-CoV-2/Wuhan/WIV05/2019__EPI_ISL_402128 spike protein mRNA gc (1-1273)(K986P_V987P_H69del_V70del_D614G)
agaauaaacuaguauucuucugguccccacagacucagagagaacccgccaccauguucguguuccugguccuccugccccuggugagcucccagugcgugaaccucaccacccgcacgcagcugccgcccgccuacaccaacagcuucacccggggcgucuacuaccccgacaagguguuccgcuccagcgugcugcacuccacccaggaccucuuccugcccuucuucagcaacgucacgugguuccacgccaucuccgggaccaacggcaccaagcgguucgacaacccggugcugcccuucaacgacgggguguacuucgcgagcaccgagaaguccaacaucauccgcggcuggaucuucgggacgacccucgacagcaagacccagucccugcugaucgucaacaacgccaccaacguggugaucaaggucugcgaguuccaguucugcaacgaccccuuccucggcguguacuaccacaagaacaacaagagcuggauggaguccgaguuccggguguacagcuccgccaacaacugcacguucgaguacgucagccagcccuuccugauggaccuggagggcaagcaggggaacuucaagaaccuccgcgaguucguguucaagaacaucgacggcuacuucaagaucuacuccaagcacaccccgaucaaccuggugcgggaccugccccagggguucagcgcccucgagccccuggucgaccugcccaucggcaucaacaucacccgcuuccagacccuccuggcccugcaccgguccuaccucacgccgggggacagcagcuccggcuggaccgcgggcgccgccgccuacuacgugggguaccugcagccccgcaccuuccugcucaaguacaacgagaacggcaccaucacggacgcgguggacugcgcccuggacccccugagcgagaccaagugcacccucaaguccuucaccgucgagaaggggaucuaccagacgagcaacuuccgggugcagcccaccgaguccaucgugcgcuucccgaacaucaccaaccugugccccuucggcgaggucuucaacgccacccgguucgccagcguguacgccuggaaccgcaagcggaucuccaacugcgucgcggacuacagcgugcuguacaacuccgccagcuucuccacguucaagugcuacggcgugagccccaccaagcucaacgaccugugcuucaccaacgucuacgccgacuccuucgugauccgcggggacgaggugcggcagaucgcccccggccagaccgggaagaucgccgacuacaacuacaagcugccggacgacuucacgggcugcgucaucgcguggaacagcaacaaccucgacuccaaggucgggggcaacuacaacuaccuguaccgccuguuccgcaagagcaaccucaagcccuucgagcgggacaucuccaccgagaucuaccaggccggcagcacccccugcaacgggguggagggcuucaacugcuacuucccccugcaguccuacggguuccagccgaccaacggcgugggguaccagcccuaccggguggugguccugagcuucgagcuccugcacgcccccgccacggugugcggccccaagaaguccaccaaccuggugaagaacaagugcgucaacuucaacuucaacggccucaccgggaccggcgugcugaccgagagcaacaagaaguuccugccguuccagcaguucgggcgcgacaucgccgacacgaccgacgcggugcgcgacccccagacccuggagauccucgacaucacccccugcagcuucggcggggucuccgugaucacgccgggcaccaacaccagcaaccagguggccguccuguaccagggcgugaacugcaccgaggugcccgucgccauccacgccgaccagcugacgcccaccuggcggguguacuccaccgggagcaacguguuccagacccgcgccggcugccucaucggggcggagcacgucaacaacuccuacgagugcgacauccccaucggcgccggcaucugcgccagcuaccagacgcagaccaacuccccgcggcgcgcccggagcguggcgucccagagcaucaucgccuacaccaugucccugggggccgagaacagcguggccuacuccaacaacagcaucgccauccccaccaacuucacgaucuccgucaccaccgagauccugcccgugagcaugaccaagacgagcguggacugcaccauguacaucugcggcgacuccaccgagugcagcaaccuccugcugcaguacggguccuucugcacccagcucaaccgcgcgcugacgggcaucgccgucgagcaggacaagaacacccaggagguguucgcccaggugaagcagaucuacaagacgcccccgaucaaggacuucgggggcuucaacuucagccagauccugcccgaccccuccaagcccagcaagcgguccuucaucgaggaccuccuguucaacaaggucacccuggccgacgccggcuucaucaagcaguacggggacugccucggcgacaucgcggcccgcgaccugaucugcgcccagaaguucaacgggcugaccgugcucccgccccugcugaccgacgagaugaucgcccaguacaccagcgcccuccuggcgggcaccaucacguccggguggaccuucggcgccggcgccgcccugcagauccccuucgcgaugcagauggccuaccgguucaacgggaucggcgugacccagaacguccucuacgagaaccagaagcugaucgccaaccaguucaacagcgccaucgggaagauccaggacucccugagcuccaccgccagcgcgcucggcaagcugcaggacguggugaaccagaacgcccaggcccugaacacgcucgucaagcagcuguccagcaacuucggggccaucuccagcgugcugaacgacauccucucccgccuggacccgcccgaggccgaggugcagaucgaccggcugaucaccggccgccuccagagccugcagaccuacgucacccagcagcugauccgggcggccgagauccgcgccagcgccaaccucgccgcgaccaagauguccgagugcgugcugggccagagcaagcggguggacuucugcgggaagggcuaccaccugauguccuucccccagagcgcgccccacggggucguguuccuccacgugacguacguccccgcccaggagaagaacuucaccaccgccccggccaucugccacgacggcaaggcccacuucccccgcgaggggguguucgucuccaacggcacccacugguucgugacgcagcggaacuucuacgagccccagaucaucaccaccgacaacaccuucgugagcggcaacugcgacgucgugaucgggaucgugaacaacacggucuacgacccccugcagccggagcuggacuccuucaaggaggagcucgacaaguacuucaagaaccacaccagccccgacguggaccugggcgacaucuccgggaucaacgccagcguggucaacauccagaaggagaucgaccgccugaacgagguggccaagaaccucaacgagucccugaucgaccugcaggagcucggcaaguacgagcaguacaucaaguggcccugguacaucuggcugggcuucaucgccgggcugaucgcgaucgugauggucaccaucaugcucugcugcaugaccagcugcugcuccugccugaagggcugcugcagcugcggguccugcugcaaguucgacgaggacgacagcgagccggugcugaagggcgugaagcuccacuacacgugaugacucgagcugguacugcaugcacgcaaugcuagcugccccuuucccguccuggguaccccgagucucccccgaccucgggucccagguaugcucccaccuccaccugccccacucaccaccucugcuaguuccagacaccucccaagcacgcagcaaugcagcucaaaacgcuuagccuagccacacccccacgggaaacagcagugauuaaccuuuagcaauaaacgaaaguuuaacuaagcuauacuaaccccaggguuggucaauuucgugccagccacacccuggagcuagcaaaaaaaaaaaaaaaaaaaaaaaaaaaaaagcauaugacuaaaaaaaaaaaaaaaaaaaaaaaaaaaaaaaaaaaaaaaaaaaaaaaaaaaaaaaaaaaaaaaaaaaaaa

SEQ ID NO: 26842 - RNA, 4283 nt, Artificial Sequence
  SARS-CoV-2/Wuhan/WIV05/2019__EPI_ISL_402128 spike protein mRNA gc (1-1273)(K986P_V987P_Y453F_D614G)
agaauaaacuaguauucuucugguccccacagacucagagagaacccgccaccauguucguguuccugguccuccugccccuggugagcucccagugcgugaaccucaccacccgcacgcagcugccgcccgccuacaccaacagcuucacccggggcgucuacuaccccgacaagguguuccgcuccagcgugcugcacuccacccaggaccucuuccugcccuucuucagcaacgucacgugguuccacgccauccacguguccgggaccaacggcaccaagcgguucgacaacccggugcugcccuucaacgacggggucuacuucgcgagcaccgagaaguccaacaucauccgcggcuggaucuucgggacgacccucgacagcaagacccagucccugcugaucgugaacaacgccaccaacguggucaucaaggugugcgaguuccaguucugcaacgaccccuuccucggcguguacuaccacaagaacaacaagagcuggauggaguccgaguuccgggucuacagcuccgccaacaacugcacguucgaguacgugagccagcccuuccugauggaccuggagggcaagcaggggaacuucaagaaccuccgcgaguucguguucaagaacaucgacggcuacuucaagaucuacuccaagcacaccccgaucaaccugguccgggaccugccccagggguucagcgcccucgagccccugguggaccugcccaucggcaucaacaucacccgcuuccagacccuccuggcccugcaccgguccuaccucacgccgggggacagcagcuccggcuggaccgcgggcgccgccgccuacuacgugggguaccugcagccccgcaccuuccugcucaaguacaacgagaacggcaccaucacggacgcggucgacugcgcccuggacccccugagcgagaccaagugcacccucaaguccuucaccguggagaaggggaucuaccagacgagcaacuuccgggugcagcccaccgaguccaucguccgcuucccgaacaucaccaaccugugccccuucggcgagguguucaacgccacccgguucgccagcgucuacgccuggaaccgcaagcggaucuccaacugcguggcggacuacagcgugcuguacaacuccgccagcuucuccacguucaagugcuacggcgucagccccaccaagcucaacgaccugugcuucaccaacguguacgccgacuccuucgugauccgcggggacgagguccggcagaucgcccccggccagaccgggaagaucgccgacuacaacuacaagcugccggacgacuucacgggcugcgugaucgcguggaacagcaacaaccucgacuccaaggucgggggcaacuacaacuaccuguuccgccuguuccgcaagagcaaccucaagcccuucgagcgggacaucuccaccgagaucuaccaggccggcagcacccccugcaacgggguggagggcuucaacugcuacuucccccugcaguccuacggguuccagccgaccaacggcgugggguaccagcccuaccggguggucgugcugagcuucgagcuccugcacgcccccgccacggugugcggccccaagaaguccaccaaccuggucaagaacaagugcgugaacuucaacuucaacggccucaccgggaccggcgugcugaccgagagcaacaagaaguuccugccguuccagcaguucgggcgcgacaucgccgacacgaccgacgcgguccgcgacccccagacccuggagauccucgacaucacccccugcagcuucggcgggguguccgugaucacgccgggcaccaacaccagcaaccaggucgccgugcuguaccagggcgugaacugcaccgagguccccguggccauccacgccgaccagcugacgcccaccuggcggguguacuccaccgggagcaacgucuuccagacccgcgccggcugccucaucggggcggagcacgugaacaacuccuacgagugcgacauccccaucggcgccggcaucugcgccagcuaccagacgcagaccaacuccccgcggcgcgcccggagcguggcgucccagagcaucaucgccuacaccaugucccugggggccgagaacagcgucgccuacuccaacaacagcaucgccauccccaccaacuucacgaucuccgugaccaccgagauccugcccgugagcaugaccaagacgagcgucgacugcaccauguacaucugcggcgacuccaccgagugcagcaaccuccugcugcaguacggguccuucugcacccagcucaaccgcgcgcugacgggcaucgccguggagcaggacaagaacacccaggagguguucgcccaggucaagcagaucuacaagacgcccccgaucaaggacuucgggggcuucaacuucagccagauccugcccgaccccuccaagcccagcaagcgguccuucaucgaggaccuccuguucaacaaggugacccuggccgacgccggcuucaucaagcaguacggggacugccucggcgacaucgcggcccgcgaccugaucugcgcccagaaguucaacgggcugaccgugcucccgccccugcugaccgacgagaugaucgcccaguacaccagcgcccuccuggcgggcaccaucacguccggguggaccuucggcgccggcgccgcccugcagauccccuucgcgaugcagauggccuaccgguucaacgggaucggcgucacccagaacgugcucuacgagaaccagaagcugaucgccaaccaguucaacagcgccaucgggaagauccaggacucccugagcuccaccgccagcgcgcucggcaagcugcaggacguggucaaccagaacgcccaggcccugaacacgcucgugaagcagcuguccagcaacuucggggccaucuccagcgugcugaacgacauccucucccgccuggacccgcccgaggccgagguccagaucgaccggcugaucaccggccgccuccagagccugcagaccuacgugacccagcagcugauccgggcggccgagauccgcgccagcgccaaccucgccgcgaccaagauguccgagugcgugcugggccagagcaagcgggucgacuucugcgggaagggcuaccaccugauguccuucccccagagcgcgccccacggggugguguuccuccacgucacguacgugcccgcccaggagaagaacuucaccaccgccccggccaucugccacgacggcaaggcccacuucccccgcgagggggucuucguguccaacggcacccacugguucgugacgcagcggaacuucuacgagccccagaucaucaccaccgacaacaccuucgucagcggcaacugcgacguggugaucgggaucgucaacaacacgguguacgacccccugcagccggagcuggacuccuucaaggaggagcucgacaaguacuucaagaaccacaccagccccgacguggaccugggcgacaucuccgggaucaacgccagcgucgugaacauccagaaggagaucgaccgccugaacgagguggccaagaaccucaacgagucccugaucgaccugcaggagcucggcaaguacgagcaguacaucaaguggcccugguacaucuggcugggcuucaucgccgggcugaucgcgaucgucauggugaccaucaugcucugcugcaugaccagcugcugcuccugccugaagggcugcugcagcugcggguccugcugcaaguucgacgaggacgacagcgagccggugcugaagggcgucaagcuccacuacacgugaugacucgagcugguacugcaugcacgcaaugcuagcugccccuuucccguccuggguaccccgagucucccccgaccucgggucccagguaugcucccaccuccaccugccccacucaccaccucugcuaguuccagacaccucccaagcacgcagcaaugcagcucaaaacgcuuagccuagccacacccccacgggaaacagcagugauuaaccuuuagcaauaaacgaaaguuuaacuaagcuauacuaaccccaggguuggucaauuucgugccagccacacccuggagcuagcaaaaaaaaaaaaaaaaaaaaaaaaaaaaaagcauaugacuaaaaaaaaaaaaaaaaaaaaaaaaaaaaaaaaaaaaaaaaaaaaaaaaaaaaaaaaaaaaaaaaaaaaaa

SEQ ID NO: 26843 - RNA, 4283 nt, Artificial Sequence
  SARS-CoV-2/Wuhan/WIV05/2019__EPI_ISL_402128 spike protein mRNA gc (1-1273)(K986P_V987P_D614G_I692V)
agaauaaacuaguauucuucugguccccacagacucagagagaacccgccaccauguucguguuccugguccuccugccccuggugagcucccagugcgugaaccucaccacccgcacgcagcugccgcccgccuacaccaacagcuucacccggggcgucuacuaccccgacaagguguuccgcuccagcgugcugcacuccacccaggaccucuuccugcccuucuucagcaacgucacgugguuccacgccauccacguguccgggaccaacggcaccaagcgguucgacaacccggugcugcccuucaacgacggggucuacuucgcgagcaccgagaaguccaacaucauccgcggcuggaucuucgggacgacccucgacagcaagacccagucccugcugaucgugaacaacgccaccaacguggucaucaaggugugcgaguuccaguucugcaacgaccccuuccucggcguguacuaccacaagaacaacaagagcuggauggaguccgaguuccgggucuacagcuccgccaacaacugcacguucgaguacgugagccagcccuuccugauggaccuggagggcaagcaggggaacuucaagaaccuccgcgaguucguguucaagaacaucgacggcuacuucaagaucuacuccaagcacaccccgaucaaccugguccgggaccugccccagggguucagcgcccucgagccccugguggaccugcccaucggcaucaacaucacccgcuuccagacccuccuggcccugcaccgguccuaccucacgccgggggacagcagcuccggcuggaccgcgggcgccgccgccuacuacgugggguaccugcagccccgcaccuuccugcucaaguacaacgagaacggcaccaucacggacgcggucgacugcgcccuggacccccugagcgagaccaagugcacccucaaguccuucaccguggagaaggggaucuaccagacgagcaacuuccgggugcagcccaccgaguccaucguccgcuucccgaacaucaccaaccugugccccuucggcgagguguucaacgccacccgguucgccagcgucuacgccuggaaccgcaagcggaucuccaacugcguggcggacuacagcgugcuguacaacuccgccagcuucuccacguucaagugcuacggcgucagccccaccaagcucaacgaccugugcuucaccaacguguacgccgacuccuucgugauccgcggggacgagguccggcagaucgcccccggccagaccgggaagaucgccgacuacaacuacaagcugccggacgacuucacgggcugcgugaucgcguggaacagcaacaaccucgacuccaaggucgggggcaacuacaacuaccuguaccgccuguuccgcaagagcaaccucaagcccuucgagcgggacaucuccaccgagaucuaccaggccggcagcacccccugcaacgggguggagggcuucaacugcuacuucccccugcaguccuacggguuccagccgaccaacggcgugggguaccagcccuaccggguggucgugcugagcuucgagcuccugcacgcccccgccacggugugcggccccaagaaguccaccaaccuggucaagaacaagugcgugaacuucaacuucaacggccucaccgggaccggcgugcugaccgagagcaacaagaaguuccugccguuccagcaguucgggcgcgacaucgccgacacgaccgacgcgguccgcgacccccagacccuggagauccucgacaucacccccugcagcuucggcgggguguccgugaucacgccgggcaccaacaccagcaaccaggucgccgugcuguaccagggcgugaacugcaccgagguccccguggccauccacgccgaccagcugacgcccaccuggcggguguacuccaccgggagcaacgucuuccagacccgcgccggcugccucaucggggcggagcacgugaacaacuccuacgagugcgacauccccaucggcgccggcaucugcgccagcuaccagacgcagaccaacuccccgcggcgcgcccggagcguggcgucccagagcgucaucgccuacaccaugucccugggggccgagaacagcguggccuacuccaacaacagcaucgccauccccaccaacuucacgaucuccgugaccaccgagauccugcccgucagcaugaccaagacgagcguggacugcaccauguacaucugcggcgacuccaccgagugcagcaaccuccugcugcaguacggguccuucugcacccagcucaaccgcgcgcugacgggcaucgccguggagcaggacaagaacacccaggaggucuucgcccaggugaagcagaucuacaagacgcccccgaucaaggacuucgggggcuucaacuucagccagauccugcccgaccccuccaagcccagcaagcgguccuucaucgaggaccuccuguucaacaaggugacccuggccgacgccggcuucaucaagcaguacggggacugccucggcgacaucgcggcccgcgaccugaucugcgcccagaaguucaacgggcugaccguccucccgccccugcugaccgacgagaugaucgcccaguacaccagcgcccuccuggcgggcaccaucacguccggguggaccuucggcgccggcgccgcccugcagauccccuucgcgaugcagauggccuaccgguucaacgggaucggcgugacccagaacgugcucuacgagaaccagaagcugaucgccaaccaguucaacagcgccaucgggaagauccaggacucccugagcuccaccgccagcgcgcucggcaagcugcaggacgucgugaaccagaacgcccaggcccugaacacgcucgugaagcagcuguccagcaacuucggggccaucuccagcguccugaacgacauccucucccgccuggacccgcccgaggccgaggugcagaucgaccggcugaucaccggccgccuccagagccugcagaccuacgugacccagcagcugauccgggcggccgagauccgcgccagcgccaaccucgccgcgaccaagauguccgagugcguccugggccagagcaagcggguggacuucugcgggaagggcuaccaccugauguccuucccccagagcgcgccccacgggguggucuuccuccacgugacguacguccccgcccaggagaagaacuucaccaccgccccggccaucugccacgacggcaaggcccacuucccccgcgaggggguguucguguccaacggcacccacugguucgucacgcagcggaacuucuacgagccccagaucaucaccaccgacaacaccuucgugagcggcaacugcgacguggucaucgggaucgugaacaacacgguguacgacccccugcagccggagcuggacuccuucaaggaggagcucgacaaguacuucaagaaccacaccagccccgacgucgaccugggcgacaucuccgggaucaacgccagcguggugaacauccagaaggagaucgaccgccugaacgaggucgccaagaaccucaacgagucccugaucgaccugcaggagcucggcaaguacgagcaguacaucaaguggcccugguacaucuggcugggcuucaucgccgggcugaucgcgaucgugauggugaccaucaugcucugcugcaugaccagcugcugcuccugccugaagggcugcugcagcugcggguccugcugcaaguucgacgaggacgacagcgagccgguccugaagggcgugaagcuccacuacacgugaugacucgagcugguacugcaugcacgcaaugcuagcugccccuuucccguccuggguaccccgagucucccccgaccucgggucccagguaugcucccaccuccaccugccccacucaccaccucugcuaguuccagacaccucccaagcacgcagcaaugcagcucaaaacgcuuagccuagccacacccccacgggaaacagcagugauuaaccuuuagcaauaaacgaaaguuuaacuaagcuauacuaaccccaggguuggucaauuucgugccagccacacccuggagcuagcaaaaaaaaaaaaaaaaaaaaaaaaaaaaaagcauaugacuaaaaaaaaaaaaaaaaaaaaaaaaaaaaaaaaaaaaaaaaaaaaaaaaaaaaaaaaaaaaaaaaaaaaaa

SEQ ID NO: 26844 - RNA, 4283 nt, Artificial Sequence
  SARS-CoV-2/Wuhan/WIV05/2019__EPI_ISL_402128 spike protein mRNA gc (1-1273)(K986P_V987P_D614G_M1229I)
agaauaaacuaguauucuucugguccccacagacucagagagaacccgccaccauguucguguuccugguccuccugccccuggugagcucccagugcgugaaccucaccacccgcacgcagcugccgcccgccuacaccaacagcuucacccggggcgucuacuaccccgacaagguguuccgcuccagcgugcugcacuccacccaggaccucuuccugcccuucuucagcaacgucacgugguuccacgccauccacguguccgggaccaacggcaccaagcgguucgacaacccggugcugcccuucaacgacggggucuacuucgcgagcaccgagaaguccaacaucauccgcggcuggaucuucgggacgacccucgacagcaagacccagucccugcugaucgugaacaacgccaccaacguggucaucaaggugugcgaguuccaguucugcaacgaccccuuccucggcguguacuaccacaagaacaacaagagcuggauggaguccgaguuccgggucuacagcuccgccaacaacugcacguucgaguacgugagccagcccuuccugauggaccuggagggcaagcaggggaacuucaagaaccuccgcgaguucguguucaagaacaucgacggcuacuucaagaucuacuccaagcacaccccgaucaaccugguccgggaccugccccagggguucagcgcccucgagccccugguggaccugcccaucggcaucaacaucacccgcuuccagacccuccuggcccugcaccgguccuaccucacgccgggggacagcagcuccggcuggaccgcgggcgccgccgccuacuacgugggguaccugcagccccgcaccuuccugcucaaguacaacgagaacggcaccaucacggacgcggucgacugcgcccuggacccccugagcgagaccaagugcacccucaaguccuucaccguggagaaggggaucuaccagacgagcaacuuccgggugcagcccaccgaguccaucguccgcuucccgaacaucaccaaccugugccccuucggcgagguguucaacgccacccgguucgccagcgucuacgccuggaaccgcaagcggaucuccaacugcguggcggacuacagcgugcuguacaacuccgccagcuucuccacguucaagugcuacggcgucagccccaccaagcucaacgaccugugcuucaccaacguguacgccgacuccuucgugauccgcggggacgagguccggcagaucgcccccggccagaccgggaagaucgccgacuacaacuacaagcugccggacgacuucacgggcugcgugaucgcguggaacagcaacaaccucgacuccaaggucgggggcaacuacaacuaccuguaccgccuguuccgcaagagcaaccucaagcccuucgagcgggacaucuccaccgagaucuaccaggccggcagcacccccugcaacgggguggagggcuucaacugcuacuucccccugcaguccuacggguuccagccgaccaacggcgugggguaccagcccuaccggguggucgugcugagcuucgagcuccugcacgcccccgccacggugugcggccccaagaaguccaccaaccuggucaagaacaagugcgugaacuucaacuucaacggccucaccgggaccggcgugcugaccgagagcaacaagaaguuccugccguuccagcaguucgggcgcgacaucgccgacacgaccgacgcgguccgcgacccccagacccuggagauccucgacaucacccccugcagcuucggcgggguguccgugaucacgccgggcaccaacaccagcaaccaggucgccgugcuguaccagggcgugaacugcaccgagguccccguggccauccacgccgaccagcugacgcccaccuggcggguguacuccaccgggagcaacgucuuccagacccgcgccggcugccucaucggggcggagcacgugaacaacuccuacgagugcgacauccccaucggcgccggcaucugcgccagcuaccagacgcagaccaacuccccgcggcgcgcccggagcguggcgucccagagcaucaucgccuacaccaugucccugggggccgagaacagcgucgccuacuccaacaacagcaucgccauccccaccaacuucacgaucuccgugaccaccgagauccugcccgugagcaugaccaagacgagcgucgacugcaccauguacaucugcggcgacuccaccgagugcagcaaccuccugcugcaguacggguccuucugcacccagcucaaccgcgcgcugacgggcaucgccguggagcaggacaagaacacccaggagguguucgcccaggucaagcagaucuacaagacgcccccgaucaaggacuucgggggcuucaacuucagccagauccugcccgaccccuccaagcccagcaagcgguccuucaucgaggaccuccuguucaacaaggugacccuggccgacgccggcuucaucaagcaguacggggacugccucggcgacaucgcggcccgcgaccugaucugcgcccagaaguucaacgggcugaccgugcucccgccccugcugaccgacgagaugaucgcccaguacaccagcgcccuccuggcgggcaccaucacguccggguggaccuucggcgccggcgccgcccugcagauccccuucgcgaugcagauggccuaccgguucaacgggaucggcgucacccagaacgugcucuacgagaaccagaagcugaucgccaaccaguucaacagcgccaucgggaagauccaggacucccugagcuccaccgccagcgcgcucggcaagcugcaggacguggucaaccagaacgcccaggcccugaacacgcucgugaagcagcuguccagcaacuucggggccaucuccagcgugcugaacgacauccucucccgccuggacccgcccgaggccgagguccagaucgaccggcugaucaccggccgccuccagagccugcagaccuacgugacccagcagcugauccgggcggccgagauccgcgccagcgccaaccucgccgcgaccaagauguccgagugcgugcugggccagagcaagcgggucgacuucugcgggaagggcuaccaccugauguccuucccccagagcgcgccccacggggugguguuccuccacgucacguacgugcccgcccaggagaagaacuucaccaccgccccggccaucugccacgacggcaaggcccacuucccccgcgagggggucuucguguccaacggcacccacugguucgugacgcagcggaacuucuacgagccccagaucaucaccaccgacaacaccuucgucagcggcaacugcgacguggugaucgggaucgucaacaacacgguguacgacccccugcagccggagcuggacuccuucaaggaggagcucgacaaguacuucaagaaccacaccagccccgacguggaccugggcgacaucuccgggaucaacgccagcgucgugaacauccagaaggagaucgaccgccugaacgagguggccaagaaccucaacgagucccugaucgaccugcaggagcucggcaaguacgagcaguacaucaaguggcccugguacaucuggcugggcuucaucgccgggcugaucgcgaucgucaucgugaccaucaugcucugcugcaugaccagcugcugcuccugccugaagggcugcugcagcugcggguccugcugcaaguucgacgaggacgacagcgagccggugcugaagggcgucaagcuccacuacacgugaugacucgagcugguacugcaugcacgcaaugcuagcugccccuuucccguccuggguaccccgagucucccccgaccucgggucccagguaugcucccaccuccaccugccccacucaccaccucugcuaguuccagacaccucccaagcacgcagcaaugcagcucaaaacgcuuagccuagccacacccccacgggaaacagcagugauuaaccuuuagcaauaaacgaaaguuuaacuaagcuauacuaaccccaggguuggucaauuucgugccagccacacccuggagcuagcaaaaaaaaaaaaaaaaaaaaaaaaaaaaaagcauaugacuaaaaaaaaaaaaaaaaaaaaaaaaaaaaaaaaaaaaaaaaaaaaaaaaaaaaaaaaaaaaaaaaaaaaaa

SEQ ID NO: 26845 - RNA, 4277 nt, Artificial Sequence
  SARS-CoV-2/Wuhan/WIV05/2019__EPI_ISL_402128 spike protein mRNA gc (1-1273)(K986P_V987P_H69del_V70del_A222V_Y453F_S477N_D614G_I692V)
agaauaaacuaguauucuucugguccccacagacucagagagaacccgccaccauguucguguuccugguccuccugccccuggugagcucccagugcgugaaccucaccacccgcacgcagcugccgcccgccuacaccaacagcuucacccggggcgucuacuaccccgacaagguguuccgcuccagcgugcugcacuccacccaggaccucuuccugcccuucuucagcaacgucacgugguuccacgccaucuccgggaccaacggcaccaagcgguucgacaacccggugcugcccuucaacgacgggguguacuucgcgagcaccgagaaguccaacaucauccgcggcuggaucuucgggacgacccucgacagcaagacccagucccugcugaucgucaacaacgccaccaacguggugaucaaggucugcgaguuccaguucugcaacgaccccuuccucggcguguacuaccacaagaacaacaagagcuggauggaguccgaguuccggguguacagcuccgccaacaacugcacguucgaguacgucagccagcccuuccugauggaccuggagggcaagcaggggaacuucaagaaccuccgcgaguucguguucaagaacaucgacggcuacuucaagaucuacuccaagcacaccccgaucaaccuggugcgggaccugccccagggguucagcguccucgagccccugguggaccugcccaucggcaucaacaucacccgcuuccagacccuccuggcccugcaccgguccuaccucacgccgggggacagcagcuccggcuggaccgccggcgcggccgccuacuacgugggguaccugcagccccgcaccuuccugcucaaguacaacgagaacggcaccaucacggacgccgucgacugcgcgcuggacccccugagcgagaccaagugcacccucaaguccuucaccguggagaaggggaucuaccagacgagcaacuuccgggugcagcccaccgaguccaucguccgcuucccgaacaucaccaaccugugccccuucggcgagguguucaacgccacccgguucgccagcgucuacgccuggaaccgcaagcggaucuccaacugcguggccgacuacagcgugcuguacaacuccgcgagcuucuccacguucaagugcuacggcgucagccccaccaagcucaacgaccugugcuucaccaacguguacgccgacuccuucgugauccgcggggacgagguccggcagaucgcccccggccagaccgggaagaucgccgacuacaacuacaagcugccggacgacuucacgggcugcgugaucgccuggaacagcaacaaccucgacuccaaggucgggggcaacuacaacuaccuguuccgccuguuccgcaagagcaaccucaagcccuucgagcgggacaucuccaccgagaucuaccaggcgggcaacacccccugcaacgggguggagggcuucaacugcuacuucccccugcagagcuacggguuccagccgaccaacggcgugggguaccagcccuaccggguggucgugcuguccuucgagcuccugcacgcccccgccacggugugcggccccaagaaguccaccaaccuggucaagaacaagugcgugaacuucaacuucaacggccucaccgggaccggcgugcugaccgagagcaacaagaaguuccugccguuccagcaguucgggcgcgacaucgccgacacgaccgacgccguccgcgacccccagacccuggagauccucgacaucacccccugcagcuucggcggggugagcgugaucacgccgggcaccaacaccuccaaccaggucgcggugcuguaccagggcgugaacugcaccgagguccccguggccauccacgccgaccagcugacgcccaccuggcggguguacagcaccggguccaacgucuuccagacccgcgccggcugccucaucggggccgagcacgugaacaacagcuacgagugcgacauccccaucggcgcgggcaucugcgccuccuaccagacgcagaccaacagcccgcggcgcgcccgguccguggccagccaguccgucaucgcguacaccaugagccugggggccgagaacuccguggccuacagcaacaacuccaucgccauccccaccaacuucacgaucagcgugaccaccgagauccugcccgucuccaugaccaagacgagcguggacugcaccauguacaucugcggcgacagcaccgagugcuccaaccuccugcugcaguacgggagcuucugcacccagcucaaccgcgcccugacgggcaucgcgguggagcaggacaagaacacccaggaggucuucgcccaggugaagcagaucuacaagacgcccccgaucaaggacuucgggggcuucaacuucucccagauccugcccgaccccagcaagcccuccaagcggagcuucaucgaggaccuccuguucaacaaggugacccuggccgacgccggcuucaucaagcaguacggggacugccucggcgacaucgccgcgcgcgaccugaucugcgcccagaaguucaacgggcugaccguccucccgccccugcugaccgacgagaugaucgcccaguacaccuccgcccuccuggccggcaccaucacgagcggguggaccuucggcgcgggcgccgcccugcagauccccuucgccaugcagauggcguaccgguucaacgggaucggcgugacccagaacgugcucuacgagaaccagaagcugaucgccaaccaguucaacuccgccaucgggaagauccaggacagccuguccagcaccgccuccgcccucggcaagcugcaggacgucgugaaccagaacgcgcaggcccugaacacgcucgugaagcagcugagcuccaacuucggggccaucagcuccguccugaacgacauccucagccgccuggacccgcccgaggccgaggugcagaucgaccggcugaucaccggccgccuccagucccugcagaccuacgugacccagcagcugauccgggccgcggagauccgcgccagcgccaaccucgccgccaccaagaugagcgagugcguccugggccaguccaagcggguggacuucugcgggaagggcuaccaccugaugagcuucccccaguccgcgccccacgggguggucuuccuccacgugacguacguccccgcccaggagaagaacuucaccaccgccccggccaucugccacgacggcaaggcgcacuucccccgcgaggggguguucgugagcaacggcacccacugguucgucacgcagcggaacuucuacgagccccagaucaucaccaccgacaacaccuucguguccggcaacugcgacguggucaucgggaucgugaacaacacgguguacgacccccugcagccggagcuggacagcuucaaggaggagcucgacaaguacuucaagaaccacaccucccccgacgucgaccugggcgacaucagcgggaucaacgccuccguggugaacauccagaaggagaucgaccgccugaacgaggucgccaagaaccucaacgagagccugaucgaccugcaggagcucggcaaguacgagcaguacaucaaguggcccugguacaucuggcugggcuucaucgccgggcugaucgccaucgugauggugaccaucaugcucugcugcaugaccuccugcugcagcugccugaagggcugcugcuccugcgggagcugcugcaaguucgacgaggacgacuccgagccgguccugaagggcgugaagcuccacuacacgugaugacucgagcugguacugcaugcacgcaaugcuagcugccccuuucccguccuggguaccccgagucucccccgaccucgggucccagguaugcucccaccuccaccugccccacucaccaccucugcuaguuccagacaccucccaagcacgcagcaaugcagcucaaaacgcuuagccuagccacacccccacgggaaacagcagugauuaaccuuuagcaauaaacgaaaguuuaacuaagcuauacuaaccccaggguuggucaauuucgugccagccacacccuggagcuagcaaaaaaaaaaaaaaaaaaaaaaaaaaaaaagcauaugacuaaaaaaaaaaaaaaaaaaaaaaaaaaaaaaaaaaaaaaaaaaaaaaaaaaaaaaaaaaaaaaaaaaaaaa

SEQ ID NO: 26846 - RNA, 4277 nt, Artificial Sequence
  SARS-CoV-2/Wuhan/WIV05/2019__EPI_ISL_402128 spike protein mRNA gc (1-1273)(K986P_V987P_H69del_V70del_Y453F_D614G_I692V_M1229I)
agaauaaacuaguauucuucugguccccacagacucagagagaacccgccaccauguucguguuccugguccuccugccccuggugagcucccagugcgugaaccucaccacccgcacgcagcugccgcccgccuacaccaacagcuucacccggggcgucuacuaccccgacaagguguuccgcuccagcgugcugcacuccacccaggaccucuuccugcccuucuucagcaacgucacgugguuccacgccaucuccgggaccaacggcaccaagcgguucgacaacccggugcugcccuucaacgacgggguguacuucgcgagcaccgagaaguccaacaucauccgcggcuggaucuucgggacgacccucgacagcaagacccagucccugcugaucgucaacaacgccaccaacguggugaucaaggucugcgaguuccaguucugcaacgaccccuuccucggcguguacuaccacaagaacaacaagagcuggauggaguccgaguuccggguguacagcuccgccaacaacugcacguucgaguacgucagccagcccuuccugauggaccuggagggcaagcaggggaacuucaagaaccuccgcgaguucguguucaagaacaucgacggcuacuucaagaucuacuccaagcacaccccgaucaaccuggugcgggaccugccccagggguucagcgcccucgagccccuggucgaccugcccaucggcaucaacaucacccgcuuccagacccuccuggcccugcaccgguccuaccucacgccgggggacagcagcuccggcuggaccgcgggcgccgccgccuacuacgugggguaccugcagccccgcaccuuccugcucaaguacaacgagaacggcaccaucacggacgcgguggacugcgcccuggacccccugagcgagaccaagugcacccucaaguccuucaccgucgagaaggggaucuaccagacgagcaacuuccgggugcagcccaccgaguccaucgugcgcuucccgaacaucaccaaccugugccccuucggcgaggucuucaacgccacccgguucgccagcguguacgccuggaaccgcaagcggaucuccaacugcgucgcggacuacagcgugcuguacaacuccgccagcuucuccacguucaagugcuacggcgugagccccaccaagcucaacgaccugugcuucaccaacgucuacgccgacuccuucgugauccgcggggacgaggugcggcagaucgcccccggccagaccgggaagaucgccgacuacaacuacaagcugccggacgacuucacgggcugcgucaucgcguggaacagcaacaaccucgacuccaaggucgggggcaacuacaacuaccuguuccgccuguuccgcaagagcaaccucaagcccuucgagcgggacaucuccaccgagaucuaccaggccggcagcacccccugcaacgggguggagggcuucaacugcuacuucccccugcaguccuacggguuccagccgaccaacggcgugggguaccagcccuaccggguggugguccugagcuucgagcuccugcacgcccccgccacggugugcggccccaagaaguccaccaaccuggugaagaacaagugcgucaacuucaacuucaacggccucaccgggaccggcgugcugaccgagagcaacaagaaguuccugccguuccagcaguucgggcgcgacaucgccgacacgaccgacgcggugcgcgacccccagacccuggagauccucgacaucacccccugcagcuucggcggggucuccgugaucacgccgggcaccaacaccagcaaccagguggccguccuguaccagggcgugaacugcaccgaggugcccgucgccauccacgccgaccagcugacgcccaccuggcggguguacuccaccgggagcaacguguuccagacccgcgccggcugccucaucggggcggagcacgucaacaacuccuacgagugcgacauccccaucggcgccggcaucugcgccagcuaccagacgcagaccaacuccccgcggcgcgcccggagcguggcgucccagagcgugaucgccuacaccaugucccugggggccgagaacagcgucgccuacuccaacaacagcaucgccauccccaccaacuucacgaucuccgugaccaccgagauccugcccgugagcaugaccaagacgagcgucgacugcaccauguacaucugcggcgacuccaccgagugcagcaaccuccugcugcaguacggguccuucugcacccagcucaaccgcgcgcugacgggcaucgccguggagcaggacaagaacacccaggagguguucgcccaggucaagcagaucuacaagacgcccccgaucaaggacuucgggggcuucaacuucagccagauccugcccgaccccuccaagcccagcaagcgguccuucaucgaggaccuccuguucaacaaggugacccuggccgacgccggcuucaucaagcaguacggggacugccucggcgacaucgcggcccgcgaccugaucugcgcccagaaguucaacgggcugaccgugcucccgccccugcugaccgacgagaugaucgcccaguacaccagcgcccuccuggcgggcaccaucacguccggguggaccuucggcgccggcgccgcccugcagauccccuucgcgaugcagauggccuaccgguucaacgggaucggcgucacccagaacgugcucuacgagaaccagaagcugaucgccaaccaguucaacagcgccaucgggaagauccaggacucccugagcuccaccgccagcgcgcucggcaagcugcaggacguggucaaccagaacgcccaggcccugaacacgcucgugaagcagcuguccagcaacuucggggccaucuccagcgugcugaacgacauccucucccgccuggacccgcccgaggccgagguccagaucgaccggcugaucaccggccgccuccagagccugcagaccuacgugacccagcagcugauccgggcggccgagauccgcgccagcgccaaccucgccgcgaccaagauguccgagugcgugcugggccagagcaagcgggucgacuucugcgggaagggcuaccaccugauguccuucccccagagcgcgccccacggggugguguuccuccacgucacguacgugcccgcccaggagaagaacuucaccaccgccccggccaucugccacgacggcaaggcccacuucccccgcgagggggucuucguguccaacggcacccacugguucgugacgcagcggaacuucuacgagccccagaucaucaccaccgacaacaccuucgucagcggcaacugcgacguggugaucgggaucgucaacaacacgguguacgacccccugcagccggagcuggacuccuucaaggaggagcucgacaaguacuucaagaaccacaccagccccgacguggaccugggcgacaucuccgggaucaacgccagcgucgugaacauccagaaggagaucgaccgccugaacgagguggccaagaaccucaacgagucccugaucgaccugcaggagcucggcaaguacgagcaguacaucaaguggcccugguacaucuggcugggcuucaucgccgggcugaucgcgaucgucaucgugaccaucaugcucugcugcaugaccagcugcugcuccugccugaagggcugcugcagcugcggguccugcugcaaguucgacgaggacgacagcgagccggugcugaagggcgucaagcuccacuacacgugaugacucgagcugguacugcaugcacgcaaugcuagcugccccuuucccguccuggguaccccgagucucccccgaccucgggucccagguaugcucccaccuccaccugccccacucaccaccucugcuaguuccagacaccucccaagcacgcagcaaugcagcucaaaacgcuuagccuagccacacccccacgggaaacagcagugauuaaccuuuagcaauaaacgaaaguuuaacuaagcuauacuaaccccaggguuggucaauuucgugccagccacacccuggagcuagcaaaaaaaaaaaaaaaaaaaaaaaaaaaaaagcauaugacuaaaaaaaaaaaaaaaaaaaaaaaaaaaaaaaaaaaaaaaaaaaaaaaaaaaaaaaaaaaaaaaaaaaaaa

SEQ ID NO: 26847 - RNA, 4274 nt, Artificial Sequence
  SARS-CoV-2/Wuhan/WIV05/2019__EPI_ISL_402128 spike protein mRNA gc (1-1273)(K986P_V987P_K986P_V987P_H69del_V70del_Y144del_N501Y_A570 D_D614G_P681H_T716I_S982A_D1118H)
agaauaaacuaguauucuucugguccccacagacucagagagaacccgccaccauguucguguuccugguccuccugccccuggugagcucccagugcgugaaccucaccacccgcacgcagcugccgcccgccuacaccaacagcuucacccggggcgucuacuaccccgacaagguguuccgcuccagcgugcugcacuccacccaggaccucuuccugcccuucuucagcaacgucacgugguuccacgccaucuccgggaccaacggcaccaagcgguucgacaacccggugcugcccuucaacgacgggguguacuucgcgagcaccgagaaguccaacaucauccgcggcuggaucuucgggacgacccucgacagcaagacccagucccugcugaucgucaacaacgccaccaacguggugaucaaggucugcgaguuccaguucugcaacgaccccuuccucggcguguaccacaagaacaacaagagcuggauggaguccgaguuccggguguacagcuccgccaacaacugcacguucgaguacgucagccagcccuuccugauggaccuggagggcaagcaggggaacuucaagaaccuccgcgaguucguguucaagaacaucgacggcuacuucaagaucuacuccaagcacaccccgaucaaccuggugcgggaccugccccagggguucagcgcccucgagccccuggucgaccugcccaucggcaucaacaucacccgcuuccagacccuccuggcccugcaccgguccuaccucacgccgggggacagcagcuccggcuggaccgcgggcgccgccgccuacuacgugggguaccugcagccccgcaccuuccugcucaaguacaacgagaacggcaccaucacggacgcgguggacugcgcccuggacccccugagcgagaccaagugcacccucaaguccuucaccgucgagaaggggaucuaccagacgagcaacuuccgggugcagcccaccgaguccaucgugcgcuucccgaacaucaccaaccugugccccuucggcgaggucuucaacgccacccgguucgccagcguguacgccuggaaccgcaagcggaucuccaacugcgucgcggacuacagcgugcuguacaacuccgccagcuucuccacguucaagugcuacggcgugagccccaccaagcucaacgaccugugcuucaccaacgucuacgccgacuccuucgugauccgcggggacgaggugcggcagaucgcccccggccagaccgggaagaucgccgacuacaacuacaagcugccggacgacuucacgggcugcgucaucgcguggaacagcaacaaccucgacuccaaggucgggggcaacuacaacuaccuguaccgccuguuccgcaagagcaaccucaagcccuucgagcgggacaucuccaccgagaucuaccaggccggcagcacccccugcaacgggguggagggcuucaacugcuacuucccccugcaguccuacggguuccagccgaccuacggcgugggguaccagcccuaccggguggugguccugagcuucgagcuccugcacgcccccgccacggugugcggccccaagaaguccaccaaccuggugaagaacaagugcgucaacuucaacuucaacggccucaccgggaccggcgugcugaccgagagcaacaagaaguuccugccguuccagcaguucgggcgcgacaucgacgacacgaccgacgccgugcgcgacccccagacccuggagauccucgacaucacccccugcagcuucggcggggucuccgugaucacgccgggcaccaacaccagcaaccagguggcgguccuguaccagggcgugaacugcaccgaggugcccgucgccauccacgccgaccagcugacgcccaccuggcggguguacuccaccgggagcaacguguuccagacccgcgccggcugccucaucggggccgagcacgucaacaacuccuacgagugcgacauccccaucggcgcgggcaucugcgccagcuaccagacgcagaccaacucccaccggcgcgcccggagcguggccucccagagcaucaucgcguacaccaugucccugggggccgagaacagcguggccuacuccaacaacagcaucgccaucccgaucaacuucaccaucuccgucacgaccgagauccugcccgugagcaugaccaagaccagcguggacugcacgauguacaucugcggcgacuccaccgagugcagcaaccuccugcugcaguacggguccuucugcacccagcucaaccgcgcccugaccggcaucgcggucgagcaggacaagaacacgcaggagguguucgcccaggugaagcagaucuacaagaccccgcccaucaaggacuucgggggcuucaacuucagccagauccugcccgaccccuccaagcccagcaagcgguccuucaucgaggaccuccuguucaacaaggucacccuggccgacgccggcuucaucaagcaguacggggacugccucggcgacaucgccgcgcgcgaccugaucugcgcccagaaguucaacgggcugaccgugcugcccccgcuccugacggacgagaugaucgcccaguacaccagcgcccuccuggccggcaccaucaccuccggguggacguucggcgcgggcgccgcccugcagauccccuucgccaugcagauggcguaccgguucaacgggaucggcgugacccagaacguccucuacgagaaccagaagcugaucgccaaccaguucaacagcgccaucgggaagauccaggacucccugagcuccaccgccagcgcccucggcaagcugcaggacguggugaaccagaacgcgcaggcccugaacacccucgucaagcagcuguccagcaacuucggggccaucuccagcgugcugaacgacauccucgcccgccuggacccgcccgaggccgaggugcagaucgaccggcugaucacgggccgccuccagucccugcagaccuacgucacccagcagcugauccgggcggccgagauccgcgccagcgccaaccucgccgcgaccaagaugagcgagugcgugcugggccaguccaagcggguggacuucugcgggaagggcuaccaccugaugagcuucccccaguccgcgccccacggggucguguuccuccacgugaccuacguccccgcccaggagaagaacuucacgaccgcccccgccaucugccacgacggcaaggcccacuucccgcgcgaggggguguucgucagcaacggcacccacugguucgugacccagcggaacuucuacgagccccagaucaucacgacccacaacaccuucguguccggcaacugcgacgucgugaucgggaucgugaacaacaccgucuacgacccccugcagcccgagcuggacagcuucaaggaggagcucgacaaguacuucaagaaccacacguccccggacguggaccugggcgacaucagcgggaucaacgccuccguggucaacauccagaaggagaucgaccgccugaacgagguggccaagaaccucaacgagagccugaucgaccugcaggagcucggcaaguacgagcaguacaucaaguggcccugguacaucuggcugggcuucaucgccgggcugaucgcgaucgugauggucaccaucaugcucugcugcaugaccuccugcugcagcugccugaagggcugcugcuccugcgggagcugcugcaaguucgacgaggacgacuccgagcccgugcugaagggcgugaagcuccacuacaccugaugacucgagcugguacugcaugcacgcaaugcuagcugccccuuucccguccuggguaccccgagucucccccgaccucgggucccagguaugcucccaccuccaccugccccacucaccaccucugcuaguuccagacaccucccaagcacgcagcaaugcagcucaaaacgcuuagccuagccacacccccacgggaaacagcagugauuaaccuuuagcaauaaacgaaaguuuaacuaagcuauacuaaccccaggguuggucaauuucgugccagccacacccuggagcuagcaaaaaaaaaaaaaaaaaaaaaaaaaaaaaagcauaugacuaaaaaaaaaaaaaaaaaaaaaaaaaaaaaaaaaaaaaaaaaaaaaaaaaaaaaaaaaaaaaaaaaaaaaa

SEQ ID NO: 26848 - RNA, 4283 nt, Artificial Sequence
  SARS-CoV-2/Wuhan/WIV05/2019__EPI_ISL_402128 spike protein mRNA gc (1-1273)(K986P_V987P_K986P_V987P_K417N_E484K_N501Y_D614G)
agaauaaacuaguauucuucugguccccacagacucagagagaacccgccaccauguucguguuccugguccuccugccccuggugagcucccagugcgugaaccucaccacccgcacgcagcugccgcccgccuacaccaacagcuucacccggggcgucuacuaccccgacaagguguuccgcuccagcgugcugcacuccacccaggaccucuuccugcccuucuucagcaacgucacgugguuccacgccauccacguguccgggaccaacggcaccaagcgguucgacaacccggugcugcccuucaacgacggggucuacuucgcgagcaccgagaaguccaacaucauccgcggcuggaucuucgggacgacccucgacagcaagacccagucccugcugaucgugaacaacgccaccaacguggucaucaaggugugcgaguuccaguucugcaacgaccccuuccucggcguguacuaccacaagaacaacaagagcuggauggaguccgaguuccgggucuacagcuccgccaacaacugcacguucgaguacgugagccagcccuuccugauggaccuggagggcaagcaggggaacuucaagaaccuccgcgaguucguguucaagaacaucgacggcuacuucaagaucuacuccaagcacaccccgaucaaccugguccgggaccugccccagggguucagcgcccucgagccccugguggaccugcccaucggcaucaacaucacccgcuuccagacccuccuggcccugcaccgguccuaccucacgccgggggacagcagcuccggcuggaccgcgggcgccgccgccuacuacgugggguaccugcagccccgcaccuuccugcucaaguacaacgagaacggcaccaucacggacgcggucgacugcgcccuggacccccugagcgagaccaagugcacccucaaguccuucaccguggagaaggggaucuaccagacgagcaacuuccgggugcagcccaccgaguccaucguccgcuucccgaacaucaccaaccugugccccuucggcgagguguucaacgccacccgguucgccagcgucuacgccuggaaccgcaagcggaucuccaacugcguggcggacuacagcgugcuguacaacuccgccagcuucuccacguucaagugcuacggcgucagccccaccaagcucaacgaccugugcuucaccaacguguacgccgacuccuucgugauccgcggggacgagguccggcagaucgcccccggccagaccgggaacaucgccgacuacaacuacaagcugccggacgacuucacgggcugcgugaucgcguggaacagcaacaaccucgacuccaaggucgggggcaacuacaacuaccuguaccgccuguuccgcaagagcaaccucaagcccuucgagcgggacaucuccaccgagaucuaccaggccggcagcacccccugcaacggggugaagggcuucaacugcuacuucccccugcaguccuacggguuccagccgaccuacggcgugggguaccagcccuaccggguggucgugcugagcuucgagcuccugcacgcccccgccacggugugcggccccaagaaguccaccaaccuggucaagaacaagugcgugaacuucaacuucaacggccucaccgggaccggcgugcugaccgagagcaacaagaaguuccugccguuccagcaguucgggcgcgacaucgccgacacgaccgacgcgguccgcgacccccagacccuggagauccucgacaucacccccugcagcuucggcgggguguccgugaucacgccgggcaccaacaccagcaaccaggucgccgugcuguaccagggcgugaacugcaccgagguccccguggccauccacgccgaccagcugacgcccaccuggcggguguacuccaccgggagcaacgucuuccagacccgcgccggcugccucaucggggcggagcacgugaacaacuccuacgagugcgacauccccaucggcgccggcaucugcgccagcuaccagacgcagaccaacuccccgcggcgcgcccggagcguggcgucccagagcaucaucgccuacaccaugucccugggggccgagaacagcgucgccuacuccaacaacagcaucgccauccccaccaacuucacgaucuccgugaccaccgagauccugcccgugagcaugaccaagacgagcgucgacugcaccauguacaucugcggcgacuccaccgagugcagcaaccuccugcugcaguacggguccuucugcacccagcucaaccgcgcgcugacgggcaucgccguggagcaggacaagaacacccaggagguguucgcccaggucaagcagaucuacaagacgcccccgaucaaggacuucgggggcuucaacuucagccagauccugcccgaccccuccaagcccagcaagcgguccuucaucgaggaccuccuguucaacaaggugacccuggccgacgccggcuucaucaagcaguacggggacugccucggcgacaucgcggcccgcgaccugaucugcgcccagaaguucaacgggcugaccgugcucccgccccugcugaccgacgagaugaucgcccaguacaccagcgcccuccuggcgggcaccaucacguccggguggaccuucggcgccggcgccgcccugcagauccccuucgcgaugcagauggccuaccgguucaacgggaucggcgucacccagaacgugcucuacgagaaccagaagcugaucgccaaccaguucaacagcgccaucgggaagauccaggacucccugagcuccaccgccagcgcgcucggcaagcugcaggacguggucaaccagaacgcccaggcccugaacacgcucgugaagcagcuguccagcaacuucggggccaucuccagcgugcugaacgacauccucucccgccuggacccgcccgaggccgagguccagaucgaccggcugaucaccggccgccuccagagccugcagaccuacgugacccagcagcugauccgggcggccgagauccgcgccagcgccaaccucgccgcgaccaagauguccgagugcgugcugggccagagcaagcgggucgacuucugcgggaagggcuaccaccugauguccuucccccagagcgcgccccacggggugguguuccuccacgucacguacgugcccgcccaggagaagaacuucaccaccgccccggccaucugccacgacggcaaggcccacuucccccgcgagggggucuucguguccaacggcacccacugguucgugacgcagcggaacuucuacgagccccagaucaucaccaccgacaacaccuucgucagcggcaacugcgacguggugaucgggaucgucaacaacacgguguacgacccccugcagccggagcuggacuccuucaaggaggagcucgacaaguacuucaagaaccacaccagccccgacguggaccugggcgacaucuccgggaucaacgccagcgucgugaacauccagaaggagaucgaccgccugaacgagguggccaagaaccucaacgagucccugaucgaccugcaggagcucggcaaguacgagcaguacaucaaguggcccugguacaucuggcugggcuucaucgccgggcugaucgcgaucgucauggugaccaucaugcucugcugcaugaccagcugcugcuccugccugaagggcugcugcagcugcggguccugcugcaaguucgacgaggacgacagcgagccggugcugaagggcgucaagcuccacuacacgugaugacucgagcugguacugcaugcacgcaaugcuagcugccccuuucccguccuggguaccccgagucucccccgaccucgggucccagguaugcucccaccuccaccugccccacucaccaccucugcuaguuccagacaccucccaagcacgcagcaaugcagcucaaaacgcuuagccuagccacacccccacgggaaacagcagugauuaaccuuuagcaauaaacgaaaguuuaacuaagcuauacuaaccccaggguuggucaauuucgugccagccacacccuggagcuagcaaaaaaaaaaaaaaaaaaaaaaaaaaaaaagcauaugacuaaaaaaaaaaaaaaaaaaaaaaaaaaaaaaaaaaaaaaaaaaaaaaaaaaaaaaaaaaaaaaaaaaaaaa

SEQ ID NO: 26849 - RNA, 4274 nt, Artificial Sequence
  SARS-CoV-2/Wuhan/WIV05/2019__EPI_ISL_402128 spike protein mRNA gc (1-1273)(K986P_V987P_K986P_V987P_L18F_D80A_D215G_L242del_A243del_ L244del_R246I_K417N_E484K_N501Y_D614G_A701V)
agaauaaacuaguauucuucugguccccacagacucagagagaacccgccaccauguucguguuccugguccuccugccccuggugagcucccagugcgugaacuucaccacccgcacgcagcucccgcccgccuacaccaacagcuucacccggggcgucuacuaccccgacaagguguuccgcuccagcgugcugcacuccacccaggaccuguuccuccccuucuucagcaacgucacgugguuccacgccauccacguguccgggaccaacggcaccaagcgguucgcgaacccggugcugcccuucaacgacggggucuacuucgccagcaccgagaaguccaacaucauccgcggcuggaucuucgggacgacccuggacagcaagacccagucccuccugaucgugaacaacgccaccaacguggucaucaaggugugcgaguuccaguucugcaacgaccccuuccugggcguguacuaccacaagaacaacaagagcuggauggaguccgaguuccgggucuacagcuccgccaacaacugcacguucgaguacgugagccagcccuuccucauggaccuggagggcaagcaggggaacuucaagaaccugcgcgaguucguguucaagaacaucgacggcuacuucaagaucuacuccaagcacaccccgaucaaccucguccgggggcugccccagggcuucagcgcccuggagccccucguggaccugcccaucgggaucaacaucacccgcuuccagacccugcacaucuccuaccucacgccgggcgacagcagcuccggcuggaccgcgggggccgccgccuacuacgugggcuaccugcagccccggaccuuccugcucaaguacaacgagaacgggaccaucacggacgcggucgacugcgcccuggacccccugagcgagaccaagugcacccucaaguccuucaccguggagaagggcaucuaccagacgagcaacuuccgcgugcagcccaccgaguccaucguccgguucccgaacaucaccaaccugugccccuucggcgagguguucaacgccacccgcuucgccagcgucuacgccuggaaccggaagcgcaucuccaacugcguggcggacuacagcgugcuguacaacuccgccagcuucuccacguucaagugcuacggggucagccccaccaagcucaacgaccugugcuucaccaacguguacgccgacuccuucgugauccggggcgacgagguccgccagaucgcccccgggcagaccggcaacaucgccgacuacaacuacaagcugccggacgacuucacggggugcgugaucgcguggaacagcaacaaccucgacuccaaggugggcggcaacuacaacuaccuguaccggcuguuccgcaagagcaaccucaagcccuucgagcgggacaucuccaccgagaucuaccaggccgggagcacccccugcaacggcgucaagggguucaacugcuacuucccccugcaguccuacggcuuccagccgaccuacggggugggcuaccagcccuaccgcguggucgugcugagcuucgagcuccugcacgcccccgccacggugugcggccccaagaaguccaccaaccuggucaagaacaagugcgugaacuucaacuucaacgggcucaccggcaccggggugcugaccgagagcaacaagaaguuccugccguuccagcaguucggccgggacaucgccgacacgaccgacgcgguccgcgacccccagacccucgagauccuggacaucacccccugcagcuucgggggcguguccgugaucacgccgggcaccaacaccagcaaccaggucgccgugcuguaccagggggugaacugcaccgagguccccguggccauccacgccgaccagcugacgcccaccuggcgcguguacuccaccggcagcaacgucuuccagacccgggccgggugccucaucggcgcggagcacgugaacaacuccuacgagugcgacauccccaucggcgccgggaucugcgccagcuaccagacgcagaccaacuccccgcgccgggcccgcagcguggcgucccagagcaucaucgccuacaccaugucccugggcgucgagaacagcguggccuacuccaacaacagcaucgccauccccaccaacuucacgaucuccgugaccaccgagauccugcccgucagcaugaccaagacgagcguggacugcaccauguacaucugcggggacuccaccgagugcagcaaccuccugcugcaguacggcuccuucugcacccagcucaaccgggcccugacggggaucgcgguggagcaggacaagaacacccaggaggucuucgcccaggugaagcagaucuacaagacgcccccgaucaaggacuucggcggcuucaacuucagccagauccugcccgaccccuccaagcccagcaagcgcuccuucaucgaggaccuccuguucaacaaggugacccuggccgacgccggguucaucaagcaguacggcgacugccucggggacaucgccgcgcgggaccugaucugcgcccagaaguucaacggccugaccguccucccgccccugcugaccgacgagaugaucgcccaguacaccagcgcccuccuggccgggaccaucacguccggcuggaccuucggcgcgggggccgcccugcagauccccuucgccaugcagauggcguaccgcuucaacggcaucggggugacccagaacgugcucuacgagaaccagaagcugaucgccaaccaguucaacagcgccaucggcaagauccaggacucccugagcuccaccgccagcgcccucgggaagcugcaggacgucgugaaccagaacgcgcaggcccugaacacgcucgugaagcagcuguccagcaacuucggcgccaucuccagcguccugaacgacauccucucccggcuggacccgcccgaggccgaggugcagaucgaccgccugaucaccggccggcuccagagccugcagaccuacgugacccagcagcugauccgcgccgcggagauccgggccagcgccaaccucgccgccaccaagauguccgagugcguccuggggcagagcaagcgcguggacuucugcggcaagggguaccaccugauguccuucccccagagcgcgccccacggcguggucuuccuccacgugacguacguccccgcccaggagaagaacuucaccaccgccccggccaucugccacgacgggaaggcgcacuucccccgggagggcguguucguguccaacggcacccacugguucgucacgcagcgcaacuucuacgagccccagaucaucaccaccgacaacaccuucgugagcgggaacugcgacguggucaucggcaucgugaacaacacgguguacgacccccugcagccggagcuggacuccuucaaggaggagcucgacaaguacuucaagaaccacaccagccccgacgucgaccugggggacaucuccggcaucaacgccagcguggugaacauccagaaggagaucgaccggcugaacgaggucgccaagaaccucaacgagucccugaucgaccugcaggagcucggcaaguacgagcaguacaucaaguggcccugguacaucuggcugggguucaucgccggccugaucgccaucgugauggugaccaucaugcucugcugcaugaccagcugcugcuccugccugaaggggugcugcagcugcggcuccugcugcaaguucgacgaggacgacagcgagccgguccugaagggggugaagcuccacuacacgugaugacucgagcugguacugcaugcacgcaaugcuagcugccccuuucccguccuggguaccccgagucucccccgaccucgggucccagguaugcucccaccuccaccugccccacucaccaccucugcuaguuccagacaccucccaagcacgcagcaaugcagcucaaaacgcuuagccuagccacacccccacgggaaacagcagugauuaaccuuuagcaauaaacgaaaguuuaacuaagcuauacuaaccccaggguuggucaauuucgugccagccacacccuggagcuagcaaaaaaaaaaaaaaaaaaaaaaaaaaaaaagcauaugacuaaaaaaaaaaaaaaaaaaaaaaaaaaaaaaaaaaaaaaaaaaaaaaaaaaaaaaaaaaaaaaaaaaaaaa

SEQ ID NO: 26850 - RNA, 4283 nt, Artificial Sequence
  SARS-CoV-2/Wuhan/WIV05/2019__EPI_ISL_402128 spike protein mRNA gc (1-1273)(K986P_V987P_K986P_V987P_E484K_D614G)
agaauaaacuaguauucuucugguccccacagacucagagagaacccgccaccauguucguguuccugguccuccugccccuggugagcucccagugcgugaaccucaccacccgcacgcagcugccgcccgccuacaccaacagcuucacccggggcgucuacuaccccgacaagguguuccgcuccagcgugcugcacuccacccaggaccucuuccugcccuucuucagcaacgucacgugguuccacgccauccacguguccgggaccaacggcaccaagcgguucgacaacccggugcugcccuucaacgacggggucuacuucgcgagcaccgagaaguccaacaucauccgcggcuggaucuucgggacgacccucgacagcaagacccagucccugcugaucgugaacaacgccaccaacguggucaucaaggugugcgaguuccaguucugcaacgaccccuuccucggcguguacuaccacaagaacaacaagagcuggauggaguccgaguuccgggucuacagcuccgccaacaacugcacguucgaguacgugagccagcccuuccugauggaccuggagggcaagcaggggaacuucaagaaccuccgcgaguucguguucaagaacaucgacggcuacuucaagaucuacuccaagcacaccccgaucaaccugguccgggaccugccccagggguucagcgcccucgagccccugguggaccugcccaucggcaucaacaucacccgcuuccagacccuccuggcccugcaccgguccuaccucacgccgggggacagcagcuccggcuggaccgcgggcgccgccgccuacuacgugggguaccugcagccccgcaccuuccugcucaaguacaacgagaacggcaccaucacggacgcggucgacugcgcccuggacccccugagcgagaccaagugcacccucaaguccuucaccguggagaaggggaucuaccagacgagcaacuuccgggugcagcccaccgaguccaucguccgcuucccgaacaucaccaaccugugccccuucggcgagguguucaacgccacccgguucgccagcgucuacgccuggaaccgcaagcggaucuccaacugcguggcggacuacagcgugcuguacaacuccgccagcuucuccacguucaagugcuacggcgucagccccaccaagcucaacgaccugugcuucaccaacguguacgccgacuccuucgugauccgcggggacgagguccggcagaucgcccccggccagaccgggaagaucgccgacuacaacuacaagcugccggacgacuucacgggcugcgugaucgcguggaacagcaacaaccucgacuccaaggucgggggcaacuacaacuaccuguaccgccuguuccgcaagagcaaccucaagcccuucgagcgggacaucuccaccgagaucuaccaggccggcagcacccccugcaacggggugaagggcuucaacugcuacuucccccugcaguccuacggguuccagccgaccaacggcgugggguaccagcccuaccggguggucgugcugagcuucgagcuccugcacgcccccgccacggugugcggccccaagaaguccaccaaccuggucaagaacaagugcgugaacuucaacuucaacggccucaccgggaccggcgugcugaccgagagcaacaagaaguuccugccguuccagcaguucgggcgcgacaucgccgacacgaccgacgcgguccgcgacccccagacccuggagauccucgacaucacccccugcagcuucggcgggguguccgugaucacgccgggcaccaacaccagcaaccaggucgccgugcuguaccagggcgugaacugcaccgagguccccguggccauccacgccgaccagcugacgcccaccuggcggguguacuccaccgggagcaacgucuuccagacccgcgccggcugccucaucggggcggagcacgugaacaacuccuacgagugcgacauccccaucggcgccggcaucugcgccagcuaccagacgcagaccaacuccccgcggcgcgcccggagcguggcgucccagagcaucaucgccuacaccaugucccugggggccgagaacagcgucgccuacuccaacaacagcaucgccauccccaccaacuucacgaucuccgugaccaccgagauccugcccgugagcaugaccaagacgagcgucgacugcaccauguacaucugcggcgacuccaccgagugcagcaaccuccugcugcaguacggguccuucugcacccagcucaaccgcgcgcugacgggcaucgccguggagcaggacaagaacacccaggagguguucgcccaggucaagcagaucuacaagacgcccccgaucaaggacuucgggggcuucaacuucagccagauccugcccgaccccuccaagcccagcaagcgguccuucaucgaggaccuccuguucaacaaggugacccuggccgacgccggcuucaucaagcaguacggggacugccucggcgacaucgcggcccgcgaccugaucugcgcccagaaguucaacgggcugaccgugcucccgccccugcugaccgacgagaugaucgcccaguacaccagcgcccuccuggcgggcaccaucacguccggguggaccuucggcgccggcgccgcccugcagauccccuucgcgaugcagauggccuaccgguucaacgggaucggcgucacccagaacgugcucuacgagaaccagaagcugaucgccaaccaguucaacagcgccaucgggaagauccaggacucccugagcuccaccgccagcgcgcucggcaagcugcaggacguggucaaccagaacgcccaggcccugaacacgcucgugaagcagcuguccagcaacuucggggccaucuccagcgugcugaacgacauccucucccgccuggacccgcccgaggccgagguccagaucgaccggcugaucaccggccgccuccagagccugcagaccuacgugacccagcagcugauccgggcggccgagauccgcgccagcgccaaccucgccgcgaccaagauguccgagugcgugcugggccagagcaagcgggucgacuucugcgggaagggcuaccaccugauguccuucccccagagcgcgccccacggggugguguuccuccacgucacguacgugcccgcccaggagaagaacuucaccaccgccccggccaucugccacgacggcaaggcccacuucccccgcgagggggucuucguguccaacggcacccacugguucgugacgcagcggaacuucuacgagccccagaucaucaccaccgacaacaccuucgucagcggcaacugcgacguggugaucgggaucgucaacaacacgguguacgacccccugcagccggagcuggacuccuucaaggaggagcucgacaaguacuucaagaaccacaccagccccgacguggaccugggcgacaucuccgggaucaacgccagcgucgugaacauccagaaggagaucgaccgccugaacgagguggccaagaaccucaacgagucccugaucgaccugcaggagcucggcaaguacgagcaguacaucaaguggcccugguacaucuggcugggcuucaucgccgggcugaucgcgaucgucauggugaccaucaugcucugcugcaugaccagcugcugcuccugccugaagggcugcugcagcugcggguccugcugcaaguucgacgaggacgacagcgagccggugcugaagggcgucaagcuccacuacacgugaugacucgagcugguacugcaugcacgcaaugcuagcugccccuuucccguccuggguaccccgagucucccccgaccucgggucccagguaugcucccaccuccaccugccccacucaccaccucugcuaguuccagacaccucccaagcacgcagcaaugcagcucaaaacgcuuagccuagccacacccccacgggaaacagcagugauuaaccuuuagcaauaaacgaaaguuuaacuaagcuauacuaaccccaggguuggucaauuucgugccagccacacccuggagcuagcaaaaaaaaaaaaaaaaaaaaaaaaaaaaaagcauaugacuaaaaaaaaaaaaaaaaaaaaaaaaaaaaaaaaaaaaaaaaaaaaaaaaaaaaaaaaaaaaaaaaaaaaaa

SEQ ID NO: 26851 - RNA, 4283 nt, Artificial Sequence
  SARS-CoV-2/Wuhan/WIV05/2019__EPI_ISL_402128 spike protein mRNA gc (1-1273)(K986P_V987P_K986P_V987P_L18F_T20N_P26S_D138Y_R190S_K417T _E484K_N501Y_D614G_H655Y_T1027I)
agaauaaacuaguauucuucugguccccacagacucagagagaacccgccaccauguucguguuccugguccuccugccccuggugagcucccagugcgugaacuucaccaaccgcacccagcucccgagcgccuacacgaacuccuucacccggggcgucuacuaccccgacaagguguuccgcagcuccgugcugcacagcacccaggaccuguuccuccccuucuucuccaacgucaccugguuccacgccauccacgugagcgggacgaacggcaccaagcgguucgacaaccccgugcugccguucaacgacggggucuacuucgcguccaccgagaaguccaacaucauccgcggcuggaucuucgggaccacgcuggacuccaagacccagagccuccugaucgugaacaacgccaccaacguggucaucaaggugugcgaguuccaguucugcaacuaccccuuccugggcguguacuaccacaagaacaacaaguccuggauggagagcgaguuccgggucuacuccagcgccaacaacugcaccuucgaguacgugucccagcccuuccucauggaccuggagggcaagcaggggaacuucaagaaccugagcgaguucguguucaagaacaucgacggcuacuucaagaucuacuccaagcacacgcccaucaaccucguccgcgaccugccgcagggguucagcgcccuggagccccucguggaccugcccaucggcaucaacaucacccgguuccagacccugcucgcccugcaccgcagcuaccugacccccggggacuccagcuccggcuggacggcgggcgccgccgccuacuacgugggguaccuccagccgcggaccuuccugcugaaguacaacgagaacggcaccaucaccgacgcggucgacugcgcccucgacccccugagcgagacgaagugcacccugaaguccuucaccguggagaaggggaucuaccagaccagcaacuuccgcgugcagcccacggaguccaucguccgguuccccaacaucaccaaccucugcccguucggcgagguguucaacgccacccgcuucgccagcgucuacgccuggaaccggaagcgcaucuccaacugcguggcggacuacagcgugcuguacaacuccgccagcuucuccaccuucaagugcuacggcgucagccccacgaagcugaacgaccucugcuucaccaacguguacgccgacuccuucgugauccgcggggacgagguccggcagaucgcccccggccagaccgggaccaucgccgacuacaacuacaagcugcccgacgacuucacgggcugcgugaucgcguggaacagcaacaaccuggacuccaaggucgggggcaacuacaacuaccucuaccggcuguuccgcaagagcaaccugaagccguucgagcgggacaucuccaccgagaucuaccaggccggcagcacccccugcaacggggugaagggcuucaacugcuacuucccccuccagagcuacggguuccagcccaccuacggcgugggguaccagccguaccgcguggucgugcuguccuucgagcugcuccacgcccccgccacggugugcggccccaagaaguccaccaaccuggucaagaacaagugcgugaacuucaacuucaacggccugaccgggaccggcgugcucaccgagagcaacaagaaguuccugcccuuccagcaguucgggcgggacaucgccgacacgaccgacgcgguccgcgacccgcagacccuggagauccuggacaucacccccugcagcuucggcgggguguccgugaucacgcccggcaccaacaccagcaaccaggucgccgugcucuaccagggcgugaacugcaccgaggucccgguggccauccacgccgaccagcugacgcccaccuggcgcguguacuccaccgggagcaacgucuuccagacccgggccggcugccugaucggggcggaguacgugaacaacuccuacgagugcgacauccccaucggcgccggcaucugcgccagcuaccagacgcagaccaacagcccccgccgggcccgcagcguggcgucccagagcaucaucgccuacaccaugucccucggggccgagaacagcgucgccuacuccaacaacagcaucgccaucccgaccaacuucacgaucagcgugaccaccgagauccugcccguguccaugaccaagacgagcgucgacugcaccauguacaucugcggcgacuccaccgagugcagcaaccugcuccugcaguacggguccuucugcacccagcugaaccgggcgcucacgggcaucgccguggagcaggacaagaacacccaggagguguucgcccaggucaagcagaucuacaagaccccgcccaucaaggacuucgggggcuucaacuucagccagauccugcccgaccccuccaagcccagcaagcgcuccuucaucgaggaccuccuguucaacaaggugacccuggccgacgccggcuucaucaagcaguacggggacugccugggcgacaucgcggcccgggaccucaucugcgcccagaaguucaacgggcugacggugcugcccccgcuccugaccgacgagaugaucgcccaguacaccagcgcccugcucgcgggcaccaucacguccggguggaccuucggcgccggcgccgcccugcagauccccuucgcgaugcagauggccuaccgcuucaacgggaucggcgucacccagaacgugcuguacgagaaccagaagcucaucgccaaccaguucaacagcgccaucgggaagauccaggacucccugagcuccaccgccagcgcgcugggcaagcuccaggacguggucaaccagaacgcccaggcccugaacacgcuggugaagcagcucuccagcaacuucggggccaucuccagcgugcugaacgacauccugagccggcucgacccgcccgaggccgagguccagaucgaccgccugaucaccggccggcugcagucccuccagaccuacgugacccagcagcugauccgcgcggccgagauccgggccagcgccaaccuggccgcgaucaagauguccgagugcgugcucggccagagcaagcgcgucgacuucugcgggaagggcuaccaccugauguccuucccccagagcgcgccccacggggugguguuccugcacgucaccuacgugcccgcccaggagaagaacuucacgaccgcccccgccaucugccacgacggcaaggcccacuucccgcgggagggggucuucguguccaacggcacccacugguucgugacccagcgcaacuucuacgagccccagaucaucacgaccgacaacaccuucgucagcggcaacugcgacguggugaucgggaucgucaacaacaccguguacgacccccuccagcccgagcuggacuccuucaaggaggagcuggacaaguacuucaagaaccacacgagcccggacguggaccucggcgacaucuccgggaucaacgccagcgucgugaacauccagaaggagaucgaccggcugaacgagguggccaagaaccugaacgagucccucaucgaccugcaggagcugggcaaguacgagcaguacaucaaguggcccugguacaucuggcucggcuucaucgccgggcugaucgcgaucgucauggugaccaucaugcugugcugcaugaccagcugcugcuccugccucaagggcugcugcagcugcggguccugcugcaaguucgacgaggacgacagcgagcccgugcugaagggcgucaagcugcacuacaccugaugacucgagcugguacugcaugcacgcaaugcuagcugccccuuucccguccuggguaccccgagucucccccgaccucgggucccagguaugcucccaccuccaccugccccacucaccaccucugcuaguuccagacaccucccaagcacgcagcaaugcagcucaaaacgcuuagccuagccacacccccacgggaaacagcagugauuaaccuuuagcaauaaacgaaaguuuaacuaagcuauacuaaccccaggguuggucaauuucgugccagccacacccuggagcuagcaaaaaaaaaaaaaaaaaaaaaaaaaaaaaagcauaugacuaaaaaaaaaaaaaaaaaaaaaaaaaaaaaaaaaaaaaaaaaaaaaaaaaaaaaaaaaaaaaaaaaaaaaa

SEQ ID NO: 26852 - RNA, 4283 nt, Artificial Sequence
  SARS-CoV-2/Wuhan/WIV05/2019__EPI_ISL_402128 spike protein mRNA gc (1-1273)(K986P_V987P_K986P_V987P_S13I_W152C_L452R_D614G)
agaauaaacuaguauucuucugguccccacagacucagagagaacccgccaccauguucguguuccugguccuccugccccuggugagcauccagugcgugaaccucaccacccgcacgcagcugccgcccgccuacaccaacuccuucacccggggcgucuacuaccccgacaagguguuccgcagcuccgugcugcacagcacccaggaccucuuccugcccuucuucuccaacgucacgugguuccacgccauccacgugagcgggaccaacggcaccaagcgguucgacaacccggugcugcccuucaacgacggggucuacuucgcguccaccgagaaguccaacaucauccgcggcuggaucuucgggacgacccucgacagcaagacccagagccugcugaucgugaacaacgccaccaacguggucaucaaggugugcgaguuccaguucugcaacgaccccuuccucggcguguacuaccacaagaacaacaaguccugcauggagagcgaguuccgggucuacuccagcgccaacaacugcacguucgaguacgugucccagcccuuccugauggaccuggagggcaagcaggggaacuucaagaaccuccgcgaguucguguucaagaacaucgacggcuacuucaagaucuacagcaagcacaccccgaucaaccugguccgggaccugccccagggguucuccgcccucgagccccugguggaccugcccaucggcaucaacaucacccgcuuccagacccuccuggcccugcaccggagcuaccucacgccgggggacuccagcagcggcuggaccgcgggcgccgccgccuacuacgugggguaccugcagccccgcaccuuccugcucaaguacaacgagaacggcaccaucacggacgcggucgacugcgcccuggacccccuguccgagaccaagugcacccucaagagcuucaccguggagaaggggaucuaccagacguccaacuuccgggugcagcccaccgagagcaucguccgcuucccgaacaucaccaaccugugccccuucggcgagguguucaacgccacccgguucgccuccgucuacgccuggaaccgcaagcggaucagcaacugcguggcggacuacuccgugcuguacaacagcgccuccuucagcacguucaagugcuacggcgucucccccaccaagcucaacgaccugugcuucaccaacguguacgccgacagcuucgugauccgcggggacgagguccggcagaucgcccccggccagaccgggaagaucgccgacuacaacuacaagcugccggacgacuucacgggcugcgugaucgcguggaacuccaacaaccucgacagcaaggucgggggcaacuacaacuaccgcuaccggcuguuccgcaaguccaaccugaagcccuucgagcgggacaucagcaccgagaucuaccaggccggcuccacccccugcaacgggguggagggcuucaacugcuacuucccccuccagagcuacggguuccagccgaccaacggcgugggguaccagcccuaccgcguggucgugcuguccuucgagcugcuccacgcccccgccacggugugcggccccaagaaguccaccaaccuggucaagaacaagugcgugaacuucaacuucaacggccugaccgggaccggcgugcucaccgagagcaacaagaaguuccugccguuccagcaguucgggcgcgacaucgccgacacgaccgacgcgguccgggacccccagacccuggagauccuggacaucacccccugcagcuucggcggggugagcgugaucacgccgggcaccaacaccuccaaccaggucgccgugcucuaccagggcgugaacugcaccgagguccccguggccauccacgccgaccagcugacgcccaccuggcgcguguacagcaccggguccaacgucuuccagacccgggccggcugccugaucggggcggagcacgugaacaacagcuacgagugcgacauccccaucggcgccggcaucugcgccuccuaccagacgcagaccaacagcccgcgccgggcccgcuccguggcgagccaguccaucaucgccuacaccaugagccucggggccgagaacuccgucgccuacagcaacaacuccaucgccauccccaccaacuucacgaucagcgugaccaccgagauccugcccguguccaugaccaagacgagcgucgacugcaccauguacaucugcggcgacagcaccgagugcuccaaccugcuccugcaguacgggagcuucugcacccagcugaaccgggcgcucacgggcaucgccguggagcaggacaagaacacccaggagguguucgcccaggucaagcagaucuacaagacgcccccgaucaaggacuucgggggcuucaacuucucccagauccugcccgaccccagcaagcccuccaagcgcagcuucaucgaggaccuccuguucaacaaggugacccuggccgacgccggcuucaucaagcaguacggggacugccugggcgacaucgcggcccgggaccucaucugcgcccagaaguucaacgggcugaccgugcugccgccccuccugaccgacgagaugaucgcccaguacaccuccgcccugcucgcgggcaccaucacgagcggguggaccuucggcgccggcgccgcccugcagauccccuucgcgaugcagauggccuaccgcuucaacgggaucggcgucacccagaacgugcuguacgagaaccagaagcucaucgccaaccaguucaacuccgccaucgggaagauccaggacagccuguccagcaccgccuccgcgcugggcaagcuccaggacguggucaaccagaacgcccaggcccugaacacgcuggugaagcagcucagcuccaacuucggggccaucagcuccgugcugaacgacauccugagccggcucgacccgcccgaggccgagguccagaucgaccgccugaucaccggccggcugcagucccuccagaccuacgugacccagcagcugauccgcgcggccgagauccgggccagcgccaaccuggccgcgaccaagaugagcgagugcgugcucggccaguccaagcgcgucgacuucugcgggaagggcuaccaccugaugagcuucccccaguccgcgccccacggggugguguuccugcacgucacguacgugcccgcccaggagaagaacuucaccaccgccccggccaucugccacgacggcaaggcccacuucccccgggagggggucuucgugagcaacggcacccacugguucgugacgcagcgcaacuucuacgagccccagaucaucaccaccgacaacaccuucgucuccggcaacugcgacguggugaucgggaucgucaacaacacgguguacgacccccuccagccggagcuggacagcuucaaggaggagcuggacaaguacuucaagaaccacaccucccccgacguggaccucggcgacaucagcgggaucaacgccuccgucgugaacauccagaaggagaucgaccggcugaacgagguggccaagaaccugaacgagagccucaucgaccugcaggagcugggcaaguacgagcaguacaucaaguggcccugguacaucuggcucggcuucaucgccgggcugaucgcgaucgucauggugaccaucaugcugugcugcaugaccuccugcugcagcugccucaagggcugcugcuccugcgggagcugcugcaaguucgacgaggacgacuccgagccggugcugaagggcgucaagcugcacuacacgugaugacucgagcugguacugcaugcacgcaaugcuagcugccccuuucccguccuggguaccccgagucucccccgaccucgggucccagguaugcucccaccuccaccugccccacucaccaccucugcuaguuccagacaccucccaagcacgcagcaaugcagcucaaaacgcuuagccuagccacacccccacgggaaacagcagugauuaaccuuuagcaauaaacgaaaguuuaacuaagcuauacuaaccccaggguuggucaauuucgugccagccacacccuggagcuagcaaaaaaaaaaaaaaaaaaaaaaaaaaaaaagcauaugacuaaaaaaaaaaaaaaaaaaaaaaaaaaaaaaaaaaaaaaaaaaaaaaaaaaaaaaaaaaaaaaaaaaaaaa

SEQ ID NO: 26853 - RNA, 4283 nt, Artificial Sequence
  SARS-CoV-2/Wuhan/WIV05/2019__EPI_ISL_402128 spike protein mRNA gc (1-1273)(K986P_V987P)
agaauaaacuaguauucuucugguccccacagacucagagagaacccgccaccauguucguguuccuggugcugcugccccuggugagcagccagugcgugaaccugaccacccggacccagcugccaccagccuacaccaacagcuucacccggggcgucuacuaccccgacaagguguuccggagcagcguccugcacagcacccaggaccuguuccugcccuucuucagcaacgugaccugguuccacgccauccacgugagcggcaccaacggcaccaagcgguucgacaaccccgugcugcccuucaacgacggcguguacuucgccagcaccgagaagagcaacaucauccggggcuggaucuucggcaccacccuggacagcaagacccagagccugcugaucgugaauaacgccaccaacguggugaucaaggugugcgaguuccaguucugcaacgaccccuuccugggcguguacuaccacaagaacaacaagagcuggauggagagcgaguuccggguguacagcagcgccaacaacugcaccuucgaguacgugagccagcccuuccugauggaccuggagggcaagcagggcaacuucaagaaccugcgggaguucguguucaagaacaucgacggcuacuucaagaucuacagcaagcacaccccaaucaaccuggugcgggaucugccccagggcuucucagcccuggagccccugguggaccugcccaucggcaucaacaucacccgguuccagacccugcuggcccugcaccggagcuaccugaccccaggcgacagcagcagcggguggacagcaggcgcggcugcuuacuacgugggcuaccugcagccccggaccuuccugcugaaguacaacgagaacggcaccaucaccgacgccguggacugcgcccuggacccucugagcgagaccaagugcacccugaagagcuucaccguggagaagggcaucuaccagaccagcaacuuccgggugcagcccaccgagagcaucgugcgguuccccaacaucaccaaccugugccccuucggcgagguguucaacgccacccgguucgccagcguguacgccuggaaccggaagcggaucagcaacugcguggccgacuacagcgugcuguacaacagcgccagcuucagcaccuucaagugcuacggcgugagccccaccaagcugaacgaccugugcuucaccaacguguacgccgacagcuucgugauccguggcgacgaggugcggcagaucgcacccggccagacaggcaagaucgccgacuacaacuacaagcugcccgacgacuucaccggcugcgugaucgccuggaacagcaacaaccucgacagcaaggugggcggcaacuacaacuaccuguaccggcuguuccggaagagcaaccugaagcccuucgagcgggacaucagcaccgagaucuaccaagccggcuccaccccuugcaacggcguggagggcuucaacugcuacuucccucugcagagcuacggcuuccagcccaccaacggcgugggcuaccagcccuaccgggugguggugcugagcuucgagcugcugcacgccccagccaccguguguggccccaagaagagcaccaaccuggugaagaacaagugcgugaacuucaacuucaacggccuuaccggcaccggcgugcugaccgagagcaacaagaaauuccugcccuuucagcaguucggccgggacaucgccgacaccaccgacgcugugcgggauccccagacccuggagauccuggacaucaccccuugcagcuucggcggcgugagcgugaucaccccaggcaccaacaccagcaaccagguggccgugcuguaccaggacgugaacugcaccgaggugcccguggccauccacgccgaccagcugacacccaccuggcgggucuacagcaccggcagcaacguguuccagacccgggccgguugccugaucggcgccgagcacgugaacaacagcuacgagugcgacauccccaucggcgccggcaucugugccagcuaccagacccagaccaauucaccccggagggcaaggagcguggccagccagagcaucaucgccuacaccaugagccugggcgccgagaacagcguggccuacagcaacaacagcaucgccauccccaccaacuucaccaucagcgugaccaccgagauucugcccgugagcaugaccaagaccagcguggacugcaccauguacaucugcggcgacagcaccgagugcagcaaccugcugcugcaguacggcagcuucugcacccagcugaaccgggcccugaccggcaucgccguggagcaggacaagaacacccaggagguguucgcccaggugaagcagaucuacaagaccccucccaucaaggacuucggcggcuucaacuucagccagauccugcccgaccccagcaagcccagcaagcggagcuucaucgaggaccugcuguucaacaaggugacccuagccgacgccggcuucaucaagcaguacggcgacugccucggcgacauagccgcccgggaccugaucugcgcccagaaguucaacggccugaccgugcugccuccccugcugaccgacgagaugaucgcccaguacaccagcgcccuguuagccggaaccaucaccagcggcuggacuuucggcgcuggagccgcucugcagauccccuucgccaugcagauggccuaccgguucaacggcaucggcgugacccagaacgugcuguacgagaaccagaagcugaucgccaaccaguucaacagcgccaucggcaagauccaggacagccugagcagcaccgcuagcgcccugggcaagcugcaggacguggugaaccagaacgcccaggcccugaacacccuggugaagcagcugagcagcaacuucggcgccaucagcagcgugcugaacgacauccugagccggcuggacccucccgaggccgaggugcagaucgaccggcugaucacuggccggcugcagagccugcagaccuacgugacccagcagcugauccgggccgccgagauucgggccagcgccaaccuggccgccaccaagaugagcgagugcgugcugggccagagcaagcggguggacuucugcggcaagggcuaccaccugaugagcuuuccccagagcgcaccccacggagugguguuccugcacgugaccuacgugcccgcccaggagaagaacuucaccaccgccccagccaucugccacgacggcaaggcccacuuuccccgggagggcguguucgugagcaacggcacccacugguucgugacccagcggaacuucuacgagccccagaucaucaccaccgacaacaccuucgugagcggcaacugcgacguggugaucggcaucgugaacaacaccguguacgauccccugcagcccgagcuggacagcuucaaggaggagcuggacaaguacuucaagaaucacaccagccccgacguggaccugggcgacaucagcggcaucaacgccagcguggugaacauccagaaggagaucgaucggcugaacgagguggccaagaaccugaacgagagccugaucgaccugcaggagcugggcaaguacgagcaguacaucaaguggcccugguacaucuggcugggcuucaucgccggccugaucgccaucgugauggugaccaucaugcugugcugcaugaccagcugcugcagcugccugaagggcuguugcagcugcggcagcugcugcaaguucgacgaggacgacagcgagcccgugcugaagggcgugaagcugcacuacaccugaugacucgagcugguacugcaugcacgcaaugcuagcugccccuuucccguccuggguaccccgagucucccccgaccucgggucccagguaugcucccaccuccaccugccccacucaccaccucugcuaguuccagacaccucccaagcacgcagcaaugcagcucaaaacgcuuagccuagccacacccccacgggaaacagcagugauuaaccuuuagcaauaaacgaaaguuuaacuaagcuauacuaaccccaggguuggucaauuucgugccagccacacccuggagcuagcaaaaaaaaaaaaaaaaaaaaaaaaaaaaaagcauaugacuaaaaaaaaaaaaaaaaaaaaaaaaaaaaaaaaaaaaaaaaaaaaaaaaaaaaaaaaaaaaaaaaaaaaaa

SEQ ID NO: 26854 - RNA, 4283 nt, Artificial Sequence
  SARS-CoV-2/Wuhan/WIV05/2019__EPI_ISL_402128 spike protein mRNA gc (1-1273)(K986P_V987P_ D614G)
agaauaaacuaguauucuucugguccccacagacucagagagaacccgccaccauguucguguuccuggugcugcugccccuggugagcagccagugcgugaaccugaccacccggacccagcugccaccagccuacaccaacagcuucacccggggcgucuacuaccccgacaagguguuccggagcagcguccugcacagcacccaggaccuguuccugcccuucuucagcaacgugaccugguuccacgccauccacgugagcggcaccaacggcaccaagcgguucgacaaccccgugcugcccuucaacgacggcguguacuucgccagcaccgagaagagcaacaucauccggggcuggaucuucggcaccacccuggacagcaagacccagagccugcugaucgugaauaacgccaccaacguggugaucaaggugugcgaguuccaguucugcaacgaccccuuccugggcguguacuaccacaagaacaacaagagcuggauggagagcgaguuccggguguacagcagcgccaacaacugcaccuucgaguacgugagccagcccuuccugauggaccuggagggcaagcagggcaacuucaagaaccugcgggaguucguguucaagaacaucgacggcuacuucaagaucuacagcaagcacaccccaaucaaccuggugcgggaucugccccagggcuucucagcccuggagccccugguggaccugcccaucggcaucaacaucacccgguuccagacccugcuggcccugcaccggagcuaccugaccccaggcgacagcagcagcggguggacagcaggcgcggcugcuuacuacgugggcuaccugcagccccggaccuuccugcugaaguacaacgagaacggcaccaucaccgacgccguggacugcgcccuggacccucugagcgagaccaagugcacccugaagagcuucaccguggagaagggcaucuaccagaccagcaacuuccgggugcagcccaccgagagcaucgugcgguuccccaacaucaccaaccugugccccuucggcgagguguucaacgccacccgguucgccagcguguacgccuggaaccggaagcggaucagcaacugcguggccgacuacagcgugcuguacaacagcgccagcuucagcaccuucaagugcuacggcgugagccccaccaagcugaacgaccugugcuucaccaacguguacgccgacagcuucgugauccguggcgacgaggugcggcagaucgcacccggccagacaggcaagaucgccgacuacaacuacaagcugcccgacgacuucaccggcugcgugaucgccuggaacagcaacaaccucgacagcaaggugggcggcaacuacaacuaccuguaccggcuguuccggaagagcaaccugaagcccuucgagcgggacaucagcaccgagaucuaccaagccggcuccaccccuugcaacggcguggagggcuucaacugcuacuucccucugcagagcuacggcuuccagcccaccaacggcgugggcuaccagcccuaccgggugguggugcugagcuucgagcugcugcacgccccagccaccguguguggccccaagaagagcaccaaccuggugaagaacaagugcgugaacuucaacuucaacggccuuaccggcaccggcgugcugaccgagagcaacaagaaauuccugcccuuucagcaguucggccgggacaucgccgacaccaccgacgcugugcgggauccccagacccuggagauccuggacaucaccccuugcagcuucggcggcgugagcgugaucaccccaggcaccaacaccagcaaccagguggccgugcuguaccagggcgugaacugcaccgaggugcccguggccauccacgccgaccagcugacacccaccuggcgggucuacagcaccggcagcaacguguuccagacccgggccgguugccugaucggcgccgagcacgugaacaacagcuacgagugcgacauccccaucggcgccggcaucugugccagcuaccagacccagaccaauucaccccggagggcaaggagcguggccagccagagcaucaucgccuacaccaugagccugggcgccgagaacagcguggccuacagcaacaacagcaucgccauccccaccaacuucaccaucagcgugaccaccgagauucugcccgugagcaugaccaagaccagcguggacugcaccauguacaucugcggcgacagcaccgagugcagcaaccugcugcugcaguacggcagcuucugcacccagcugaaccgggcccugaccggcaucgccguggagcaggacaagaacacccaggagguguucgcccaggugaagcagaucuacaagaccccucccaucaaggacuucggcggcuucaacuucagccagauccugcccgaccccagcaagcccagcaagcggagcuucaucgaggaccugcuguucaacaaggugacccuagccgacgccggcuucaucaagcaguacggcgacugccucggcgacauagccgcccgggaccugaucugcgcccagaaguucaacggccugaccgugcugccuccccugcugaccgacgagaugaucgcccaguacaccagcgcccuguuagccggaaccaucaccagcggcuggacuuucggcgcuggagccgcucugcagauccccuucgccaugcagauggccuaccgguucaacggcaucggcgugacccagaacgugcuguacgagaaccagaagcugaucgccaaccaguucaacagcgccaucggcaagauccaggacagccugagcagcaccgcuagcgcccugggcaagcugcaggacguggugaaccagaacgcccaggcccugaacacccuggugaagcagcugagcagcaacuucggcgccaucagcagcgugcugaacgacauccugagccggcuggacccucccgaggccgaggugcagaucgaccggcugaucacuggccggcugcagagccugcagaccuacgugacccagcagcugauccgggccgccgagauucgggccagcgccaaccuggccgccaccaagaugagcgagugcgugcugggccagagcaagcggguggacuucugcggcaagggcuaccaccugaugagcuuuccccagagcgcaccccacggagugguguuccugcacgugaccuacgugcccgcccaggagaagaacuucaccaccgccccagccaucugccacgacggcaaggcccacuuuccccgggagggcguguucgugagcaacggcacccacugguucgugacccagcggaacuucuacgagccccagaucaucaccaccgacaacaccuucgugagcggcaacugcgacguggugaucggcaucgugaacaacaccguguacgauccccugcagcccgagcuggacagcuucaaggaggagcuggacaaguacuucaagaaucacaccagccccgacguggaccugggcgacaucagcggcaucaacgccagcguggugaacauccagaaggagaucgaucggcugaacgagguggccaagaaccugaacgagagccugaucgaccugcaggagcugggcaaguacgagcaguacaucaaguggcccugguacaucuggcugggcuucaucgccggccugaucgccaucgugauggugaccaucaugcugugcugcaugaccagcugcugcagcugccugaagggcuguugcagcugcggcagcugcugcaaguucgacgaggacgacagcgagcccgugcugaagggcgugaagcugcacuacaccugaugacucgagcugguacugcaugcacgcaaugcuagcugccccuuucccguccuggguaccccgagucucccccgaccucgggucccagguaugcucccaccuccaccugccccacucaccaccucugcuaguuccagacaccucccaagcacgcagcaaugcagcucaaaacgcuuagccuagccacacccccacgggaaacagcagugauuaaccuuuagcaauaaacgaaaguuuaacuaagcuauacuaaccccaggguuggucaauuucgugccagccacacccuggagcuagcaaaaaaaaaaaaaaaaaaaaaaaaaaaaaagcauaugacuaaaaaaaaaaaaaaaaaaaaaaaaaaaaaaaaaaaaaaaaaaaaaaaaaaaaaaaaaaaaaaaaaaaaaa

SEQ ID NO: 26855 - RNA, 4283 nt, Artificial Sequence
  SARS-CoV-2/Wuhan/WIV05/2019__EPI_ISL_402128 spike protein mRNA gc (1-1273)(K986P_V987P_A222V_D614G)
agaauaaacuaguauucuucugguccccacagacucagagagaacccgccaccauguucguguuccuggugcugcugccccuggugagcagccagugcgugaaccugaccacccggacccagcugccaccagccuacaccaacagcuucacccggggcgucuacuaccccgacaagguguuccggagcagcguccugcacagcacccaggaccuguuccugcccuucuucagcaacgugaccugguuccacgccauccacgugagcggcaccaacggcaccaagcgguucgacaaccccgugcugcccuucaacgacggcguguacuucgccagcaccgagaagagcaacaucauccggggcuggaucuucggcaccacccuggacagcaagacccagagccugcugaucgugaauaacgccaccaacguggugaucaaggugugcgaguuccaguucugcaacgaccccuuccugggcguguacuaccacaagaacaacaagagcuggauggagagcgaguuccggguguacagcagcgccaacaacugcaccuucgaguacgugagccagcccuuccugauggaccuggagggcaagcagggcaacuucaagaaccugcgggaguucguguucaagaacaucgacggcuacuucaagaucuacagcaagcacaccccaaucaaccuggugcgggaucugccccagggcuucucagugcuggagccccugguggaccugcccaucggcaucaacaucacccgguuccagacccugcuggcccugcaccggagcuaccugaccccaggcgacagcagcagcggguggacagcaggcgcggcugcuuacuacgugggcuaccugcagccccggaccuuccugcugaaguacaacgagaacggcaccaucaccgacgccguggacugcgcccuggacccucugagcgagaccaagugcacccugaagagcuucaccguggagaagggcaucuaccagaccagcaacuuccgggugcagcccaccgagagcaucgugcgguuccccaacaucaccaaccugugccccuucggcgagguguucaacgccacccgguucgccagcguguacgccuggaaccggaagcggaucagcaacugcguggccgacuacagcgugcuguacaacagcgccagcuucagcaccuucaagugcuacggcgugagccccaccaagcugaacgaccugugcuucaccaacguguacgccgacagcuucgugauccguggcgacgaggugcggcagaucgcacccggccagacaggcaagaucgccgacuacaacuacaagcugcccgacgacuucaccggcugcgugaucgccuggaacagcaacaaccucgacagcaaggugggcggcaacuacaacuaccuguaccggcuguuccggaagagcaaccugaagcccuucgagcgggacaucagcaccgagaucuaccaagccggcuccaccccuugcaacggcguggagggcuucaacugcuacuucccucugcagagcuacggcuuccagcccaccaacggcgugggcuaccagcccuaccgggugguggugcugagcuucgagcugcugcacgccccagccaccguguguggccccaagaagagcaccaaccuggugaagaacaagugcgugaacuucaacuucaacggccuuaccggcaccggcgugcugaccgagagcaacaagaaauuccugcccuuucagcaguucggccgggacaucgccgacaccaccgacgcugugcgggauccccagacccuggagauccuggacaucaccccuugcagcuucggcggcgugagcgugaucaccccaggcaccaacaccagcaaccagguggccgugcuguaccagggcgugaacugcaccgaggugcccguggccauccacgccgaccagcugacacccaccuggcgggucuacagcaccggcagcaacguguuccagacccgggccgguugccugaucggcgccgagcacgugaacaacagcuacgagugcgacauccccaucggcgccggcaucugugccagcuaccagacccagaccaauucaccccggagggcaaggagcguggccagccagagcaucaucgccuacaccaugagccugggcgccgagaacagcguggccuacagcaacaacagcaucgccauccccaccaacuucaccaucagcgugaccaccgagauucugcccgugagcaugaccaagaccagcguggacugcaccauguacaucugcggcgacagcaccgagugcagcaaccugcugcugcaguacggcagcuucugcacccagcugaaccgggcccugaccggcaucgccguggagcaggacaagaacacccaggagguguucgcccaggugaagcagaucuacaagaccccucccaucaaggacuucggcggcuucaacuucagccagauccugcccgaccccagcaagcccagcaagcggagcuucaucgaggaccugcuguucaacaaggugacccuagccgacgccggcuucaucaagcaguacggcgacugccucggcgacauagccgcccgggaccugaucugcgcccagaaguucaacggccugaccgugcugccuccccugcugaccgacgagaugaucgcccaguacaccagcgcccuguuagccggaaccaucaccagcggcuggacuuucggcgcuggagccgcucugcagauccccuucgccaugcagauggccuaccgguucaacggcaucggcgugacccagaacgugcuguacgagaaccagaagcugaucgccaaccaguucaacagcgccaucggcaagauccaggacagccugagcagcaccgcuagcgcccugggcaagcugcaggacguggugaaccagaacgcccaggcccugaacacccuggugaagcagcugagcagcaacuucggcgccaucagcagcgugcugaacgacauccugagccggcuggacccucccgaggccgaggugcagaucgaccggcugaucacuggccggcugcagagccugcagaccuacgugacccagcagcugauccgggccgccgagauucgggccagcgccaaccuggccgccaccaagaugagcgagugcgugcugggccagagcaagcggguggacuucugcggcaagggcuaccaccugaugagcuuuccccagagcgcaccccacggagugguguuccugcacgugaccuacgugcccgcccaggagaagaacuucaccaccgccccagccaucugccacgacggcaaggcccacuuuccccgggagggcguguucgugagcaacggcacccacugguucgugacccagcggaacuucuacgagccccagaucaucaccaccgacaacaccuucgugagcggcaacugcgacguggugaucggcaucgugaacaacaccguguacgauccccugcagcccgagcuggacagcuucaaggaggagcuggacaaguacuucaagaaucacaccagccccgacguggaccugggcgacaucagcggcaucaacgccagcguggugaacauccagaaggagaucgaucggcugaacgagguggccaagaaccugaacgagagccugaucgaccugcaggagcugggcaaguacgagcaguacaucaaguggcccugguacaucuggcugggcuucaucgccggccugaucgccaucgugauggugaccaucaugcugugcugcaugaccagcugcugcagcugccugaagggcuguugcagcugcggcagcugcugcaaguucgacgaggacgacagcgagcccgugcugaagggcgugaagcugcacuacaccugaugacucgagcugguacugcaugcacgcaaugcuagcugccccuuucccguccuggguaccccgagucucccccgaccucgggucccagguaugcucccaccuccaccugccccacucaccaccucugcuaguuccagacaccucccaagcacgcagcaaugcagcucaaaacgcuuagccuagccacacccccacgggaaacagcagugauuaaccuuuagcaauaaacgaaaguuuaacuaagcuauacuaaccccaggguuggucaauuucgugccagccacacccuggagcuagcaaaaaaaaaaaaaaaaaaaaaaaaaaaaaagcauaugacuaaaaaaaaaaaaaaaaaaaaaaaaaaaaaaaaaaaaaaaaaaaaaaaaaaaaaaaaaaaaaaaaaaaaaa

SEQ ID NO: 26856 - RNA, 4283 nt, Artificial Sequence
  SARS-CoV-2/Wuhan/WIV05/2019__EPI_ISL_402128 spike protein mRNA gc (1-1273)(K986P_V987P_N439K_D614G)
agaauaaacuaguauucuucugguccccacagacucagagagaacccgccaccauguucguguuccuggugcugcugccccuggugagcagccagugcgugaaccugaccacccggacccagcugccaccagccuacaccaacagcuucacccggggcgucuacuaccccgacaagguguuccggagcagcguccugcacagcacccaggaccuguuccugcccuucuucagcaacgugaccugguuccacgccauccacgugagcggcaccaacggcaccaagcgguucgacaaccccgugcugcccuucaacgacggcguguacuucgccagcaccgagaagagcaacaucauccggggcuggaucuucggcaccacccuggacagcaagacccagagccugcugaucgugaauaacgccaccaacguggugaucaaggugugcgaguuccaguucugcaacgaccccuuccugggcguguacuaccacaagaacaacaagagcuggauggagagcgaguuccggguguacagcagcgccaacaacugcaccuucgaguacgugagccagcccuuccugauggaccuggagggcaagcagggcaacuucaagaaccugcgggaguucguguucaagaacaucgacggcuacuucaagaucuacagcaagcacaccccaaucaaccuggugcgggaucugccccagggcuucucagcccuggagccccugguggaccugcccaucggcaucaacaucacccgguuccagacccugcuggcccugcaccggagcuaccugaccccaggcgacagcagcagcggguggacagcaggcgcggcugcuuacuacgugggcuaccugcagccccggaccuuccugcugaaguacaacgagaacggcaccaucaccgacgccguggacugcgcccuggacccucugagcgagaccaagugcacccugaagagcuucaccguggagaagggcaucuaccagaccagcaacuuccgggugcagcccaccgagagcaucgugcgguuccccaacaucaccaaccugugccccuucggcgagguguucaacgccacccgguucgccagcguguacgccuggaaccggaagcggaucagcaacugcguggccgacuacagcgugcuguacaacagcgccagcuucagcaccuucaagugcuacggcgugagccccaccaagcugaacgaccugugcuucaccaacguguacgccgacagcuucgugauccguggcgacgaggugcggcagaucgcacccggccagacaggcaagaucgccgacuacaacuacaagcugcccgacgacuucaccggcugcgugaucgccuggaacagcaagaaccucgacagcaaggugggcggcaacuacaacuaccuguaccggcuguuccggaagagcaaccugaagcccuucgagcgggacaucagcaccgagaucuaccaagccggcuccaccccuugcaacggcguggagggcuucaacugcuacuucccucugcagagcuacggcuuccagcccaccaacggcgugggcuaccagcccuaccgggugguggugcugagcuucgagcugcugcacgccccagccaccguguguggccccaagaagagcaccaaccuggugaagaacaagugcgugaacuucaacuucaacggccuuaccggcaccggcgugcugaccgagagcaacaagaaauuccugcccuuucagcaguucggccgggacaucgccgacaccaccgacgcugugcgggauccccagacccuggagauccuggacaucaccccuugcagcuucggcggcgugagcgugaucaccccaggcaccaacaccagcaaccagguggccgugcuguaccagggcgugaacugcaccgaggugcccguggccauccacgccgaccagcugacacccaccuggcgggucuacagcaccggcagcaacguguuccagacccgggccgguugccugaucggcgccgagcacgugaacaacagcuacgagugcgacauccccaucggcgccggcaucugugccagcuaccagacccagaccaauucaccccggagggcaaggagcguggccagccagagcaucaucgccuacaccaugagccugggcgccgagaacagcguggccuacagcaacaacagcaucgccauccccaccaacuucaccaucagcgugaccaccgagauucugcccgugagcaugaccaagaccagcguggacugcaccauguacaucugcggcgacagcaccgagugcagcaaccugcugcugcaguacggcagcuucugcacccagcugaaccgggcccugaccggcaucgccguggagcaggacaagaacacccaggagguguucgcccaggugaagcagaucuacaagaccccucccaucaaggacuucggcggcuucaacuucagccagauccugcccgaccccagcaagcccagcaagcggagcuucaucgaggaccugcuguucaacaaggugacccuagccgacgccggcuucaucaagcaguacggcgacugccucggcgacauagccgcccgggaccugaucugcgcccagaaguucaacggccugaccgugcugccuccccugcugaccgacgagaugaucgcccaguacaccagcgcccuguuagccggaaccaucaccagcggcuggacuuucggcgcuggagccgcucugcagauccccuucgccaugcagauggccuaccgguucaacggcaucggcgugacccagaacgugcuguacgagaaccagaagcugaucgccaaccaguucaacagcgccaucggcaagauccaggacagccugagcagcaccgcuagcgcccugggcaagcugcaggacguggugaaccagaacgcccaggcccugaacacccuggugaagcagcugagcagcaacuucggcgccaucagcagcgugcugaacgacauccugagccggcuggacccucccgaggccgaggugcagaucgaccggcugaucacuggccggcugcagagccugcagaccuacgugacccagcagcugauccgggccgccgagauucgggccagcgccaaccuggccgccaccaagaugagcgagugcgugcugggccagagcaagcggguggacuucugcggcaagggcuaccaccugaugagcuuuccccagagcgcaccccacggagugguguuccugcacgugaccuacgugcccgcccaggagaagaacuucaccaccgccccagccaucugccacgacggcaaggcccacuuuccccgggagggcguguucgugagcaacggcacccacugguucgugacccagcggaacuucuacgagccccagaucaucaccaccgacaacaccuucgugagcggcaacugcgacguggugaucggcaucgugaacaacaccguguacgauccccugcagcccgagcuggacagcuucaaggaggagcuggacaaguacuucaagaaucacaccagccccgacguggaccugggcgacaucagcggcaucaacgccagcguggugaacauccagaaggagaucgaucggcugaacgagguggccaagaaccugaacgagagccugaucgaccugcaggagcugggcaaguacgagcaguacaucaaguggcccugguacaucuggcugggcuucaucgccggccugaucgccaucgugauggugaccaucaugcugugcugcaugaccagcugcugcagcugccugaagggcuguugcagcugcggcagcugcugcaaguucgacgaggacgacagcgagcccgugcugaagggcgugaagcugcacuacaccugaugacucgagcugguacugcaugcacgcaaugcuagcugccccuuucccguccuggguaccccgagucucccccgaccucgggucccagguaugcucccaccuccaccugccccacucaccaccucugcuaguuccagacaccucccaagcacgcagcaaugcagcucaaaacgcuuagccuagccacacccccacgggaaacagcagugauuaaccuuuagcaauaaacgaaaguuuaacuaagcuauacuaaccccaggguuggucaauuucgugccagccacacccuggagcuagcaaaaaaaaaaaaaaaaaaaaaaaaaaaaaagcauaugacuaaaaaaaaaaaaaaaaaaaaaaaaaaaaaaaaaaaaaaaaaaaaaaaaaaaaaaaaaaaaaaaaaaaaaa

SEQ ID NO: 26857 - RNA, 4283 nt, Artificial Sequence
  SARS-CoV-2/Wuhan/WIV05/2019__EPI_ISL_402128 spike protein mRNA gc (1-1273)(K986P_V987P_S477N_D614G)
agaauaaacuaguauucuucugguccccacagacucagagagaacccgccaccauguucguguuccuggugcugcugccccuggugagcagccagugcgugaaccugaccacccggacccagcugccaccagccuacaccaacagcuucacccggggcgucuacuaccccgacaagguguuccggagcagcguccugcacagcacccaggaccuguuccugcccuucuucagcaacgugaccugguuccacgccauccacgugagcggcaccaacggcaccaagcgguucgacaaccccgugcugcccuucaacgacggcguguacuucgccagcaccgagaagagcaacaucauccggggcuggaucuucggcaccacccuggacagcaagacccagagccugcugaucgugaauaacgccaccaacguggugaucaaggugugcgaguuccaguucugcaacgaccccuuccugggcguguacuaccacaagaacaacaagagcuggauggagagcgaguuccggguguacagcagcgccaacaacugcaccuucgaguacgugagccagcccuuccugauggaccuggagggcaagcagggcaacuucaagaaccugcgggaguucguguucaagaacaucgacggcuacuucaagaucuacagcaagcacaccccaaucaaccuggugcgggaucugccccagggcuucucagcccuggagccccugguggaccugcccaucggcaucaacaucacccgguuccagacccugcuggcccugcaccggagcuaccugaccccaggcgacagcagcagcggguggacagcaggcgcggcugcuuacuacgugggcuaccugcagccccggaccuuccugcugaaguacaacgagaacggcaccaucaccgacgccguggacugcgcccuggacccucugagcgagaccaagugcacccugaagagcuucaccguggagaagggcaucuaccagaccagcaacuuccgggugcagcccaccgagagcaucgugcgguuccccaacaucaccaaccugugccccuucggcgagguguucaacgccacccgguucgccagcguguacgccuggaaccggaagcggaucagcaacugcguggccgacuacagcgugcuguacaacagcgccagcuucagcaccuucaagugcuacggcgugagccccaccaagcugaacgaccugugcuucaccaacguguacgccgacagcuucgugauccguggcgacgaggugcggcagaucgcacccggccagacaggcaagaucgccgacuacaacuacaagcugcccgacgacuucaccggcugcgugaucgccuggaacagcaacaaccucgacagcaaggugggcggcaacuacaacuaccuguaccggcuguuccggaagagcaaccugaagcccuucgagcgggacaucagcaccgagaucuaccaagccggcaacaccccuugcaacggcguggagggcuucaacugcuacuucccucugcagagcuacggcuuccagcccaccaacggcgugggcuaccagcccuaccgggugguggugcugagcuucgagcugcugcacgccccagccaccguguguggccccaagaagagcaccaaccuggugaagaacaagugcgugaacuucaacuucaacggccuuaccggcaccggcgugcugaccgagagcaacaagaaauuccugcccuuucagcaguucggccgggacaucgccgacaccaccgacgcugugcgggauccccagacccuggagauccuggacaucaccccuugcagcuucggcggcgugagcgugaucaccccaggcaccaacaccagcaaccagguggccgugcuguaccagggcgugaacugcaccgaggugcccguggccauccacgccgaccagcugacacccaccuggcgggucuacagcaccggcagcaacguguuccagacccgggccgguugccugaucggcgccgagcacgugaacaacagcuacgagugcgacauccccaucggcgccggcaucugugccagcuaccagacccagaccaauucaccccggagggcaaggagcguggccagccagagcaucaucgccuacaccaugagccugggcgccgagaacagcguggccuacagcaacaacagcaucgccauccccaccaacuucaccaucagcgugaccaccgagauucugcccgugagcaugaccaagaccagcguggacugcaccauguacaucugcggcgacagcaccgagugcagcaaccugcugcugcaguacggcagcuucugcacccagcugaaccgggcccugaccggcaucgccguggagcaggacaagaacacccaggagguguucgcccaggugaagcagaucuacaagaccccucccaucaaggacuucggcggcuucaacuucagccagauccugcccgaccccagcaagcccagcaagcggagcuucaucgaggaccugcuguucaacaaggugacccuagccgacgccggcuucaucaagcaguacggcgacugccucggcgacauagccgcccgggaccugaucugcgcccagaaguucaacggccugaccgugcugccuccccugcugaccgacgagaugaucgcccaguacaccagcgcccuguuagccggaaccaucaccagcggcuggacuuucggcgcuggagccgcucugcagauccccuucgccaugcagauggccuaccgguucaacggcaucggcgugacccagaacgugcuguacgagaaccagaagcugaucgccaaccaguucaacagcgccaucggcaagauccaggacagccugagcagcaccgcuagcgcccugggcaagcugcaggacguggugaaccagaacgcccaggcccugaacacccuggugaagcagcugagcagcaacuucggcgccaucagcagcgugcugaacgacauccugagccggcuggacccucccgaggccgaggugcagaucgaccggcugaucacuggccggcugcagagccugcagaccuacgugacccagcagcugauccgggccgccgagauucgggccagcgccaaccuggccgccaccaagaugagcgagugcgugcugggccagagcaagcggguggacuucugcggcaagggcuaccaccugaugagcuuuccccagagcgcaccccacggagugguguuccugcacgugaccuacgugcccgcccaggagaagaacuucaccaccgccccagccaucugccacgacggcaaggcccacuuuccccgggagggcguguucgugagcaacggcacccacugguucgugacccagcggaacuucuacgagccccagaucaucaccaccgacaacaccuucgugagcggcaacugcgacguggugaucggcaucgugaacaacaccguguacgauccccugcagcccgagcuggacagcuucaaggaggagcuggacaaguacuucaagaaucacaccagccccgacguggaccugggcgacaucagcggcaucaacgccagcguggugaacauccagaaggagaucgaucggcugaacgagguggccaagaaccugaacgagagccugaucgaccugcaggagcugggcaaguacgagcaguacaucaaguggcccugguacaucuggcugggcuucaucgccggccugaucgccaucgugauggugaccaucaugcugugcugcaugaccagcugcugcagcugccugaagggcuguugcagcugcggcagcugcugcaaguucgacgaggacgacagcgagcccgugcugaagggcgugaagcugcacuacaccugaugacucgagcugguacugcaugcacgcaaugcuagcugccccuuucccguccuggguaccccgagucucccccgaccucgggucccagguaugcucccaccuccaccugccccacucaccaccucugcuaguuccagacaccucccaagcacgcagcaaugcagcucaaaacgcuuagccuagccacacccccacgggaaacagcagugauuaaccuuuagcaauaaacgaaaguuuaacuaagcuauacuaaccccaggguuggucaauuucgugccagccacacccuggagcuagcaaaaaaaaaaaaaaaaaaaaaaaaaaaaaagcauaugacuaaaaaaaaaaaaaaaaaaaaaaaaaaaaaaaaaaaaaaaaaaaaaaaaaaaaaaaaaaaaaaaaaaaaaa

SEQ ID NO: 26858 - RNA, 4283 nt, Artificial Sequence
  SARS-CoV-2/Wuhan/WIV05/2019__EPI_ISL_402128 spike protein mRNA gc (1-1273)(K986P_V987P_N501Y_D614G)
agaauaaacuaguauucuucugguccccacagacucagagagaacccgccaccauguucguguuccuggugcugcugccccuggugagcagccagugcgugaaccugaccacccggacccagcugccaccagccuacaccaacagcuucacccggggcgucuacuaccccgacaagguguuccggagcagcguccugcacagcacccaggaccuguuccugcccuucuucagcaacgugaccugguuccacgccauccacgugagcggcaccaacggcaccaagcgguucgacaaccccgugcugcccuucaacgacggcguguacuucgccagcaccgagaagagcaacaucauccggggcuggaucuucggcaccacccuggacagcaagacccagagccugcugaucgugaauaacgccaccaacguggugaucaaggugugcgaguuccaguucugcaacgaccccuuccugggcguguacuaccacaagaacaacaagagcuggauggagagcgaguuccggguguacagcagcgccaacaacugcaccuucgaguacgugagccagcccuuccugauggaccuggagggcaagcagggcaacuucaagaaccugcgggaguucguguucaagaacaucgacggcuacuucaagaucuacagcaagcacaccccaaucaaccuggugcgggaucugccccagggcuucucagcccuggagccccugguggaccugcccaucggcaucaacaucacccgguuccagacccugcuggcccugcaccggagcuaccugaccccaggcgacagcagcagcggguggacagcaggcgcggcugcuuacuacgugggcuaccugcagccccggaccuuccugcugaaguacaacgagaacggcaccaucaccgacgccguggacugcgcccuggacccucugagcgagaccaagugcacccugaagagcuucaccguggagaagggcaucuaccagaccagcaacuuccgggugcagcccaccgagagcaucgugcgguuccccaacaucaccaaccugugccccuucggcgagguguucaacgccacccgguucgccagcguguacgccuggaaccggaagcggaucagcaacugcguggccgacuacagcgugcuguacaacagcgccagcuucagcaccuucaagugcuacggcgugagccccaccaagcugaacgaccugugcuucaccaacguguacgccgacagcuucgugauccguggcgacgaggugcggcagaucgcacccggccagacaggcaagaucgccgacuacaacuacaagcugcccgacgacuucaccggcugcgugaucgccuggaacagcaacaaccucgacagcaaggugggcggcaacuacaacuaccuguaccggcuguuccggaagagcaaccugaagcccuucgagcgggacaucagcaccgagaucuaccaagccggcuccaccccuugcaacggcguggagggcuucaacugcuacuucccucugcagagcuacggcuuccagcccaccuacggcgugggcuaccagcccuaccgggugguggugcugagcuucgagcugcugcacgccccagccaccguguguggccccaagaagagcaccaaccuggugaagaacaagugcgugaacuucaacuucaacggccuuaccggcaccggcgugcugaccgagagcaacaagaaauuccugcccuuucagcaguucggccgggacaucgccgacaccaccgacgcugugcgggauccccagacccuggagauccuggacaucaccccuugcagcuucggcggcgugagcgugaucaccccaggcaccaacaccagcaaccagguggccgugcuguaccagggcgugaacugcaccgaggugcccguggccauccacgccgaccagcugacacccaccuggcgggucuacagcaccggcagcaacguguuccagacccgggccgguugccugaucggcgccgagcacgugaacaacagcuacgagugcgacauccccaucggcgccggcaucugugccagcuaccagacccagaccaauucaccccggagggcaaggagcguggccagccagagcaucaucgccuacaccaugagccugggcgccgagaacagcguggccuacagcaacaacagcaucgccauccccaccaacuucaccaucagcgugaccaccgagauucugcccgugagcaugaccaagaccagcguggacugcaccauguacaucugcggcgacagcaccgagugcagcaaccugcugcugcaguacggcagcuucugcacccagcugaaccgggcccugaccggcaucgccguggagcaggacaagaacacccaggagguguucgcccaggugaagcagaucuacaagaccccucccaucaaggacuucggcggcuucaacuucagccagauccugcccgaccccagcaagcccagcaagcggagcuucaucgaggaccugcuguucaacaaggugacccuagccgacgccggcuucaucaagcaguacggcgacugccucggcgacauagccgcccgggaccugaucugcgcccagaaguucaacggccugaccgugcugccuccccugcugaccgacgagaugaucgcccaguacaccagcgcccuguuagccggaaccaucaccagcggcuggacuuucggcgcuggagccgcucugcagauccccuucgccaugcagauggccuaccgguucaacggcaucggcgugacccagaacgugcuguacgagaaccagaagcugaucgccaaccaguucaacagcgccaucggcaagauccaggacagccugagcagcaccgcuagcgcccugggcaagcugcaggacguggugaaccagaacgcccaggcccugaacacccuggugaagcagcugagcagcaacuucggcgccaucagcagcgugcugaacgacauccugagccggcuggacccucccgaggccgaggugcagaucgaccggcugaucacuggccggcugcagagccugcagaccuacgugacccagcagcugauccgggccgccgagauucgggccagcgccaaccuggccgccaccaagaugagcgagugcgugcugggccagagcaagcggguggacuucugcggcaagggcuaccaccugaugagcuuuccccagagcgcaccccacggagugguguuccugcacgugaccuacgugcccgcccaggagaagaacuucaccaccgccccagccaucugccacgacggcaaggcccacuuuccccgggagggcguguucgugagcaacggcacccacugguucgugacccagcggaacuucuacgagccccagaucaucaccaccgacaacaccuucgugagcggcaacugcgacguggugaucggcaucgugaacaacaccguguacgauccccugcagcccgagcuggacagcuucaaggaggagcuggacaaguacuucaagaaucacaccagccccgacguggaccugggcgacaucagcggcaucaacgccagcguggugaacauccagaaggagaucgaucggcugaacgagguggccaagaaccugaacgagagccugaucgaccugcaggagcugggcaaguacgagcaguacaucaaguggcccugguacaucuggcugggcuucaucgccggccugaucgccaucgugauggugaccaucaugcugugcugcaugaccagcugcugcagcugccugaagggcuguugcagcugcggcagcugcugcaaguucgacgaggacgacagcgagcccgugcugaagggcgugaagcugcacuacaccugaugacucgagcugguacugcaugcacgcaaugcuagcugccccuuucccguccuggguaccccgagucucccccgaccucgggucccagguaugcucccaccuccaccugccccacucaccaccucugcuaguuccagacaccucccaagcacgcagcaaugcagcucaaaacgcuuagccuagccacacccccacgggaaacagcagugauuaaccuuuagcaauaaacgaaaguuuaacuaagcuauacuaaccccaggguuggucaauuucgugccagccacacccuggagcuagcaaaaaaaaaaaaaaaaaaaaaaaaaaaaaagcauaugacuaaaaaaaaaaaaaaaaaaaaaaaaaaaaaaaaaaaaaaaaaaaaaaaaaaaaaaaaaaaaaaaaaaaaaa

SEQ ID NO: 26859 - RNA, 4277 nt, Artificial Sequence
  SARS-CoV-2/Wuhan/WIV05/2019__EPI_ISL_402128 spike protein mRNA gc (1-1273)(K986P_V987P_H69del_V70del_D614G)
agaauaaacuaguauucuucugguccccacagacucagagagaacccgccaccauguucguguuccuggugcugcugccccuggugagcagccagugcgugaaccugaccacccggacccagcugccaccagccuacaccaacagcuucacccggggcgucuacuaccccgacaagguguuccggagcagcguccugcacagcacccaggaccuguuccugcccuucuucagcaacgugaccugguuccacgccaucagcggcaccaacggcaccaagcgguucgacaaccccgugcugcccuucaacgacggcguguacuucgccagcaccgagaagagcaacaucauccggggcuggaucuucggcaccacccuggacagcaagacccagagccugcugaucgugaauaacgccaccaacguggugaucaaggugugcgaguuccaguucugcaacgaccccuuccugggcguguacuaccacaagaacaacaagagcuggauggagagcgaguuccggguguacagcagcgccaacaacugcaccuucgaguacgugagccagcccuuccugauggaccuggagggcaagcagggcaacuucaagaaccugcgggaguucguguucaagaacaucgacggcuacuucaagaucuacagcaagcacaccccaaucaaccuggugcgggaucugccccagggcuucucagcccuggagccccugguggaccugcccaucggcaucaacaucacccgguuccagacccugcuggcccugcaccggagcuaccugaccccaggcgacagcagcagcggguggacagcaggcgcggcugcuuacuacgugggcuaccugcagccccggaccuuccugcugaaguacaacgagaacggcaccaucaccgacgccguggacugcgcccuggacccucugagcgagaccaagugcacccugaagagcuucaccguggagaagggcaucuaccagaccagcaacuuccgggugcagcccaccgagagcaucgugcgguuccccaacaucaccaaccugugccccuucggcgagguguucaacgccacccgguucgccagcguguacgccuggaaccggaagcggaucagcaacugcguggccgacuacagcgugcuguacaacagcgccagcuucagcaccuucaagugcuacggcgugagccccaccaagcugaacgaccugugcuucaccaacguguacgccgacagcuucgugauccguggcgacgaggugcggcagaucgcacccggccagacaggcaagaucgccgacuacaacuacaagcugcccgacgacuucaccggcugcgugaucgccuggaacagcaacaaccucgacagcaaggugggcggcaacuacaacuaccuguaccggcuguuccggaagagcaaccugaagcccuucgagcgggacaucagcaccgagaucuaccaagccggcuccaccccuugcaacggcguggagggcuucaacugcuacuucccucugcagagcuacggcuuccagcccaccaacggcgugggcuaccagcccuaccgggugguggugcugagcuucgagcugcugcacgccccagccaccguguguggccccaagaagagcaccaaccuggugaagaacaagugcgugaacuucaacuucaacggccuuaccggcaccggcgugcugaccgagagcaacaagaaauuccugcccuuucagcaguucggccgggacaucgccgacaccaccgacgcugugcgggauccccagacccuggagauccuggacaucaccccuugcagcuucggcggcgugagcgugaucaccccaggcaccaacaccagcaaccagguggccgugcuguaccagggcgugaacugcaccgaggugcccguggccauccacgccgaccagcugacacccaccuggcgggucuacagcaccggcagcaacguguuccagacccgggccgguugccugaucggcgccgagcacgugaacaacagcuacgagugcgacauccccaucggcgccggcaucugugccagcuaccagacccagaccaauucaccccggagggcaaggagcguggccagccagagcaucaucgccuacaccaugagccugggcgccgagaacagcguggccuacagcaacaacagcaucgccauccccaccaacuucaccaucagcgugaccaccgagauucugcccgugagcaugaccaagaccagcguggacugcaccauguacaucugcggcgacagcaccgagugcagcaaccugcugcugcaguacggcagcuucugcacccagcugaaccgggcccugaccggcaucgccguggagcaggacaagaacacccaggagguguucgcccaggugaagcagaucuacaagaccccucccaucaaggacuucggcggcuucaacuucagccagauccugcccgaccccagcaagcccagcaagcggagcuucaucgaggaccugcuguucaacaaggugacccuagccgacgccggcuucaucaagcaguacggcgacugccucggcgacauagccgcccgggaccugaucugcgcccagaaguucaacggccugaccgugcugccuccccugcugaccgacgagaugaucgcccaguacaccagcgcccuguuagccggaaccaucaccagcggcuggacuuucggcgcuggagccgcucugcagauccccuucgccaugcagauggccuaccgguucaacggcaucggcgugacccagaacgugcuguacgagaaccagaagcugaucgccaaccaguucaacagcgccaucggcaagauccaggacagccugagcagcaccgcuagcgcccugggcaagcugcaggacguggugaaccagaacgcccaggcccugaacacccuggugaagcagcugagcagcaacuucggcgccaucagcagcgugcugaacgacauccugagccggcuggacccucccgaggccgaggugcagaucgaccggcugaucacuggccggcugcagagccugcagaccuacgugacccagcagcugauccgggccgccgagauucgggccagcgccaaccuggccgccaccaagaugagcgagugcgugcugggccagagcaagcggguggacuucugcggcaagggcuaccaccugaugagcuuuccccagagcgcaccccacggagugguguuccugcacgugaccuacgugcccgcccaggagaagaacuucaccaccgccccagccaucugccacgacggcaaggcccacuuuccccgggagggcguguucgugagcaacggcacccacugguucgugacccagcggaacuucuacgagccccagaucaucaccaccgacaacaccuucgugagcggcaacugcgacguggugaucggcaucgugaacaacaccguguacgauccccugcagcccgagcuggacagcuucaaggaggagcuggacaaguacuucaagaaucacaccagccccgacguggaccugggcgacaucagcggcaucaacgccagcguggugaacauccagaaggagaucgaucggcugaacgagguggccaagaaccugaacgagagccugaucgaccugcaggagcugggcaaguacgagcaguacaucaaguggcccugguacaucuggcugggcuucaucgccggccugaucgccaucgugauggugaccaucaugcugugcugcaugaccagcugcugcagcugccugaagggcuguugcagcugcggcagcugcugcaaguucgacgaggacgacagcgagcccgugcugaagggcgugaagcugcacuacaccugaugacucgagcugguacugcaugcacgcaaugcuagcugccccuuucccguccuggguaccccgagucucccccgaccucgggucccagguaugcucccaccuccaccugccccacucaccaccucugcuaguuccagacaccucccaagcacgcagcaaugcagcucaaaacgcuuagccuagccacacccccacgggaaacagcagugauuaaccuuuagcaauaaacgaaaguuuaacuaagcuauacuaaccccaggguuggucaauuucgugccagccacacccuggagcuagcaaaaaaaaaaaaaaaaaaaaaaaaaaaaaagcauaugacuaaaaaaaaaaaaaaaaaaaaaaaaaaaaaaaaaaaaaaaaaaaaaaaaaaaaaaaaaaaaaaaaaaaaaa

SEQ ID NO: 26860 - RNA, 4283 nt, Artificial Sequence
  SARS-CoV-2/Wuhan/WIV05/2019__EPI_ISL_402128 spike protein mRNA gc (1-1273)(K986P_V987P_Y453F_D614G)
agaauaaacuaguauucuucugguccccacagacucagagagaacccgccaccauguucguguuccuggugcugcugccccuggugagcagccagugcgugaaccugaccacccggacccagcugccaccagccuacaccaacagcuucacccggggcgucuacuaccccgacaagguguuccggagcagcguccugcacagcacccaggaccuguuccugcccuucuucagcaacgugaccugguuccacgccauccacgugagcggcaccaacggcaccaagcgguucgacaaccccgugcugcccuucaacgacggcguguacuucgccagcaccgagaagagcaacaucauccggggcuggaucuucggcaccacccuggacagcaagacccagagccugcugaucgugaauaacgccaccaacguggugaucaaggugugcgaguuccaguucugcaacgaccccuuccugggcguguacuaccacaagaacaacaagagcuggauggagagcgaguuccggguguacagcagcgccaacaacugcaccuucgaguacgugagccagcccuuccugauggaccuggagggcaagcagggcaacuucaagaaccugcgggaguucguguucaagaacaucgacggcuacuucaagaucuacagcaagcacaccccaaucaaccuggugcgggaucugccccagggcuucucagcccuggagccccugguggaccugcccaucggcaucaacaucacccgguuccagacccugcuggcccugcaccggagcuaccugaccccaggcgacagcagcagcggguggacagcaggcgcggcugcuuacuacgugggcuaccugcagccccggaccuuccugcugaaguacaacgagaacggcaccaucaccgacgccguggacugcgcccuggacccucugagcgagaccaagugcacccugaagagcuucaccguggagaagggcaucuaccagaccagcaacuuccgggugcagcccaccgagagcaucgugcgguuccccaacaucaccaaccugugccccuucggcgagguguucaacgccacccgguucgccagcguguacgccuggaaccggaagcggaucagcaacugcguggccgacuacagcgugcuguacaacagcgccagcuucagcaccuucaagugcuacggcgugagccccaccaagcugaacgaccugugcuucaccaacguguacgccgacagcuucgugauccguggcgacgaggugcggcagaucgcacccggccagacaggcaagaucgccgacuacaacuacaagcugcccgacgacuucaccggcugcgugaucgccuggaacagcaacaaccucgacagcaaggugggcggcaacuacaacuaccuguuccggcuguuccggaagagcaaccugaagcccuucgagcgggacaucagcaccgagaucuaccaagccggcuccaccccuugcaacggcguggagggcuucaacugcuacuucccucugcagagcuacggcuuccagcccaccaacggcgugggcuaccagcccuaccgggugguggugcugagcuucgagcugcugcacgccccagccaccguguguggccccaagaagagcaccaaccuggugaagaacaagugcgugaacuucaacuucaacggccuuaccggcaccggcgugcugaccgagagcaacaagaaauuccugcccuuucagcaguucggccgggacaucgccgacaccaccgacgcugugcgggauccccagacccuggagauccuggacaucaccccuugcagcuucggcggcgugagcgugaucaccccaggcaccaacaccagcaaccagguggccgugcuguaccagggcgugaacugcaccgaggugcccguggccauccacgccgaccagcugacacccaccuggcgggucuacagcaccggcagcaacguguuccagacccgggccgguugccugaucggcgccgagcacgugaacaacagcuacgagugcgacauccccaucggcgccggcaucugugccagcuaccagacccagaccaauucaccccggagggcaaggagcguggccagccagagcaucaucgccuacaccaugagccugggcgccgagaacagcguggccuacagcaacaacagcaucgccauccccaccaacuucaccaucagcgugaccaccgagauucugcccgugagcaugaccaagaccagcguggacugcaccauguacaucugcggcgacagcaccgagugcagcaaccugcugcugcaguacggcagcuucugcacccagcugaaccgggcccugaccggcaucgccguggagcaggacaagaacacccaggagguguucgcccaggugaagcagaucuacaagaccccucccaucaaggacuucggcggcuucaacuucagccagauccugcccgaccccagcaagcccagcaagcggagcuucaucgaggaccugcuguucaacaaggugacccuagccgacgccggcuucaucaagcaguacggcgacugccucggcgacauagccgcccgggaccugaucugcgcccagaaguucaacggccugaccgugcugccuccccugcugaccgacgagaugaucgcccaguacaccagcgcccuguuagccggaaccaucaccagcggcuggacuuucggcgcuggagccgcucugcagauccccuucgccaugcagauggccuaccgguucaacggcaucggcgugacccagaacgugcuguacgagaaccagaagcugaucgccaaccaguucaacagcgccaucggcaagauccaggacagccugagcagcaccgcuagcgcccugggcaagcugcaggacguggugaaccagaacgcccaggcccugaacacccuggugaagcagcugagcagcaacuucggcgccaucagcagcgugcugaacgacauccugagccggcuggacccucccgaggccgaggugcagaucgaccggcugaucacuggccggcugcagagccugcagaccuacgugacccagcagcugauccgggccgccgagauucgggccagcgccaaccuggccgccaccaagaugagcgagugcgugcugggccagagcaagcggguggacuucugcggcaagggcuaccaccugaugagcuuuccccagagcgcaccccacggagugguguuccugcacgugaccuacgugcccgcccaggagaagaacuucaccaccgccccagccaucugccacgacggcaaggcccacuuuccccgggagggcguguucgugagcaacggcacccacugguucgugacccagcggaacuucuacgagccccagaucaucaccaccgacaacaccuucgugagcggcaacugcgacguggugaucggcaucgugaacaacaccguguacgauccccugcagcccgagcuggacagcuucaaggaggagcuggacaaguacuucaagaaucacaccagccccgacguggaccugggcgacaucagcggcaucaacgccagcguggugaacauccagaaggagaucgaucggcugaacgagguggccaagaaccugaacgagagccugaucgaccugcaggagcugggcaaguacgagcaguacaucaaguggcccugguacaucuggcugggcuucaucgccggccugaucgccaucgugauggugaccaucaugcugugcugcaugaccagcugcugcagcugccugaagggcuguugcagcugcggcagcugcugcaaguucgacgaggacgacagcgagcccgugcugaagggcgugaagcugcacuacaccugaugacucgagcugguacugcaugcacgcaaugcuagcugccccuuucccguccuggguaccccgagucucccccgaccucgggucccagguaugcucccaccuccaccugccccacucaccaccucugcuaguuccagacaccucccaagcacgcagcaaugcagcucaaaacgcuuagccuagccacacccccacgggaaacagcagugauuaaccuuuagcaauaaacgaaaguuuaacuaagcuauacuaaccccaggguuggucaauuucgugccagccacacccuggagcuagcaaaaaaaaaaaaaaaaaaaaaaaaaaaaaagcauaugacuaaaaaaaaaaaaaaaaaaaaaaaaaaaaaaaaaaaaaaaaaaaaaaaaaaaaaaaaaaaaaaaaaaaaaa

SEQ ID NO: 26861 - RNA, 4283 nt, Artificial Sequence
  SARS-CoV-2/Wuhan/WIV05/2019__EPI_ISL_402128 spike protein mRNA gc (1-1273)(K986P_V987P_D614G_I692V)
agaauaaacuaguauucuucugguccccacagacucagagagaacccgccaccauguucguguuccuggugcugcugccccuggugagcagccagugcgugaaccugaccacccggacccagcugccaccagccuacaccaacagcuucacccggggcgucuacuaccccgacaagguguuccggagcagcguccugcacagcacccaggaccuguuccugcccuucuucagcaacgugaccugguuccacgccauccacgugagcggcaccaacggcaccaagcgguucgacaaccccgugcugcccuucaacgacggcguguacuucgccagcaccgagaagagcaacaucauccggggcuggaucuucggcaccacccuggacagcaagacccagagccugcugaucgugaauaacgccaccaacguggugaucaaggugugcgaguuccaguucugcaacgaccccuuccugggcguguacuaccacaagaacaacaagagcuggauggagagcgaguuccggguguacagcagcgccaacaacugcaccuucgaguacgugagccagcccuuccugauggaccuggagggcaagcagggcaacuucaagaaccugcgggaguucguguucaagaacaucgacggcuacuucaagaucuacagcaagcacaccccaaucaaccuggugcgggaucugccccagggcuucucagcccuggagccccugguggaccugcccaucggcaucaacaucacccgguuccagacccugcuggcccugcaccggagcuaccugaccccaggcgacagcagcagcggguggacagcaggcgcggcugcuuacuacgugggcuaccugcagccccggaccuuccugcugaaguacaacgagaacggcaccaucaccgacgccguggacugcgcccuggacccucugagcgagaccaagugcacccugaagagcuucaccguggagaagggcaucuaccagaccagcaacuuccgggugcagcccaccgagagcaucgugcgguuccccaacaucaccaaccugugccccuucggcgagguguucaacgccacccgguucgccagcguguacgccuggaaccggaagcggaucagcaacugcguggccgacuacagcgugcuguacaacagcgccagcuucagcaccuucaagugcuacggcgugagccccaccaagcugaacgaccugugcuucaccaacguguacgccgacagcuucgugauccguggcgacgaggugcggcagaucgcacccggccagacaggcaagaucgccgacuacaacuacaagcugcccgacgacuucaccggcugcgugaucgccuggaacagcaacaaccucgacagcaaggugggcggcaacuacaacuaccuguaccggcuguuccggaagagcaaccugaagcccuucgagcgggacaucagcaccgagaucuaccaagccggcuccaccccuugcaacggcguggagggcuucaacugcuacuucccucugcagagcuacggcuuccagcccaccaacggcgugggcuaccagcccuaccgggugguggugcugagcuucgagcugcugcacgccccagccaccguguguggccccaagaagagcaccaaccuggugaagaacaagugcgugaacuucaacuucaacggccuuaccggcaccggcgugcugaccgagagcaacaagaaauuccugcccuuucagcaguucggccgggacaucgccgacaccaccgacgcugugcgggauccccagacccuggagauccuggacaucaccccuugcagcuucggcggcgugagcgugaucaccccaggcaccaacaccagcaaccagguggccgugcuguaccagggcgugaacugcaccgaggugcccguggccauccacgccgaccagcugacacccaccuggcgggucuacagcaccggcagcaacguguuccagacccgggccgguugccugaucggcgccgagcacgugaacaacagcuacgagugcgacauccccaucggcgccggcaucugugccagcuaccagacccagaccaauucaccccggagggcaaggagcguggccagccagagcgugaucgccuacaccaugagccugggcgccgagaacagcguggccuacagcaacaacagcaucgccauccccaccaacuucaccaucagcgugaccaccgagauucugcccgugagcaugaccaagaccagcguggacugcaccauguacaucugcggcgacagcaccgagugcagcaaccugcugcugcaguacggcagcuucugcacccagcugaaccgggcccugaccggcaucgccguggagcaggacaagaacacccaggagguguucgcccaggugaagcagaucuacaagaccccucccaucaaggacuucggcggcuucaacuucagccagauccugcccgaccccagcaagcccagcaagcggagcuucaucgaggaccugcuguucaacaaggugacccuagccgacgccggcuucaucaagcaguacggcgacugccucggcgacauagccgcccgggaccugaucugcgcccagaaguucaacggccugaccgugcugccuccccugcugaccgacgagaugaucgcccaguacaccagcgcccuguuagccggaaccaucaccagcggcuggacuuucggcgcuggagccgcucugcagauccccuucgccaugcagauggccuaccgguucaacggcaucggcgugacccagaacgugcuguacgagaaccagaagcugaucgccaaccaguucaacagcgccaucggcaagauccaggacagccugagcagcaccgcuagcgcccugggcaagcugcaggacguggugaaccagaacgcccaggcccugaacacccuggugaagcagcugagcagcaacuucggcgccaucagcagcgugcugaacgacauccugagccggcuggacccucccgaggccgaggugcagaucgaccggcugaucacuggccggcugcagagccugcagaccuacgugacccagcagcugauccgggccgccgagauucgggccagcgccaaccuggccgccaccaagaugagcgagugcgugcugggccagagcaagcggguggacuucugcggcaagggcuaccaccugaugagcuuuccccagagcgcaccccacggagugguguuccugcacgugaccuacgugcccgcccaggagaagaacuucaccaccgccccagccaucugccacgacggcaaggcccacuuuccccgggagggcguguucgugagcaacggcacccacugguucgugacccagcggaacuucuacgagccccagaucaucaccaccgacaacaccuucgugagcggcaacugcgacguggugaucggcaucgugaacaacaccguguacgauccccugcagcccgagcuggacagcuucaaggaggagcuggacaaguacuucaagaaucacaccagccccgacguggaccugggcgacaucagcggcaucaacgccagcguggugaacauccagaaggagaucgaucggcugaacgagguggccaagaaccugaacgagagccugaucgaccugcaggagcugggcaaguacgagcaguacaucaaguggcccugguacaucuggcugggcuucaucgccggccugaucgccaucgugauggugaccaucaugcugugcugcaugaccagcugcugcagcugccugaagggcuguugcagcugcggcagcugcugcaaguucgacgaggacgacagcgagcccgugcugaagggcgugaagcugcacuacaccugaugacucgagcugguacugcaugcacgcaaugcuagcugccccuuucccguccuggguaccccgagucucccccgaccucgggucccagguaugcucccaccuccaccugccccacucaccaccucugcuaguuccagacaccucccaagcacgcagcaaugcagcucaaaacgcuuagccuagccacacccccacgggaaacagcagugauuaaccuuuagcaauaaacgaaaguuuaacuaagcuauacuaaccccaggguuggucaauuucgugccagccacacccuggagcuagcaaaaaaaaaaaaaaaaaaaaaaaaaaaaaagcauaugacuaaaaaaaaaaaaaaaaaaaaaaaaaaaaaaaaaaaaaaaaaaaaaaaaaaaaaaaaaaaaaaaaaaaaaa

SEQ ID NO: 26862 - RNA, 4283 nt, Artificial Sequence
  SARS-CoV-2/Wuhan/WIV05/2019__EPI_ISL_402128 spike protein mRNA gc (1-1273)(K986P_V987P_D614G_M1229I)
agaauaaacuaguauucuucugguccccacagacucagagagaacccgccaccauguucguguuccuggugcugcugccccuggugagcagccagugcgugaaccugaccacccggacccagcugccaccagccuacaccaacagcuucacccggggcgucuacuaccccgacaagguguuccggagcagcguccugcacagcacccaggaccuguuccugcccuucuucagcaacgugaccugguuccacgccauccacgugagcggcaccaacggcaccaagcgguucgacaaccccgugcugcccuucaacgacggcguguacuucgccagcaccgagaagagcaacaucauccggggcuggaucuucggcaccacccuggacagcaagacccagagccugcugaucgugaauaacgccaccaacguggugaucaaggugugcgaguuccaguucugcaacgaccccuuccugggcguguacuaccacaagaacaacaagagcuggauggagagcgaguuccggguguacagcagcgccaacaacugcaccuucgaguacgugagccagcccuuccugauggaccuggagggcaagcagggcaacuucaagaaccugcgggaguucguguucaagaacaucgacggcuacuucaagaucuacagcaagcacaccccaaucaaccuggugcgggaucugccccagggcuucucagcccuggagccccugguggaccugcccaucggcaucaacaucacccgguuccagacccugcuggcccugcaccggagcuaccugaccccaggcgacagcagcagcggguggacagcaggcgcggcugcuuacuacgugggcuaccugcagccccggaccuuccugcugaaguacaacgagaacggcaccaucaccgacgccguggacugcgcccuggacccucugagcgagaccaagugcacccugaagagcuucaccguggagaagggcaucuaccagaccagcaacuuccgggugcagcccaccgagagcaucgugcgguuccccaacaucaccaaccugugccccuucggcgagguguucaacgccacccgguucgccagcguguacgccuggaaccggaagcggaucagcaacugcguggccgacuacagcgugcuguacaacagcgccagcuucagcaccuucaagugcuacggcgugagccccaccaagcugaacgaccugugcuucaccaacguguacgccgacagcuucgugauccguggcgacgaggugcggcagaucgcacccggccagacaggcaagaucgccgacuacaacuacaagcugcccgacgacuucaccggcugcgugaucgccuggaacagcaacaaccucgacagcaaggugggcggcaacuacaacuaccuguaccggcuguuccggaagagcaaccugaagcccuucgagcgggacaucagcaccgagaucuaccaagccggcuccaccccuugcaacggcguggagggcuucaacugcuacuucccucugcagagcuacggcuuccagcccaccaacggcgugggcuaccagcccuaccgggugguggugcugagcuucgagcugcugcacgccccagccaccguguguggccccaagaagagcaccaaccuggugaagaacaagugcgugaacuucaacuucaacggccuuaccggcaccggcgugcugaccgagagcaacaagaaauuccugcccuuucagcaguucggccgggacaucgccgacaccaccgacgcugugcgggauccccagacccuggagauccuggacaucaccccuugcagcuucggcggcgugagcgugaucaccccaggcaccaacaccagcaaccagguggccgugcuguaccagggcgugaacugcaccgaggugcccguggccauccacgccgaccagcugacacccaccuggcgggucuacagcaccggcagcaacguguuccagacccgggccgguugccugaucggcgccgagcacgugaacaacagcuacgagugcgacauccccaucggcgccggcaucugugccagcuaccagacccagaccaauucaccccggagggcaaggagcguggccagccagagcaucaucgccuacaccaugagccugggcgccgagaacagcguggccuacagcaacaacagcaucgccauccccaccaacuucaccaucagcgugaccaccgagauucugcccgugagcaugaccaagaccagcguggacugcaccauguacaucugcggcgacagcaccgagugcagcaaccugcugcugcaguacggcagcuucugcacccagcugaaccgggcccugaccggcaucgccguggagcaggacaagaacacccaggagguguucgcccaggugaagcagaucuacaagaccccucccaucaaggacuucggcggcuucaacuucagccagauccugcccgaccccagcaagcccagcaagcggagcuucaucgaggaccugcuguucaacaaggugacccuagccgacgccggcuucaucaagcaguacggcgacugccucggcgacauagccgcccgggaccugaucugcgcccagaaguucaacggccugaccgugcugccuccccugcugaccgacgagaugaucgcccaguacaccagcgcccuguuagccggaaccaucaccagcggcuggacuuucggcgcuggagccgcucugcagauccccuucgccaugcagauggccuaccgguucaacggcaucggcgugacccagaacgugcuguacgagaaccagaagcugaucgccaaccaguucaacagcgccaucggcaagauccaggacagccugagcagcaccgcuagcgcccugggcaagcugcaggacguggugaaccagaacgcccaggcccugaacacccuggugaagcagcugagcagcaacuucggcgccaucagcagcgugcugaacgacauccugagccggcuggacccucccgaggccgaggugcagaucgaccggcugaucacuggccggcugcagagccugcagaccuacgugacccagcagcugauccgggccgccgagauucgggccagcgccaaccuggccgccaccaagaugagcgagugcgugcugggccagagcaagcggguggacuucugcggcaagggcuaccaccugaugagcuuuccccagagcgcaccccacggagugguguuccugcacgugaccuacgugcccgcccaggagaagaacuucaccaccgccccagccaucugccacgacggcaaggcccacuuuccccgggagggcguguucgugagcaacggcacccacugguucgugacccagcggaacuucuacgagccccagaucaucaccaccgacaacaccuucgugagcggcaacugcgacguggugaucggcaucgugaacaacaccguguacgauccccugcagcccgagcuggacagcuucaaggaggagcuggacaaguacuucaagaaucacaccagccccgacguggaccugggcgacaucagcggcaucaacgccagcguggugaacauccagaaggagaucgaucggcugaacgagguggccaagaaccugaacgagagccugaucgaccugcaggagcugggcaaguacgagcaguacaucaaguggcccugguacaucuggcugggcuucaucgccggccugaucgccaucgugaucgugaccaucaugcugugcugcaugaccagcugcugcagcugccugaagggcuguugcagcugcggcagcugcugcaaguucgacgaggacgacagcgagcccgugcugaagggcgugaagcugcacuacaccugaugacucgagcugguacugcaugcacgcaaugcuagcugccccuuucccguccuggguaccccgagucucccccgaccucgggucccagguaugcucccaccuccaccugccccacucaccaccucugcuaguuccagacaccucccaagcacgcagcaaugcagcucaaaacgcuuagccuagccacacccccacgggaaacagcagugauuaaccuuuagcaauaaacgaaaguuuaacuaagcuauacuaaccccaggguuggucaauuucgugccagccacacccuggagcuagcaaaaaaaaaaaaaaaaaaaaaaaaaaaaaagcauaugacuaaaaaaaaaaaaaaaaaaaaaaaaaaaaaaaaaaaaaaaaaaaaaaaaaaaaaaaaaaaaaaaaaaaaaa

SEQ ID NO: 26863 - RNA, 4277 nt, Artificial Sequence
  SARS-CoV-2/Wuhan/WIV05/2019__EPI_ISL_402128 spike protein mRNA gc (1-1273)(K986P_V987P_H69del_V70del_A222V_Y453F_S477N_D614G_I692V)
agaauaaacuaguauucuucugguccccacagacucagagagaacccgccaccauguucguguuccuggugcugcugccccuggugagcagccagugcgugaaccugaccacccggacccagcugccaccagccuacaccaacagcuucacccggggcgucuacuaccccgacaagguguuccggagcagcguccugcacagcacccaggaccuguuccugcccuucuucagcaacgugaccugguuccacgccaucagcggcaccaacggcaccaagcgguucgacaaccccgugcugcccuucaacgacggcguguacuucgccagcaccgagaagagcaacaucauccggggcuggaucuucggcaccacccuggacagcaagacccagagccugcugaucgugaauaacgccaccaacguggugaucaaggugugcgaguuccaguucugcaacgaccccuuccugggcguguacuaccacaagaacaacaagagcuggauggagagcgaguuccggguguacagcagcgccaacaacugcaccuucgaguacgugagccagcccuuccugauggaccuggagggcaagcagggcaacuucaagaaccugcgggaguucguguucaagaacaucgacggcuacuucaagaucuacagcaagcacaccccaaucaaccuggugcgggaucugccccagggcuucucagugcuggagccccugguggaccugcccaucggcaucaacaucacccgguuccagacccugcuggcccugcaccggagcuaccugaccccaggcgacagcagcagcggguggacagcaggcgcggcugcuuacuacgugggcuaccugcagccccggaccuuccugcugaaguacaacgagaacggcaccaucaccgacgccguggacugcgcccuggacccucugagcgagaccaagugcacccugaagagcuucaccguggagaagggcaucuaccagaccagcaacuuccgggugcagcccaccgagagcaucgugcgguuccccaacaucaccaaccugugccccuucggcgagguguucaacgccacccgguucgccagcguguacgccuggaaccggaagcggaucagcaacugcguggccgacuacagcgugcuguacaacagcgccagcuucagcaccuucaagugcuacggcgugagccccaccaagcugaacgaccugugcuucaccaacguguacgccgacagcuucgugauccguggcgacgaggugcggcagaucgcacccggccagacaggcaagaucgccgacuacaacuacaagcugcccgacgacuucaccggcugcgugaucgccuggaacagcaacaaccucgacagcaaggugggcggcaacuacaacuaccuguuccggcuguuccggaagagcaaccugaagcccuucgagcgggacaucagcaccgagaucuaccaagccggcaacaccccuugcaacggcguggagggcuucaacugcuacuucccucugcagagcuacggcuuccagcccaccaacggcgugggcuaccagcccuaccgggugguggugcugagcuucgagcugcugcacgccccagccaccguguguggccccaagaagagcaccaaccuggugaagaacaagugcgugaacuucaacuucaacggccuuaccggcaccggcgugcugaccgagagcaacaagaaauuccugcccuuucagcaguucggccgggacaucgccgacaccaccgacgcugugcgggauccccagacccuggagauccuggacaucaccccuugcagcuucggcggcgugagcgugaucaccccaggcaccaacaccagcaaccagguggccgugcuguaccagggcgugaacugcaccgaggugcccguggccauccacgccgaccagcugacacccaccuggcgggucuacagcaccggcagcaacguguuccagacccgggccgguugccugaucggcgccgagcacgugaacaacagcuacgagugcgacauccccaucggcgccggcaucugugccagcuaccagacccagaccaauucaccccggagggcaaggagcguggccagccagagcgugaucgccuacaccaugagccugggcgccgagaacagcguggccuacagcaacaacagcaucgccauccccaccaacuucaccaucagcgugaccaccgagauucugcccgugagcaugaccaagaccagcguggacugcaccauguacaucugcggcgacagcaccgagugcagcaaccugcugcugcaguacggcagcuucugcacccagcugaaccgggcccugaccggcaucgccguggagcaggacaagaacacccaggagguguucgcccaggugaagcagaucuacaagaccccucccaucaaggacuucggcggcuucaacuucagccagauccugcccgaccccagcaagcccagcaagcggagcuucaucgaggaccugcuguucaacaaggugacccuagccgacgccggcuucaucaagcaguacggcgacugccucggcgacauagccgcccgggaccugaucugcgcccagaaguucaacggccugaccgugcugccuccccugcugaccgacgagaugaucgcccaguacaccagcgcccuguuagccggaaccaucaccagcggcuggacuuucggcgcuggagccgcucugcagauccccuucgccaugcagauggccuaccgguucaacggcaucggcgugacccagaacgugcuguacgagaaccagaagcugaucgccaaccaguucaacagcgccaucggcaagauccaggacagccugagcagcaccgcuagcgcccugggcaagcugcaggacguggugaaccagaacgcccaggcccugaacacccuggugaagcagcugagcagcaacuucggcgccaucagcagcgugcugaacgacauccugagccggcuggacccucccgaggccgaggugcagaucgaccggcugaucacuggccggcugcagagccugcagaccuacgugacccagcagcugauccgggccgccgagauucgggccagcgccaaccuggccgccaccaagaugagcgagugcgugcugggccagagcaagcggguggacuucugcggcaagggcuaccaccugaugagcuuuccccagagcgcaccccacggagugguguuccugcacgugaccuacgugcccgcccaggagaagaacuucaccaccgccccagccaucugccacgacggcaaggcccacuuuccccgggagggcguguucgugagcaacggcacccacugguucgugacccagcggaacuucuacgagccccagaucaucaccaccgacaacaccuucgugagcggcaacugcgacguggugaucggcaucgugaacaacaccguguacgauccccugcagcccgagcuggacagcuucaaggaggagcuggacaaguacuucaagaaucacaccagccccgacguggaccugggcgacaucagcggcaucaacgccagcguggugaacauccagaaggagaucgaucggcugaacgagguggccaagaaccugaacgagagccugaucgaccugcaggagcugggcaaguacgagcaguacaucaaguggcccugguacaucuggcugggcuucaucgccggccugaucgccaucgugauggugaccaucaugcugugcugcaugaccagcugcugcagcugccugaagggcuguugcagcugcggcagcugcugcaaguucgacgaggacgacagcgagcccgugcugaagggcgugaagcugcacuacaccugaugacucgagcugguacugcaugcacgcaaugcuagcugccccuuucccguccuggguaccccgagucucccccgaccucgggucccagguaugcucccaccuccaccugccccacucaccaccucugcuaguuccagacaccucccaagcacgcagcaaugcagcucaaaacgcuuagccuagccacacccccacgggaaacagcagugauuaaccuuuagcaauaaacgaaaguuuaacuaagcuauacuaaccccaggguuggucaauuucgugccagccacacccuggagcuagcaaaaaaaaaaaaaaaaaaaaaaaaaaaaaagcauaugacuaaaaaaaaaaaaaaaaaaaaaaaaaaaaaaaaaaaaaaaaaaaaaaaaaaaaaaaaaaaaaaaaaaaaaa

SEQ ID NO: 26864 - RNA, 4277 nt, Artificial Sequence
  SARS-CoV-2/Wuhan/WIV05/2019__EPI_ISL_402128 spike protein mRNA gc (1-1273)(K986P_V987P_H69del_V70del_Y453F_D614G_I692V_M1229I)
agaauaaacuaguauucuucugguccccacagacucagagagaacccgccaccauguucguguuccuggugcugcugccccuggugagcagccagugcgugaaccugaccacccggacccagcugccaccagccuacaccaacagcuucacccggggcgucuacuaccccgacaagguguuccggagcagcguccugcacagcacccaggaccuguuccugcccuucuucagcaacgugaccugguuccacgccaucagcggcaccaacggcaccaagcgguucgacaaccccgugcugcccuucaacgacggcguguacuucgccagcaccgagaagagcaacaucauccggggcuggaucuucggcaccacccuggacagcaagacccagagccugcugaucgugaauaacgccaccaacguggugaucaaggugugcgaguuccaguucugcaacgaccccuuccugggcguguacuaccacaagaacaacaagagcuggauggagagcgaguuccggguguacagcagcgccaacaacugcaccuucgaguacgugagccagcccuuccugauggaccuggagggcaagcagggcaacuucaagaaccugcgggaguucguguucaagaacaucgacggcuacuucaagaucuacagcaagcacaccccaaucaaccuggugcgggaucugccccagggcuucucagcccuggagccccugguggaccugcccaucggcaucaacaucacccgguuccagacccugcuggcccugcaccggagcuaccugaccccaggcgacagcagcagcggguggacagcaggcgcggcugcuuacuacgugggcuaccugcagccccggaccuuccugcugaaguacaacgagaacggcaccaucaccgacgccguggacugcgcccuggacccucugagcgagaccaagugcacccugaagagcuucaccguggagaagggcaucuaccagaccagcaacuuccgggugcagcccaccgagagcaucgugcgguuccccaacaucaccaaccugugccccuucggcgagguguucaacgccacccgguucgccagcguguacgccuggaaccggaagcggaucagcaacugcguggccgacuacagcgugcuguacaacagcgccagcuucagcaccuucaagugcuacggcgugagccccaccaagcugaacgaccugugcuucaccaacguguacgccgacagcuucgugauccguggcgacgaggugcggcagaucgcacccggccagacaggcaagaucgccgacuacaacuacaagcugcccgacgacuucaccggcugcgugaucgccuggaacagcaacaaccucgacagcaaggugggcggcaacuacaacuaccuguuccggcuguuccggaagagcaaccugaagcccuucgagcgggacaucagcaccgagaucuaccaagccggcuccaccccuugcaacggcguggagggcuucaacugcuacuucccucugcagagcuacggcuuccagcccaccaacggcgugggcuaccagcccuaccgggugguggugcugagcuucgagcugcugcacgccccagccaccguguguggccccaagaagagcaccaaccuggugaagaacaagugcgugaacuucaacuucaacggccuuaccggcaccggcgugcugaccgagagcaacaagaaauuccugcccuuucagcaguucggccgggacaucgccgacaccaccgacgcugugcgggauccccagacccuggagauccuggacaucaccccuugcagcuucggcggcgugagcgugaucaccccaggcaccaacaccagcaaccagguggccgugcuguaccagggcgugaacugcaccgaggugcccguggccauccacgccgaccagcugacacccaccuggcgggucuacagcaccggcagcaacguguuccagacccgggccgguugccugaucggcgccgagcacgugaacaacagcuacgagugcgacauccccaucggcgccggcaucugugccagcuaccagacccagaccaauucaccccggagggcaaggagcguggccagccagagcgugaucgccuacaccaugagccugggcgccgagaacagcguggccuacagcaacaacagcaucgccauccccaccaacuucaccaucagcgugaccaccgagauucugcccgugagcaugaccaagaccagcguggacugcaccauguacaucugcggcgacagcaccgagugcagcaaccugcugcugcaguacggcagcuucugcacccagcugaaccgggcccugaccggcaucgccguggagcaggacaagaacacccaggagguguucgcccaggugaagcagaucuacaagaccccucccaucaaggacuucggcggcuucaacuucagccagauccugcccgaccccagcaagcccagcaagcggagcuucaucgaggaccugcuguucaacaaggugacccuagccgacgccggcuucaucaagcaguacggcgacugccucggcgacauagccgcccgggaccugaucugcgcccagaaguucaacggccugaccgugcugccuccccugcugaccgacgagaugaucgcccaguacaccagcgcccuguuagccggaaccaucaccagcggcuggacuuucggcgcuggagccgcucugcagauccccuucgccaugcagauggccuaccgguucaacggcaucggcgugacccagaacgugcuguacgagaaccagaagcugaucgccaaccaguucaacagcgccaucggcaagauccaggacagccugagcagcaccgcuagcgcccugggcaagcugcaggacguggugaaccagaacgcccaggcccugaacacccuggugaagcagcugagcagcaacuucggcgccaucagcagcgugcugaacgacauccugagccggcuggacccucccgaggccgaggugcagaucgaccggcugaucacuggccggcugcagagccugcagaccuacgugacccagcagcugauccgggccgccgagauucgggccagcgccaaccuggccgccaccaagaugagcgagugcgugcugggccagagcaagcggguggacuucugcggcaagggcuaccaccugaugagcuuuccccagagcgcaccccacggagugguguuccugcacgugaccuacgugcccgcccaggagaagaacuucaccaccgccccagccaucugccacgacggcaaggcccacuuuccccgggagggcguguucgugagcaacggcacccacugguucgugacccagcggaacuucuacgagccccagaucaucaccaccgacaacaccuucgugagcggcaacugcgacguggugaucggcaucgugaacaacaccguguacgauccccugcagcccgagcuggacagcuucaaggaggagcuggacaaguacuucaagaaucacaccagccccgacguggaccugggcgacaucagcggcaucaacgccagcguggugaacauccagaaggagaucgaucggcugaacgagguggccaagaaccugaacgagagccugaucgaccugcaggagcugggcaaguacgagcaguacaucaaguggcccugguacaucuggcugggcuucaucgccggccugaucgccaucgugaucgugaccaucaugcugugcugcaugaccagcugcugcagcugccugaagggcuguugcagcugcggcagcugcugcaaguucgacgaggacgacagcgagcccgugcugaagggcgugaagcugcacuacaccugaugacucgagcugguacugcaugcacgcaaugcuagcugccccuuucccguccuggguaccccgagucucccccgaccucgggucccagguaugcucccaccuccaccugccccacucaccaccucugcuaguuccagacaccucccaagcacgcagcaaugcagcucaaaacgcuuagccuagccacacccccacgggaaacagcagugauuaaccuuuagcaauaaacgaaaguuuaacuaagcuauacuaaccccaggguuggucaauuucgugccagccacacccuggagcuagcaaaaaaaaaaaaaaaaaaaaaaaaaaaaaagcauaugacuaaaaaaaaaaaaaaaaaaaaaaaaaaaaaaaaaaaaaaaaaaaaaaaaaaaaaaaaaaaaaaaaaaaaaa

SEQ ID NO: 26865 - RNA, 4274 nt, Artificial Sequence
  SARS-CoV-2/Wuhan/WIV05/2019__EPI_ISL_402128 spike protein mRNA gc (1-1273)(K986P_V987P_K986P_V987P_H69del_V70del_Y144del_N501Y_A570 D_D614G_P681H_T716I_S982A_D1118H)
agaauaaacuaguauucuucugguccccacagacucagagagaacccgccaccauguucguguuccuggugcugcugccccuggugagcagccagugcgugaaccugaccacccggacccagcugccaccagccuacaccaacagcuucacccggggcgucuacuaccccgacaagguguuccggagcagcguccugcacagcacccaggaccuguuccugcccuucuucagcaacgugaccugguuccacgccaucagcggcaccaacggcaccaagcgguucgacaaccccgugcugcccuucaacgacggcguguacuucgccagcaccgagaagagcaacaucauccggggcuggaucuucggcaccacccuggacagcaagacccagagccugcugaucgugaauaacgccaccaacguggugaucaaggugugcgaguuccaguucugcaacgaccccuuccugggcguguaccacaagaacaacaagagcuggauggagagcgaguuccggguguacagcagcgccaacaacugcaccuucgaguacgugagccagcccuuccugauggaccuggagggcaagcagggcaacuucaagaaccugcgggaguucguguucaagaacaucgacggcuacuucaagaucuacagcaagcacaccccaaucaaccuggugcgggaucugccccagggcuucucagcccuggagccccugguggaccugcccaucggcaucaacaucacccgguuccagacccugcuggcccugcaccggagcuaccugaccccaggcgacagcagcagcggguggacagcaggcgcggcugcuuacuacgugggcuaccugcagccccggaccuuccugcugaaguacaacgagaacggcaccaucaccgacgccguggacugcgcccuggacccucugagcgagaccaagugcacccugaagagcuucaccguggagaagggcaucuaccagaccagcaacuuccgggugcagcccaccgagagcaucgugcgguuccccaacaucaccaaccugugccccuucggcgagguguucaacgccacccgguucgccagcguguacgccuggaaccggaagcggaucagcaacugcguggccgacuacagcgugcuguacaacagcgccagcuucagcaccuucaagugcuacggcgugagccccaccaagcugaacgaccugugcuucaccaacguguacgccgacagcuucgugauccguggcgacgaggugcggcagaucgcacccggccagacaggcaagaucgccgacuacaacuacaagcugcccgacgacuucaccggcugcgugaucgccuggaacagcaacaaccucgacagcaaggugggcggcaacuacaacuaccuguaccggcuguuccggaagagcaaccugaagcccuucgagcgggacaucagcaccgagaucuaccaagccggcuccaccccuugcaacggcguggagggcuucaacugcuacuucccucugcagagcuacggcuuccagcccaccuacggcgugggcuaccagcccuaccgggugguggugcugagcuucgagcugcugcacgccccagccaccguguguggccccaagaagagcaccaaccuggugaagaacaagugcgugaacuucaacuucaacggccuuaccggcaccggcgugcugaccgagagcaacaagaaauuccugcccuuucagcaguucggccgggacaucgacgacaccaccgacgcugugcgggauccccagacccuggagauccuggacaucaccccuugcagcuucggcggcgugagcgugaucaccccaggcaccaacaccagcaaccagguggccgugcuguaccagggcgugaacugcaccgaggugcccguggccauccacgccgaccagcugacacccaccuggcgggucuacagcaccggcagcaacguguuccagacccgggccgguugccugaucggcgccgagcacgugaacaacagcuacgagugcgacauccccaucggcgccggcaucugugccagcuaccagacccagaccaauucacaccggagggcaaggagcguggccagccagagcaucaucgccuacaccaugagccugggcgccgagaacagcguggccuacagcaacaacagcaucgccauccccaucaacuucaccaucagcgugaccaccgagauucugcccgugagcaugaccaagaccagcguggacugcaccauguacaucugcggcgacagcaccgagugcagcaaccugcugcugcaguacggcagcuucugcacccagcugaaccgggcccugaccggcaucgccguggagcaggacaagaacacccaggagguguucgcccaggugaagcagaucuacaagaccccucccaucaaggacuucggcggcuucaacuucagccagauccugcccgaccccagcaagcccagcaagcggagcuucaucgaggaccugcuguucaacaaggugacccuagccgacgccggcuucaucaagcaguacggcgacugccucggcgacauagccgcccgggaccugaucugcgcccagaaguucaacggccugaccgugcugccuccccugcugaccgacgagaugaucgcccaguacaccagcgcccuguuagccggaaccaucaccagcggcuggacuuucggcgcuggagccgcucugcagauccccuucgccaugcagauggccuaccgguucaacggcaucggcgugacccagaacgugcuguacgagaaccagaagcugaucgccaaccaguucaacagcgccaucggcaagauccaggacagccugagcagcaccgcuagcgcccugggcaagcugcaggacguggugaaccagaacgcccaggcccugaacacccuggugaagcagcugagcagcaacuucggcgccaucagcagcgugcugaacgacauccuggcccggcuggacccucccgaggccgaggugcagaucgaccggcugaucacuggccggcugcagagccugcagaccuacgugacccagcagcugauccgggccgccgagauucgggccagcgccaaccuggccgccaccaagaugagcgagugcgugcugggccagagcaagcggguggacuucugcggcaagggcuaccaccugaugagcuuuccccagagcgcaccccacggagugguguuccugcacgugaccuacgugcccgcccaggagaagaacuucaccaccgccccagccaucugccacgacggcaaggcccacuuuccccgggagggcguguucgugagcaacggcacccacugguucgugacccagcggaacuucuacgagccccagaucaucaccacccacaacaccuucgugagcggcaacugcgacguggugaucggcaucgugaacaacaccguguacgauccccugcagcccgagcuggacagcuucaaggaggagcuggacaaguacuucaagaaucacaccagccccgacguggaccugggcgacaucagcggcaucaacgccagcguggugaacauccagaaggagaucgaucggcugaacgagguggccaagaaccugaacgagagccugaucgaccugcaggagcugggcaaguacgagcaguacaucaaguggcccugguacaucuggcugggcuucaucgccggccugaucgccaucgugauggugaccaucaugcugugcugcaugaccagcugcugcagcugccugaagggcuguugcagcugcggcagcugcugcaaguucgacgaggacgacagcgagcccgugcugaagggcgugaagcugcacuacaccugaugacucgagcugguacugcaugcacgcaaugcuagcugccccuuucccguccuggguaccccgagucucccccgaccucgggucccagguaugcucccaccuccaccugccccacucaccaccucugcuaguuccagacaccucccaagcacgcagcaaugcagcucaaaacgcuuagccuagccacacccccacgggaaacagcagugauuaaccuuuagcaauaaacgaaaguuuaacuaagcuauacuaaccccaggguuggucaauuucgugccagccacacccuggagcuagcaaaaaaaaaaaaaaaaaaaaaaaaaaaaaagcauaugacuaaaaaaaaaaaaaaaaaaaaaaaaaaaaaaaaaaaaaaaaaaaaaaaaaaaaaaaaaaaaaaaaaaaaaa

SEQ ID NO: 26866 - RNA, 4283 nt, Artificial Sequence
  SARS-CoV-2/Wuhan/WIV05/2019__EPI_ISL_402128 spike protein mRNA gc (1-1273)(K986P_V987P_K986P_V987P_K417N_E484K_N501Y_D614G)
agaauaaacuaguauucuucugguccccacagacucagagagaacccgccaccauguucguguuccuggugcugcugccccuggugagcagccagugcgugaaccugaccacccggacccagcugccaccagccuacaccaacagcuucacccggggcgucuacuaccccgacaagguguuccggagcagcguccugcacagcacccaggaccuguuccugcccuucuucagcaacgugaccugguuccacgccauccacgugagcggcaccaacggcaccaagcgguucgacaaccccgugcugcccuucaacgacggcguguacuucgccagcaccgagaagagcaacaucauccggggcuggaucuucggcaccacccuggacagcaagacccagagccugcugaucgugaauaacgccaccaacguggugaucaaggugugcgaguuccaguucugcaacgaccccuuccugggcguguacuaccacaagaacaacaagagcuggauggagagcgaguuccggguguacagcagcgccaacaacugcaccuucgaguacgugagccagcccuuccugauggaccuggagggcaagcagggcaacuucaagaaccugcgggaguucguguucaagaacaucgacggcuacuucaagaucuacagcaagcacaccccaaucaaccuggugcgggaucugccccagggcuucucagcccuggagccccugguggaccugcccaucggcaucaacaucacccgguuccagacccugcuggcccugcaccggagcuaccugaccccaggcgacagcagcagcggguggacagcaggcgcggcugcuuacuacgugggcuaccugcagccccggaccuuccugcugaaguacaacgagaacggcaccaucaccgacgccguggacugcgcccuggacccucugagcgagaccaagugcacccugaagagcuucaccguggagaagggcaucuaccagaccagcaacuuccgggugcagcccaccgagagcaucgugcgguuccccaacaucaccaaccugugccccuucggcgagguguucaacgccacccgguucgccagcguguacgccuggaaccggaagcggaucagcaacugcguggccgacuacagcgugcuguacaacagcgccagcuucagcaccuucaagugcuacggcgugagccccaccaagcugaacgaccugugcuucaccaacguguacgccgacagcuucgugauccguggcgacgaggugcggcagaucgcacccggccagacaggcaacaucgccgacuacaacuacaagcugcccgacgacuucaccggcugcgugaucgccuggaacagcaacaaccucgacagcaaggugggcggcaacuacaacuaccuguaccggcuguuccggaagagcaaccugaagcccuucgagcgggacaucagcaccgagaucuaccaagccggcuccaccccuugcaacggcgugaagggcuucaacugcuacuucccucugcagagcuacggcuuccagcccaccuacggcgugggcuaccagcccuaccgggugguggugcugagcuucgagcugcugcacgccccagccaccguguguggccccaagaagagcaccaaccuggugaagaacaagugcgugaacuucaacuucaacggccuuaccggcaccggcgugcugaccgagagcaacaagaaauuccugcccuuucagcaguucggccgggacaucgccgacaccaccgacgcugugcgggauccccagacccuggagauccuggacaucaccccuugcagcuucggcggcgugagcgugaucaccccaggcaccaacaccagcaaccagguggccgugcuguaccagggcgugaacugcaccgaggugcccguggccauccacgccgaccagcugacacccaccuggcgggucuacagcaccggcagcaacguguuccagacccgggccgguugccugaucggcgccgagcacgugaacaacagcuacgagugcgacauccccaucggcgccggcaucugugccagcuaccagacccagaccaauucaccccggagggcaaggagcguggccagccagagcaucaucgccuacaccaugagccugggcgccgagaacagcguggccuacagcaacaacagcaucgccauccccaccaacuucaccaucagcgugaccaccgagauucugcccgugagcaugaccaagaccagcguggacugcaccauguacaucugcggcgacagcaccgagugcagcaaccugcugcugcaguacggcagcuucugcacccagcugaaccgggcccugaccggcaucgccguggagcaggacaagaacacccaggagguguucgcccaggugaagcagaucuacaagaccccucccaucaaggacuucggcggcuucaacuucagccagauccugcccgaccccagcaagcccagcaagcggagcuucaucgaggaccugcuguucaacaaggugacccuagccgacgccggcuucaucaagcaguacggcgacugccucggcgacauagccgcccgggaccugaucugcgcccagaaguucaacggccugaccgugcugccuccccugcugaccgacgagaugaucgcccaguacaccagcgcccuguuagccggaaccaucaccagcggcuggacuuucggcgcuggagccgcucugcagauccccuucgccaugcagauggccuaccgguucaacggcaucggcgugacccagaacgugcuguacgagaaccagaagcugaucgccaaccaguucaacagcgccaucggcaagauccaggacagccugagcagcaccgcuagcgcccugggcaagcugcaggacguggugaaccagaacgcccaggcccugaacacccuggugaagcagcugagcagcaacuucggcgccaucagcagcgugcugaacgacauccugagccggcuggacccucccgaggccgaggugcagaucgaccggcugaucacuggccggcugcagagccugcagaccuacgugacccagcagcugauccgggccgccgagauucgggccagcgccaaccuggccgccaccaagaugagcgagugcgugcugggccagagcaagcggguggacuucugcggcaagggcuaccaccugaugagcuuuccccagagcgcaccccacggagugguguuccugcacgugaccuacgugcccgcccaggagaagaacuucaccaccgccccagccaucugccacgacggcaaggcccacuuuccccgggagggcguguucgugagcaacggcacccacugguucgugacccagcggaacuucuacgagccccagaucaucaccaccgacaacaccuucgugagcggcaacugcgacguggugaucggcaucgugaacaacaccguguacgauccccugcagcccgagcuggacagcuucaaggaggagcuggacaaguacuucaagaaucacaccagccccgacguggaccugggcgacaucagcggcaucaacgccagcguggugaacauccagaaggagaucgaucggcugaacgagguggccaagaaccugaacgagagccugaucgaccugcaggagcugggcaaguacgagcaguacaucaaguggcccugguacaucuggcugggcuucaucgccggccugaucgccaucgugauggugaccaucaugcugugcugcaugaccagcugcugcagcugccugaagggcuguugcagcugcggcagcugcugcaaguucgacgaggacgacagcgagcccgugcugaagggcgugaagcugcacuacaccugaugacucgagcugguacugcaugcacgcaaugcuagcugccccuuucccguccuggguaccccgagucucccccgaccucgggucccagguaugcucccaccuccaccugccccacucaccaccucugcuaguuccagacaccucccaagcacgcagcaaugcagcucaaaacgcuuagccuagccacacccccacgggaaacagcagugauuaaccuuuagcaauaaacgaaaguuuaacuaagcuauacuaaccccaggguuggucaauuucgugccagccacacccuggagcuagcaaaaaaaaaaaaaaaaaaaaaaaaaaaaaagcauaugacuaaaaaaaaaaaaaaaaaaaaaaaaaaaaaaaaaaaaaaaaaaaaaaaaaaaaaaaaaaaaaaaaaaaaaa

SEQ ID NO: 26867 - RNA, 4274 nt, Artificial Sequence
  SARS-CoV-2/Wuhan/WIV05/2019__EPI_ISL_402128 spike protein mRNA gc (1-1273)(K986P_V987P_K986P_V987P_L18F_D80A_D215G_L242del_A243del_ L244del_R246I_K417N_E484K_N501Y_D614G_A701V)
agaauaaacuaguauucuucugguccccacagacucagagagaacccgccaccauguucguguuccuggugcugcugccccuggugagcagccagugcgugaacuucaccacccggacccagcugccaccagccuacaccaacagcuucacccggggcgucuacuaccccgacaagguguuccggagcagcguccugcacagcacccaggaccuguuccugcccuucuucagcaacgugaccugguuccacgccauccacgugagcggcaccaacggcaccaagcgguucgccaaccccgugcugcccuucaacgacggcguguacuucgccagcaccgagaagagcaacaucauccggggcuggaucuucggcaccacccuggacagcaagacccagagccugcugaucgugaauaacgccaccaacguggugaucaaggugugcgaguuccaguucugcaacgaccccuuccugggcguguacuaccacaagaacaacaagagcuggauggagagcgaguuccggguguacagcagcgccaacaacugcaccuucgaguacgugagccagcccuuccugauggaccuggagggcaagcagggcaacuucaagaaccugcgggaguucguguucaagaacaucgacggcuacuucaagaucuacagcaagcacaccccaaucaaccuggugcggggccugccccagggcuucucagcccuggagccccugguggaccugcccaucggcaucaacaucacccgguuccagacccugcacaucagcuaccugaccccaggcgacagcagcagcggguggacagcaggcgcggcugcuuacuacgugggcuaccugcagccccggaccuuccugcugaaguacaacgagaacggcaccaucaccgacgccguggacugcgcccuggacccucugagcgagaccaagugcacccugaagagcuucaccguggagaagggcaucuaccagaccagcaacuuccgggugcagcccaccgagagcaucgugcgguuccccaacaucaccaaccugugccccuucggcgagguguucaacgccacccgguucgccagcguguacgccuggaaccggaagcggaucagcaacugcguggccgacuacagcgugcuguacaacagcgccagcuucagcaccuucaagugcuacggcgugagccccaccaagcugaacgaccugugcuucaccaacguguacgccgacagcuucgugauccguggcgacgaggugcggcagaucgcacccggccagacaggcaacaucgccgacuacaacuacaagcugcccgacgacuucaccggcugcgugaucgccuggaacagcaacaaccucgacagcaaggugggcggcaacuacaacuaccuguaccggcuguuccggaagagcaaccugaagcccuucgagcgggacaucagcaccgagaucuaccaagccggcuccaccccuugcaacggcgugaagggcuucaacugcuacuucccucugcagagcuacggcuuccagcccaccuacggcgugggcuaccagcccuaccgggugguggugcugagcuucgagcugcugcacgccccagccaccguguguggccccaagaagagcaccaaccuggugaagaacaagugcgugaacuucaacuucaacggccuuaccggcaccggcgugcugaccgagagcaacaagaaauuccugcccuuucagcaguucggccgggacaucgccgacaccaccgacgcugugcgggauccccagacccuggagauccuggacaucaccccuugcagcuucggcggcgugagcgugaucaccccaggcaccaacaccagcaaccagguggccgugcuguaccagggcgugaacugcaccgaggugcccguggccauccacgccgaccagcugacacccaccuggcgggucuacagcaccggcagcaacguguuccagacccgggccgguugccugaucggcgccgagcacgugaacaacagcuacgagugcgacauccccaucggcgccggcaucugugccagcuaccagacccagaccaauucaccccggagggcaaggagcguggccagccagagcaucaucgccuacaccaugagccugggcguggagaacagcguggccuacagcaacaacagcaucgccauccccaccaacuucaccaucagcgugaccaccgagauucugcccgugagcaugaccaagaccagcguggacugcaccauguacaucugcggcgacagcaccgagugcagcaaccugcugcugcaguacggcagcuucugcacccagcugaaccgggcccugaccggcaucgccguggagcaggacaagaacacccaggagguguucgcccaggugaagcagaucuacaagaccccucccaucaaggacuucggcggcuucaacuucagccagauccugcccgaccccagcaagcccagcaagcggagcuucaucgaggaccugcuguucaacaaggugacccuagccgacgccggcuucaucaagcaguacggcgacugccucggcgacauagccgcccgggaccugaucugcgcccagaaguucaacggccugaccgugcugccuccccugcugaccgacgagaugaucgcccaguacaccagcgcccuguuagccggaaccaucaccagcggcuggacuuucggcgcuggagccgcucugcagauccccuucgccaugcagauggccuaccgguucaacggcaucggcgugacccagaacgugcuguacgagaaccagaagcugaucgccaaccaguucaacagcgccaucggcaagauccaggacagccugagcagcaccgcuagcgcccugggcaagcugcaggacguggugaaccagaacgcccaggcccugaacacccuggugaagcagcugagcagcaacuucggcgccaucagcagcgugcugaacgacauccugagccggcuggacccucccgaggccgaggugcagaucgaccggcugaucacuggccggcugcagagccugcagaccuacgugacccagcagcugauccgggccgccgagauucgggccagcgccaaccuggccgccaccaagaugagcgagugcgugcugggccagagcaagcggguggacuucugcggcaagggcuaccaccugaugagcuuuccccagagcgcaccccacggagugguguuccugcacgugaccuacgugcccgcccaggagaagaacuucaccaccgccccagccaucugccacgacggcaaggcccacuuuccccgggagggcguguucgugagcaacggcacccacugguucgugacccagcggaacuucuacgagccccagaucaucaccaccgacaacaccuucgugagcggcaacugcgacguggugaucggcaucgugaacaacaccguguacgauccccugcagcccgagcuggacagcuucaaggaggagcuggacaaguacuucaagaaucacaccagccccgacguggaccugggcgacaucagcggcaucaacgccagcguggugaacauccagaaggagaucgaucggcugaacgagguggccaagaaccugaacgagagccugaucgaccugcaggagcugggcaaguacgagcaguacaucaaguggcccugguacaucuggcugggcuucaucgccggccugaucgccaucgugauggugaccaucaugcugugcugcaugaccagcugcugcagcugccugaagggcuguugcagcugcggcagcugcugcaaguucgacgaggacgacagcgagcccgugcugaagggcgugaagcugcacuacaccugaugacucgagcugguacugcaugcacgcaaugcuagcugccccuuucccguccuggguaccccgagucucccccgaccucgggucccagguaugcucccaccuccaccugccccacucaccaccucugcuaguuccagacaccucccaagcacgcagcaaugcagcucaaaacgcuuagccuagccacacccccacgggaaacagcagugauuaaccuuuagcaauaaacgaaaguuuaacuaagcuauacuaaccccaggguuggucaauuucgugccagccacacccuggagcuagcaaaaaaaaaaaaaaaaaaaaaaaaaaaaaagcauaugacuaaaaaaaaaaaaaaaaaaaaaaaaaaaaaaaaaaaaaaaaaaaaaaaaaaaaaaaaaaaaaaaaaaaaaa

SEQ ID NO: 26868 - RNA, 4283 nt, Artificial Sequence
  SARS-CoV-2/Wuhan/WIV05/2019__EPI_ISL_402128 spike protein mRNA gc (1-1273)(K986P_V987P_K986P_V987P_E484K_D614G)
agaauaaacuaguauucuucugguccccacagacucagagagaacccgccaccauguucguguuccuggugcugcugccccuggugagcagccagugcgugaaccugaccacccggacccagcugccaccagccuacaccaacagcuucacccggggcgucuacuaccccgacaagguguuccggagcagcguccugcacagcacccaggaccuguuccugcccuucuucagcaacgugaccugguuccacgccauccacgugagcggcaccaacggcaccaagcgguucgacaaccccgugcugcccuucaacgacggcguguacuucgccagcaccgagaagagcaacaucauccggggcuggaucuucggcaccacccuggacagcaagacccagagccugcugaucgugaauaacgccaccaacguggugaucaaggugugcgaguuccaguucugcaacgaccccuuccugggcguguacuaccacaagaacaacaagagcuggauggagagcgaguuccggguguacagcagcgccaacaacugcaccuucgaguacgugagccagcccuuccugauggaccuggagggcaagcagggcaacuucaagaaccugcgggaguucguguucaagaacaucgacggcuacuucaagaucuacagcaagcacaccccaaucaaccuggugcgggaucugccccagggcuucucagcccuggagccccugguggaccugcccaucggcaucaacaucacccgguuccagacccugcuggcccugcaccggagcuaccugaccccaggcgacagcagcagcggguggacagcaggcgcggcugcuuacuacgugggcuaccugcagccccggaccuuccugcugaaguacaacgagaacggcaccaucaccgacgccguggacugcgcccuggacccucugagcgagaccaagugcacccugaagagcuucaccguggagaagggcaucuaccagaccagcaacuuccgggugcagcccaccgagagcaucgugcgguuccccaacaucaccaaccugugccccuucggcgagguguucaacgccacccgguucgccagcguguacgccuggaaccggaagcggaucagcaacugcguggccgacuacagcgugcuguacaacagcgccagcuucagcaccuucaagugcuacggcgugagccccaccaagcugaacgaccugugcuucaccaacguguacgccgacagcuucgugauccguggcgacgaggugcggcagaucgcacccggccagacaggcaagaucgccgacuacaacuacaagcugcccgacgacuucaccggcugcgugaucgccuggaacagcaacaaccucgacagcaaggugggcggcaacuacaacuaccuguaccggcuguuccggaagagcaaccugaagcccuucgagcgggacaucagcaccgagaucuaccaagccggcuccaccccuugcaacggcgugaagggcuucaacugcuacuucccucugcagagcuacggcuuccagcccaccaacggcgugggcuaccagcccuaccgggugguggugcugagcuucgagcugcugcacgccccagccaccguguguggccccaagaagagcaccaaccuggugaagaacaagugcgugaacuucaacuucaacggccuuaccggcaccggcgugcugaccgagagcaacaagaaauuccugcccuuucagcaguucggccgggacaucgccgacaccaccgacgcugugcgggauccccagacccuggagauccuggacaucaccccuugcagcuucggcggcgugagcgugaucaccccaggcaccaacaccagcaaccagguggccgugcuguaccagggcgugaacugcaccgaggugcccguggccauccacgccgaccagcugacacccaccuggcgggucuacagcaccggcagcaacguguuccagacccgggccgguugccugaucggcgccgagcacgugaacaacagcuacgagugcgacauccccaucggcgccggcaucugugccagcuaccagacccagaccaauucaccccggagggcaaggagcguggccagccagagcaucaucgccuacaccaugagccugggcgccgagaacagcguggccuacagcaacaacagcaucgccauccccaccaacuucaccaucagcgugaccaccgagauucugcccgugagcaugaccaagaccagcguggacugcaccauguacaucugcggcgacagcaccgagugcagcaaccugcugcugcaguacggcagcuucugcacccagcugaaccgggcccugaccggcaucgccguggagcaggacaagaacacccaggagguguucgcccaggugaagcagaucuacaagaccccucccaucaaggacuucggcggcuucaacuucagccagauccugcccgaccccagcaagcccagcaagcggagcuucaucgaggaccugcuguucaacaaggugacccuagccgacgccggcuucaucaagcaguacggcgacugccucggcgacauagccgcccgggaccugaucugcgcccagaaguucaacggccugaccgugcugccuccccugcugaccgacgagaugaucgcccaguacaccagcgcccuguuagccggaaccaucaccagcggcuggacuuucggcgcuggagccgcucugcagauccccuucgccaugcagauggccuaccgguucaacggcaucggcgugacccagaacgugcuguacgagaaccagaagcugaucgccaaccaguucaacagcgccaucggcaagauccaggacagccugagcagcaccgcuagcgcccugggcaagcugcaggacguggugaaccagaacgcccaggcccugaacacccuggugaagcagcugagcagcaacuucggcgccaucagcagcgugcugaacgacauccugagccggcuggacccucccgaggccgaggugcagaucgaccggcugaucacuggccggcugcagagccugcagaccuacgugacccagcagcugauccgggccgccgagauucgggccagcgccaaccuggccgccaccaagaugagcgagugcgugcugggccagagcaagcggguggacuucugcggcaagggcuaccaccugaugagcuuuccccagagcgcaccccacggagugguguuccugcacgugaccuacgugcccgcccaggagaagaacuucaccaccgccccagccaucugccacgacggcaaggcccacuuuccccgggagggcguguucgugagcaacggcacccacugguucgugacccagcggaacuucuacgagccccagaucaucaccaccgacaacaccuucgugagcggcaacugcgacguggugaucggcaucgugaacaacaccguguacgauccccugcagcccgagcuggacagcuucaaggaggagcuggacaaguacuucaagaaucacaccagccccgacguggaccugggcgacaucagcggcaucaacgccagcguggugaacauccagaaggagaucgaucggcugaacgagguggccaagaaccugaacgagagccugaucgaccugcaggagcugggcaaguacgagcaguacaucaaguggcccugguacaucuggcugggcuucaucgccggccugaucgccaucgugauggugaccaucaugcugugcugcaugaccagcugcugcagcugccugaagggcuguugcagcugcggcagcugcugcaaguucgacgaggacgacagcgagcccgugcugaagggcgugaagcugcacuacaccugaugacucgagcugguacugcaugcacgcaaugcuagcugccccuuucccguccuggguaccccgagucucccccgaccucgggucccagguaugcucccaccuccaccugccccacucaccaccucugcuaguuccagacaccucccaagcacgcagcaaugcagcucaaaacgcuuagccuagccacacccccacgggaaacagcagugauuaaccuuuagcaauaaacgaaaguuuaacuaagcuauacuaaccccaggguuggucaauuucgugccagccacacccuggagcuagcaaaaaaaaaaaaaaaaaaaaaaaaaaaaaagcauaugacuaaaaaaaaaaaaaaaaaaaaaaaaaaaaaaaaaaaaaaaaaaaaaaaaaaaaaaaaaaaaaaaaaaaaaa

SEQ ID NO: 26869 - RNA, 4283 nt, Artificial Sequence
  SARS-CoV-2/Wuhan/WIV05/2019__EPI_ISL_402128 spike protein mRNA gc (1-1273)(K986P_V987P_K986P_V987P_L18F_T20N_P26S_D138Y_R190S_K417T _E484K_N501Y_D614G_H655Y_T1027I)
agaauaaacuaguauucuucugguccccacagacucagagagaacccgccaccauguucguguuccuggugcugcugccccuggugagcagccagugcgugaacuucaccaaccggacccagcugccaagcgccuacaccaacagcuucacccggggcgucuacuaccccgacaagguguuccggagcagcguccugcacagcacccaggaccuguuccugcccuucuucagcaacgugaccugguuccacgccauccacgugagcggcaccaacggcaccaagcgguucgacaaccccgugcugcccuucaacgacggcguguacuucgccagcaccgagaagagcaacaucauccggggcuggaucuucggcaccacccuggacagcaagacccagagccugcugaucgugaauaacgccaccaacguggugaucaaggugugcgaguuccaguucugcaacuaccccuuccugggcguguacuaccacaagaacaacaagagcuggauggagagcgaguuccggguguacagcagcgccaacaacugcaccuucgaguacgugagccagcccuuccugauggaccuggagggcaagcagggcaacuucaagaaccugagcgaguucguguucaagaacaucgacggcuacuucaagaucuacagcaagcacaccccaaucaaccuggugcgggaucugccccagggcuucucagcccuggagccccugguggaccugcccaucggcaucaacaucacccgguuccagacccugcuggcccugcaccggagcuaccugaccccaggcgacagcagcagcggguggacagcaggcgcggcugcuuacuacgugggcuaccugcagccccggaccuuccugcugaaguacaacgagaacggcaccaucaccgacgccguggacugcgcccuggacccucugagcgagaccaagugcacccugaagagcuucaccguggagaagggcaucuaccagaccagcaacuuccgggugcagcccaccgagagcaucgugcgguuccccaacaucaccaaccugugccccuucggcgagguguucaacgccacccgguucgccagcguguacgccuggaaccggaagcggaucagcaacugcguggccgacuacagcgugcuguacaacagcgccagcuucagcaccuucaagugcuacggcgugagccccaccaagcugaacgaccugugcuucaccaacguguacgccgacagcuucgugauccguggcgacgaggugcggcagaucgcacccggccagacaggcaccaucgccgacuacaacuacaagcugcccgacgacuucaccggcugcgugaucgccuggaacagcaacaaccucgacagcaaggugggcggcaacuacaacuaccuguaccggcuguuccggaagagcaaccugaagcccuucgagcgggacaucagcaccgagaucuaccaagccggcuccaccccuugcaacggcgugaagggcuucaacugcuacuucccucugcagagcuacggcuuccagcccaccuacggcgugggcuaccagcccuaccgggugguggugcugagcuucgagcugcugcacgccccagccaccguguguggccccaagaagagcaccaaccuggugaagaacaagugcgugaacuucaacuucaacggccuuaccggcaccggcgugcugaccgagagcaacaagaaauuccugcccuuucagcaguucggccgggacaucgccgacaccaccgacgcugugcgggauccccagacccuggagauccuggacaucaccccuugcagcuucggcggcgugagcgugaucaccccaggcaccaacaccagcaaccagguggccgugcuguaccagggcgugaacugcaccgaggugcccguggccauccacgccgaccagcugacacccaccuggcgggucuacagcaccggcagcaacguguuccagacccgggccgguugccugaucggcgccgaguacgugaacaacagcuacgagugcgacauccccaucggcgccggcaucugugccagcuaccagacccagaccaauucaccccggagggcaaggagcguggccagccagagcaucaucgccuacaccaugagccugggcgccgagaacagcguggccuacagcaacaacagcaucgccauccccaccaacuucaccaucagcgugaccaccgagauucugcccgugagcaugaccaagaccagcguggacugcaccauguacaucugcggcgacagcaccgagugcagcaaccugcugcugcaguacggcagcuucugcacccagcugaaccgggcccugaccggcaucgccguggagcaggacaagaacacccaggagguguucgcccaggugaagcagaucuacaagaccccucccaucaaggacuucggcggcuucaacuucagccagauccugcccgaccccagcaagcccagcaagcggagcuucaucgaggaccugcuguucaacaaggugacccuagccgacgccggcuucaucaagcaguacggcgacugccucggcgacauagccgcccgggaccugaucugcgcccagaaguucaacggccugaccgugcugccuccccugcugaccgacgagaugaucgcccaguacaccagcgcccuguuagccggaaccaucaccagcggcuggacuuucggcgcuggagccgcucugcagauccccuucgccaugcagauggccuaccgguucaacggcaucggcgugacccagaacgugcuguacgagaaccagaagcugaucgccaaccaguucaacagcgccaucggcaagauccaggacagccugagcagcaccgcuagcgcccugggcaagcugcaggacguggugaaccagaacgcccaggcccugaacacccuggugaagcagcugagcagcaacuucggcgccaucagcagcgugcugaacgacauccugagccggcuggacccucccgaggccgaggugcagaucgaccggcugaucacuggccggcugcagagccugcagaccuacgugacccagcagcugauccgggccgccgagauucgggccagcgccaaccuggccgccaucaagaugagcgagugcgugcugggccagagcaagcggguggacuucugcggcaagggcuaccaccugaugagcuuuccccagagcgcaccccacggagugguguuccugcacgugaccuacgugcccgcccaggagaagaacuucaccaccgccccagccaucugccacgacggcaaggcccacuuuccccgggagggcguguucgugagcaacggcacccacugguucgugacccagcggaacuucuacgagccccagaucaucaccaccgacaacaccuucgugagcggcaacugcgacguggugaucggcaucgugaacaacaccguguacgauccccugcagcccgagcuggacagcuucaaggaggagcuggacaaguacuucaagaaucacaccagccccgacguggaccugggcgacaucagcggcaucaacgccagcguggugaacauccagaaggagaucgaucggcugaacgagguggccaagaaccugaacgagagccugaucgaccugcaggagcugggcaaguacgagcaguacaucaaguggcccugguacaucuggcugggcuucaucgccggccugaucgccaucgugauggugaccaucaugcugugcugcaugaccagcugcugcagcugccugaagggcuguugcagcugcggcagcugcugcaaguucgacgaggacgacagcgagcccgugcugaagggcgugaagcugcacuacaccugaugacucgagcugguacugcaugcacgcaaugcuagcugccccuuucccguccuggguaccccgagucucccccgaccucgggucccagguaugcucccaccuccaccugccccacucaccaccucugcuaguuccagacaccucccaagcacgcagcaaugcagcucaaaacgcuuagccuagccacacccccacgggaaacagcagugauuaaccuuuagcaauaaacgaaaguuuaacuaagcuauacuaaccccaggguuggucaauuucgugccagccacacccuggagcuagcaaaaaaaaaaaaaaaaaaaaaaaaaaaaaagcauaugacuaaaaaaaaaaaaaaaaaaaaaaaaaaaaaaaaaaaaaaaaaaaaaaaaaaaaaaaaaaaaaaaaaaaaaa

SEQ ID NO: 26870 - RNA, 4283 nt, Artificial Sequence
  SARS-CoV-2/Wuhan/WIV05/2019__EPI_ISL_402128 spike protein mRNA gc (1-1273)(K986P_V987P_K986P_V987P_S13I_W152C_L452R_D614G)
agaauaaacuaguauucuucugguccccacagacucagagagaacccgccaccauguucguguuccuggugcugcugccccuggugagcauccagugcgugaaccugaccacccggacccagcugccaccagccuacaccaacagcuucacccggggcgucuacuaccccgacaagguguuccggagcagcguccugcacagcacccaggaccuguuccugcccuucuucagcaacgugaccugguuccacgccauccacgugagcggcaccaacggcaccaagcgguucgacaaccccgugcugcccuucaacgacggcguguacuucgccagcaccgagaagagcaacaucauccggggcuggaucuucggcaccacccuggacagcaagacccagagccugcugaucgugaauaacgccaccaacguggugaucaaggugugcgaguuccaguucugcaacgaccccuuccugggcguguacuaccacaagaacaacaagagcugcauggagagcgaguuccggguguacagcagcgccaacaacugcaccuucgaguacgugagccagcccuuccugauggaccuggagggcaagcagggcaacuucaagaaccugcgggaguucguguucaagaacaucgacggcuacuucaagaucuacagcaagcacaccccaaucaaccuggugcgggaucugccccagggcuucucagcccuggagccccugguggaccugcccaucggcaucaacaucacccgguuccagacccugcuggcccugcaccggagcuaccugaccccaggcgacagcagcagcggguggacagcaggcgcggcugcuuacuacgugggcuaccugcagccccggaccuuccugcugaaguacaacgagaacggcaccaucaccgacgccguggacugcgcccuggacccucugagcgagaccaagugcacccugaagagcuucaccguggagaagggcaucuaccagaccagcaacuuccgggugcagcccaccgagagcaucgugcgguuccccaacaucaccaaccugugccccuucggcgagguguucaacgccacccgguucgccagcguguacgccuggaaccggaagcggaucagcaacugcguggccgacuacagcgugcuguacaacagcgccagcuucagcaccuucaagugcuacggcgugagccccaccaagcugaacgaccugugcuucaccaacguguacgccgacagcuucgugauccguggcgacgaggugcggcagaucgcacccggccagacaggcaagaucgccgacuacaacuacaagcugcccgacgacuucaccggcugcgugaucgccuggaacagcaacaaccucgacagcaaggugggcggcaacuacaacuaccgcuaccggcuguuccggaagagcaaccugaagcccuucgagcgggacaucagcaccgagaucuaccaagccggcuccaccccuugcaacggcguggagggcuucaacugcuacuucccucugcagagcuacggcuuccagcccaccaacggcgugggcuaccagcccuaccgggugguggugcugagcuucgagcugcugcacgccccagccaccguguguggccccaagaagagcaccaaccuggugaagaacaagugcgugaacuucaacuucaacggccuuaccggcaccggcgugcugaccgagagcaacaagaaauuccugcccuuucagcaguucggccgggacaucgccgacaccaccgacgcugugcgggauccccagacccuggagauccuggacaucaccccuugcagcuucggcggcgugagcgugaucaccccaggcaccaacaccagcaaccagguggccgugcuguaccagggcgugaacugcaccgaggugcccguggccauccacgccgaccagcugacacccaccuggcgggucuacagcaccggcagcaacguguuccagacccgggccgguugccugaucggcgccgagcacgugaacaacagcuacgagugcgacauccccaucggcgccggcaucugugccagcuaccagacccagaccaauucaccccggagggcaaggagcguggccagccagagcaucaucgccuacaccaugagccugggcgccgagaacagcguggccuacagcaacaacagcaucgccauccccaccaacuucaccaucagcgugaccaccgagauucugcccgugagcaugaccaagaccagcguggacugcaccauguacaucugcggcgacagcaccgagugcagcaaccugcugcugcaguacggcagcuucugcacccagcugaaccgggcccugaccggcaucgccguggagcaggacaagaacacccaggagguguucgcccaggugaagcagaucuacaagaccccucccaucaaggacuucggcggcuucaacuucagccagauccugcccgaccccagcaagcccagcaagcggagcuucaucgaggaccugcuguucaacaaggugacccuagccgacgccggcuucaucaagcaguacggcgacugccucggcgacauagccgcccgggaccugaucugcgcccagaaguucaacggccugaccgugcugccuccccugcugaccgacgagaugaucgcccaguacaccagcgcccuguuagccggaaccaucaccagcggcuggacuuucggcgcuggagccgcucugcagauccccuucgccaugcagauggccuaccgguucaacggcaucggcgugacccagaacgugcuguacgagaaccagaagcugaucgccaaccaguucaacagcgccaucggcaagauccaggacagccugagcagcaccgcuagcgcccugggcaagcugcaggacguggugaaccagaacgcccaggcccugaacacccuggugaagcagcugagcagcaacuucggcgccaucagcagcgugcugaacgacauccugagccggcuggacccucccgaggccgaggugcagaucgaccggcugaucacuggccggcugcagagccugcagaccuacgugacccagcagcugauccgggccgccgagauucgggccagcgccaaccuggccgccaccaagaugagcgagugcgugcugggccagagcaagcggguggacuucugcggcaagggcuaccaccugaugagcuuuccccagagcgcaccccacggagugguguuccugcacgugaccuacgugcccgcccaggagaagaacuucaccaccgccccagccaucugccacgacggcaaggcccacuuuccccgggagggcguguucgugagcaacggcacccacugguucgugacccagcggaacuucuacgagccccagaucaucaccaccgacaacaccuucgugagcggcaacugcgacguggugaucggcaucgugaacaacaccguguacgauccccugcagcccgagcuggacagcuucaaggaggagcuggacaaguacuucaagaaucacaccagccccgacguggaccugggcgacaucagcggcaucaacgccagcguggugaacauccagaaggagaucgaucggcugaacgagguggccaagaaccugaacgagagccugaucgaccugcaggagcugggcaaguacgagcaguacaucaaguggcccugguacaucuggcugggcuucaucgccggccugaucgccaucgugauggugaccaucaugcugugcugcaugaccagcugcugcagcugccugaagggcuguugcagcugcggcagcugcugcaaguucgacgaggacgacagcgagcccgugcugaagggcgugaagcugcacuacaccugaugacucgagcugguacugcaugcacgcaaugcuagcugccccuuucccguccuggguaccccgagucucccccgaccucgggucccagguaugcucccaccuccaccugccccacucaccaccucugcuaguuccagacaccucccaagcacgcagcaaugcagcucaaaacgcuuagccuagccacacccccacgggaaacagcagugauuaaccuuuagcaauaaacgaaaguuuaacuaagcuauacuaaccccaggguuggucaauuucgugccagccacacccuggagcuagcaaaaaaaaaaaaaaaaaaaaaaaaaaaaaagcauaugacuaaaaaaaaaaaaaaaaaaaaaaaaaaaaaaaaaaaaaaaaaaaaaaaaaaaaaaaaaaaaaaaaaaaaaa

SEQ ID NO: 26871 - RNA, 4283 nt, Artificial Sequence
  SARS-CoV-2/Wuhan/WIV05/2019__EPI_ISL_402128 spike protein mRNA gc (1-1273)(K986P_V987P)
agaauaaacuaguauucuucugguccccacagacucagagagaacccgccaccauguucguguuccuggugcugcugccccuggugagcagccagugcgugaaccugaccacccggacccagcugcccccugccuacaccaacagcuucacccggggcguguacuaccccgacaagguguuccggagcagcgugcugcacagcacccaggaccuguuccugcccuucuucagcaacgugaccugguuccacgccauccacgugagcggcaccaacggcaccaagcgguucgacaacccagugcugcccuucaacgacggcguguacuucgccagcaccgagaagucaaacaucauccggggcuggaucuucggcaccacccuggacagcaagacacagagccugcugaucgugaacaacgccaccaacguggugaucaaggugugcgaguuucaguucugcaacgaccccuuccugggcguguacuaccacaagaacaacaagagcuggauggagagcgaguuccgggucuacagcagcgcuaacaauugcaccuucgaguacgugagccagcccuuccugauggaccucgagggcaagcagggcaacuucaagaaccugcgggaguucguguucaagaacaucgauggcuacuucaagaucuacagcaagcacacccccaucaaccuggugcgggaccugccccagggauucagcgcccuggagccucugguggaccugcccaucggcaucaacaucaccagguuccagacccugcuggcccugcaccggagcuaccugacccccggcgacagcagcagcggcuggaccgccggcgccgccgcauacuacgugggcuaccugcagccacggaccuuccugcugaaguacaacgagaacggcaccaucaccgacgccguggacugcgcccuggacccccugagcgagaccaagugcacccuaaagagcuucaccguggagaagggcaucuaccagaccagcaacuuccgggugcagcccacugagagcaucgugcgguuccccaacauuaccaaccugugucccuucggcgagguguucaacgccacccgguucgccagcguguacgccuggaaccggaagcggaucagcaacugcguggccgacuacagcgugcuguacaacagcgccagcuucagcaccuucaagugcuacggcgugagcccuaccaagcugaacgaccugugcuucaccaacguguacgcugacagcuucgugauccggggcgacgaggugcggcagaucgcccccggccagaccggcaagaucgccgacuacaacuacaagcugcccgacgacuucaccggcugcgugaucgccuggaacagcaacaaccuggacagcaaggugggcggcaacuacaacuaccuguaccggcuguuccguaagagcaaccugaagccauucgagcgggacaucagcaccgagaucuaccaggccggcagcacccccugcaacgguguggagggcuuuaacugcuacuucccccugcagagcuacggcuuccagcccaccaacggcgugggcuaccagcccuaccgggugguggugcugagcuucgagcugcugcacgcccccgccaccgugugcggcccuaaaaagagcaccaaccuggugaagaacaagugcgugaacuucaauuucaacggccugaccggcaccggcgugcugaccgagagcaacaagaaguuccugcccuuccagcaguucggccgggauaucgccgacaccaccgacgcagugcgggacccccagacccuggagauccuggacaucaccccaugcagcuucggcggcgugagcgucaucacccccggcacaaacaccagcaaccagguggccgugcuguaccaggacgugaacugcaccgaggugcccguggccauccacgccgaccagcugacccccaccuggcggguguacagcaccggaagcaacguguuccagacccgggccggcugccugaucggcgccgagcacgugaacaacuccuacgagugcgacauccccaucggcgcuggcaucugcgccagcuaccagacccagaccaacagcccccggcgggcccggagcguggccagccagagcaucaucgccuacaccaugagcuuaggcgccgagaacagcguggccuacagcaacaacagcaucgcgaucccuaccaacuucaccaucagcgugaccaccgagauacugcccgugagcaugaccaagaccagcguggacuguaccauguacaucugcggcgacagcaccgagugcagcaaccugcugcugcaguacggcagcuucugcacccagcugaaccgggcccugaccggcaucgccguggagcaggacaagaacacccaagagguguucgcccaggugaagcagaucuacaagacucccccaaucaaggacuucggcggcuucaacuucagccagauccugcccgaccccagcaagcccagcaagcggagcuucaucgaggaccugcuguucaacaaggugacccuggccgacgccggcuucaucaagcaguacggcgauugccugggcgacaucgccgcucgggaccugaucugcgcccagaaguucaacgggcugaccgugcugcccccucugcugaccgacgagaugaucgcccaguacaccagcgcccugcuugccggcaccaucaccagcggcuggaccuucggcgccggcgcagcccugcagauccccuucgccaugcagauggccuaccgguucaacggcaucggcgugacccagaacgugcuguacgagaaccagaagcugaucgccaaccaguucaacagcgccaucggcaagauccaggacagccugagcagcaccgccagcgcccugggcaagcugcaggacguggugaaccagaacgcucaggcccugaacacccuggugaagcagcugagcagcaacuucggcgccaucagcucagugcugaaugacauccugagcaggcuggaucccccagaggccgaggugcagaucgaccggcugaucaccggccggcugcagagccugcagaccuacgugacccagcagcugauccgggccgccgagauccgggccagcgccaaccuggcagccaccaagaugagcgagugcgugcugggccagagcaagcggguggacuuuugcggcaagggcuaccaccugaugagcuucccccagagcgcuccccacggcgugguguuccuccacgugacauacguccccgcccaggagaagaacuucaccaccgcccccgccauuugccacgacggcaaggcccacuucccccgggagggcguguucgugagcaacggaacccacugguucgugacccagcggaacuucuacgagccucagaucaucaccaccgacaacaccuucgugagcggcaacugcgacguggugaucggcaucgugaacaacaccguguacgacccccugcagcccgagcuggacagcuucaaggaggagcuggacaaguacuucaagaaccacaccagcccagacguggaccugggcgacaucagcggcaucaacgccagcguggugaacauccagaaggagaucgaccggcugaacgagguggccaagaaccugaacgagagccugaucgaccugcaggagcugggcaaguacgagcaguacaucaaguggcccugguacaucuggcugggcuucaucgccggccugaucgccaucgugauggugaccaucaugcugugcugcaugaccagcugcuguagcugccugaagggcugcugcagcugcggcagcugcugcaaguucgacgaggacgacagcgagcccgugcugaagggcgugaagcugcacuacaccugaugacucgagcugguacugcaugcacgcaaugcuagcugccccuuucccguccuggguaccccgagucucccccgaccucgggucccagguaugcucccaccuccaccugccccacucaccaccucugcuaguuccagacaccucccaagcacgcagcaaugcagcucaaaacgcuuagccuagccacacccccacgggaaacagcagugauuaaccuuuagcaauaaacgaaaguuuaacuaagcuauacuaaccccaggguuggucaauuucgugccagccacacccuggagcuagcaaaaaaaaaaaaaaaaaaaaaaaaaaaaaagcauaugacuaaaaaaaaaaaaaaaaaaaaaaaaaaaaaaaaaaaaaaaaaaaaaaaaaaaaaaaaaaaaaaaaaaaaaa

SEQ ID NO: 26872 - RNA, 4283 nt, Artificial Sequence
  SARS-CoV-2/Wuhan/WIV05/2019__EPI_ISL_402128 spike protein mRNA gc (1-1273)(K986P_V987P_ D614G)
agaauaaacuaguauucuucugguccccacagacucagagagaacccgccaccauguucguguuccuggugcugcugccccuggugagcagccagugcgugaaccugaccacccggacccagcugcccccugccuacaccaacagcuucacccggggcguguacuaccccgacaagguguuccggagcagcgugcugcacagcacccaggaccuguuccugcccuucuucagcaacgugaccugguuccacgccauccacgugagcggcaccaacggcaccaagcgguucgacaacccagugcugcccuucaacgacggcguguacuucgccagcaccgagaagucaaacaucauccggggcuggaucuucggcaccacccuggacagcaagacacagagccugcugaucgugaacaacgccaccaacguggugaucaaggugugcgaguuucaguucugcaacgaccccuuccugggcguguacuaccacaagaacaacaagagcuggauggagagcgaguuccgggucuacagcagcgcuaacaauugcaccuucgaguacgugagccagcccuuccugauggaccucgagggcaagcagggcaacuucaagaaccugcgggaguucguguucaagaacaucgauggcuacuucaagaucuacagcaagcacacccccaucaaccuggugcgggaccugccccagggauucagcgcccuggagccucugguggaccugcccaucggcaucaacaucaccagguuccagacccugcuggcccugcaccggagcuaccugacccccggcgacagcagcagcggcuggaccgccggcgccgccgcauacuacgugggcuaccugcagccacggaccuuccugcugaaguacaacgagaacggcaccaucaccgacgccguggacugcgcccuggacccccugagcgagaccaagugcacccuaaagagcuucaccguggagaagggcaucuaccagaccagcaacuuccgggugcagcccacugagagcaucgugcgguuccccaacauuaccaaccugugucccuucggcgagguguucaacgccacccgguucgccagcguguacgccuggaaccggaagcggaucagcaacugcguggccgacuacagcgugcuguacaacagcgccagcuucagcaccuucaagugcuacggcgugagcccuaccaagcugaacgaccugugcuucaccaacguguacgcugacagcuucgugauccggggcgacgaggugcggcagaucgcccccggccagaccggcaagaucgccgacuacaacuacaagcugcccgacgacuucaccggcugcgugaucgccuggaacagcaacaaccuggacagcaaggugggcggcaacuacaacuaccuguaccggcuguuccguaagagcaaccugaagccauucgagcgggacaucagcaccgagaucuaccaggccggcagcacccccugcaacgguguggagggcuuuaacugcuacuucccccugcagagcuacggcuuccagcccaccaacggcgugggcuaccagcccuaccgggugguggugcugagcuucgagcugcugcacgcccccgccaccgugugcggcccuaaaaagagcaccaaccuggugaagaacaagugcgugaacuucaauuucaacggccugaccggcaccggcgugcugaccgagagcaacaagaaguuccugcccuuccagcaguucggccgggauaucgccgacaccaccgacgcagugcgggacccccagacccuggagauccuggacaucaccccaugcagcuucggcggcgugagcgucaucacccccggcacaaacaccagcaaccagguggccgugcuguaccagggagugaacugcaccgaggugcccguggccauccacgccgaccagcugacccccaccuggcggguguacagcaccggcagcaacguguuccagacccgggccggcugccugaucggcgccgagcacgugaacaacuccuacgagugcgacauccccaucggcgcuggcaucugcgccagcuaccagacccagaccaacagcccccggcgggcccggagcguggccagccagagcaucaucgccuacaccaugagcuuaggcgccgagaacagcguggccuacagcaacaacagcaucgcgaucccuaccaacuucaccaucagcgugaccaccgagauacugcccgugagcaugaccaagaccagcguggacuguaccauguacaucugcggcgacagcaccgagugcagcaaccugcugcugcaguacggcagcuucugcacccagcugaaccgggcccugaccggcaucgccguggagcaggacaagaacacccaagagguguucgcccaggugaagcagaucuacaagacucccccaaucaaggacuucggcggcuucaacuucagccagauccugcccgaccccagcaagcccagcaagcggagcuucaucgaggaccugcuguucaacaaggugacccuggccgacgccggcuucaucaagcaguacggcgacugccugggggauaucgccgcucgggaccugaucugcgcccagaaguucaacggccugaccgugcugcccccucugcugaccgacgagaugaucgcccaguacaccagcgcccugcuugccggcaccaucaccagcggcuggaccuucggcgccggcgcagcccugcagauccccuucgccaugcagauggccuaccgguucaacggcaucggcgugacccagaacgugcuguacgagaaccagaagcugaucgccaaccaguucaacagcgccaucggcaagauccaggacagccugagcagcaccgccagcgcccugggcaagcugcaggacguggugaaccagaacgcucaggcccugaacacccuggugaagcagcugagcagcaacuucggcgccaucagcucagugcugaaugacauccugagcaggcuggaucccccagaggccgaggugcagaucgaccggcugaucaccggccggcugcagagccugcagaccuacgugacccagcagcugauccgggccgccgagauccgggccagcgccaaccuggcagccaccaagaugagcgagugcgugcugggccagagcaagcggguggacuuuugcggcaagggcuaccaccugaugagcuucccccagagcgcuccccacggcgugguguuccuccacgugacauacguccccgcccaggagaagaacuucaccaccgcccccgccauuugccacgacggcaaggcccacuucccccgggagggaguguucgugagcaacggcacccacugguucgugacccagcggaacuucuacgagccucagaucaucaccaccgacaacaccuucgugagcggcaacugcgacguggugaucggcaucgugaacaacaccguguacgacccccugcagcccgagcuggacagcuucaaggaggagcuggacaaguacuucaagaaccacaccagcccagacguggaccugggcgacaucagcggcaucaacgccagcguggugaacauccagaaggagaucgaccggcugaacgagguggccaagaaccugaacgagagccugaucgaccugcaggagcugggcaaguacgagcaguacaucaaguggcccugguacaucuggcugggcuucaucgccggccugaucgccaucgugauggugaccaucaugcugugcugcaugaccagcugcuguagcugccugaagggcugcugcagcugcggcagcugcugcaaguucgacgaggacgacagcgagcccgugcugaagggcgugaagcugcacuacaccugaugacucgagcugguacugcaugcacgcaaugcuagcugccccuuucccguccuggguaccccgagucucccccgaccucgggucccagguaugcucccaccuccaccugccccacucaccaccucugcuaguuccagacaccucccaagcacgcagcaaugcagcucaaaacgcuuagccuagccacacccccacgggaaacagcagugauuaaccuuuagcaauaaacgaaaguuuaacuaagcuauacuaaccccaggguuggucaauuucgugccagccacacccuggagcuagcaaaaaaaaaaaaaaaaaaaaaaaaaaaaaagcauaugacuaaaaaaaaaaaaaaaaaaaaaaaaaaaaaaaaaaaaaaaaaaaaaaaaaaaaaaaaaaaaaaaaaaaaaa

SEQ ID NO: 26873 - RNA, 4283 nt, Artificial Sequence
  SARS-CoV-2/Wuhan/WIV05/2019__EPI_ISL_402128 spike protein mRNA gc (1-1273)(K986P_V987P_A222V_D614G)
agaauaaacuaguauucuucugguccccacagacucagagagaacccgccaccauguucguguuccuggugcugcugccccuggugagcagccagugcgugaaccugaccacccggacccagcugcccccugccuacaccaacagcuucacccggggcguguacuaccccgacaagguguuccggagcagcgugcugcacagcacccaggaccuguuccugcccuucuucagcaacgugaccugguuccacgccauccacgugagcggcaccaacggcaccaagcgguucgacaacccagugcugcccuucaacgacggcguguacuucgccagcaccgagaagucaaacaucauccggggcuggaucuucggcaccacccuggacagcaagacacagagccugcugaucgugaacaacgccaccaacguggugaucaaggugugcgaguuucaguucugcaacgaccccuuccugggcguguacuaccacaagaacaacaagagcuggauggagagcgaguuccgggucuacagcagcgcuaacaauugcaccuucgaguacgugagccagcccuuccugauggaccucgagggcaagcagggcaacuucaagaaccugcgggaguucguguucaagaacaucgauggcuacuucaagaucuacagcaagcacacccccaucaaccuggugcgggaccugccccagggauucagcgugcuggagccucugguggaccugcccaucggcaucaacaucaccagguuccagacccugcuggcccugcaccggagcuaccugacccccggcgacagcagcagcggcuggaccgccggcgccgccgccuacuacgugggcuaccugcagccacggaccuuccugcugaaguacaacgagaacggcaccaucaccgacgcaguggacugcgcccuggacccccugagcgagaccaagugcacccuaaagagcuucaccguggagaagggcaucuaccagaccagcaacuuccgggugcagcccacugagagcaucgugcgguuccccaacauuaccaaccugugucccuucggcgagguguucaacgccacccgguucgccagcguguacgccuggaaccggaagcggaucagcaacugcguggccgacuacagcgugcuguacaacagcgccagcuucagcaccuucaagugcuacggcgugagcccuaccaagcugaacgaccugugcuucaccaacguguacgccgacagcuucgugauccggggcgacgaggugcggcagaucgcucccggccagaccggcaagaucgccgacuacaacuacaagcugcccgacgacuucaccggcugcgugaucgccuggaacagcaacaaccuggacagcaaggugggcggcaacuacaacuaccuguaccggcuguuccguaagagcaaccugaagccauucgagcgggacaucagcaccgagaucuaccaggccggcagcacccccugcaacgguguggagggcuuuaacugcuacuucccccugcagagcuacggcuuccagcccaccaacggcgugggcuaccagcccuaccgggugguggugcugagcuucgagcugcugcacgcccccgccaccgugugcggcccuaaaaagagcaccaaccuggugaagaacaagugcgugaacuucaauuucaacggccugaccggcaccggcgugcugaccgagagcaacaagaaguuccugcccuuccagcaguucggccgggauaucgccgacaccaccgacgccgugcgggacccccagacccuggagauccuggacaucaccccaugcagcuucggcggcgucagcgugaucacccccggcacaaacaccagcaaccagguggcagugcuguaccagggagugaacugcaccgaggugcccguggccauccacgccgaccagcugacccccaccuggcggguguacagcaccggcagcaacguguuccagacccgggccggcugccugaucggcgccgagcacgugaacaacuccuacgagugcgacauccccaucggcgccggcaucugcgcuagcuaccagacccagaccaacagcccccggcgggcccggagcguggccagccagagcaucaucgccuacaccaugagcuuaggcgccgagaacagcguggccuacagcaacaacagcaucgccaucccuaccaacuucaccaucagcgugaccaccgagauacugcccgugagcaugaccaagaccagcguggacuguaccauguacaucugcggcgacagcaccgagugcagcaaccugcugcugcaguacggcagcuucugcacccagcugaaccgggcgcugaccggcaucgccguggagcaggacaagaacacccaagagguguucgcccaggugaagcagaucuacaagacucccccaaucaaggacuucggcggcuucaacuucagccagauccugcccgaccccagcaagcccagcaagcggagcuucaucgaggaccugcuguucaacaaggugacccuggccgacgccggcuucaucaagcaguacggcgacugccugggggauaucgccgcccgggaccugaucugcgcucagaaguucaacggccugaccgugcugcccccucugcugaccgacgagaugaucgcccaguacaccagcgcccugcuugccggcaccaucaccagcggcuggaccuucggcgccggcgccgcacugcagauccccuucgccaugcagauggccuaccgguucaacggcaucggcgugacccagaacgugcuguacgagaaccagaagcugaucgccaaccaguucaacagcgccaucggcaagauccaggacagccugagcagcaccgccagcgcccugggcaagcugcaggacguggugaaccagaacgcccaggcucugaacacccuggugaagcagcugagcagcaacuucggcgccaucagcucagugcugaaugacauccugagcaggcuggaucccccagaggccgaggugcagaucgaccggcugaucaccggccggcugcagagccugcagaccuacgugacccagcagcugauccgggccgccgagauccgggccagcgccaaccuggccgcaaccaagaugagcgagugcgugcugggccagagcaagcggguggacuuuugcggcaagggcuaccaccugaugagcuucccccagagcgcuccccacggcgugguguuccuccacgucacauacgugcccgcccaggagaagaacuucaccaccgcccccgccauuugccacgacggcaaggcccacuucccccgggagggaguguucgugagcaacggcacccacugguucgugacccagcggaacuucuacgagccucagaucaucaccaccgacaacaccuucgugagcggcaacugcgacguggugaucggcaucgugaacaacaccguguacgacccccugcagcccgagcuggacagcuucaaggaggagcuggacaaguacuucaagaaccacaccagcccagacguggaccugggcgacaucagcggcaucaacgccagcguggugaacauccagaaggagaucgaccggcugaacgagguggccaagaaccugaacgagagccugaucgaccugcaggagcugggcaaguacgagcaguacaucaaguggcccugguacaucuggcugggcuucaucgccggccugaucgccaucgugauggugaccaucaugcugugcugcaugaccagcugcuguagcugccugaagggcugcugcagcugcggcagcugcugcaaguucgacgaggacgacagcgagcccgugcugaagggcgugaagcugcacuacaccugaugacucgagcugguacugcaugcacgcaaugcuagcugccccuuucccguccuggguaccccgagucucccccgaccucgggucccagguaugcucccaccuccaccugccccacucaccaccucugcuaguuccagacaccucccaagcacgcagcaaugcagcucaaaacgcuuagccuagccacacccccacgggaaacagcagugauuaaccuuuagcaauaaacgaaaguuuaacuaagcuauacuaaccccaggguuggucaauuucgugccagccacacccuggagcuagcaaaaaaaaaaaaaaaaaaaaaaaaaaaaaagcauaugacuaaaaaaaaaaaaaaaaaaaaaaaaaaaaaaaaaaaaaaaaaaaaaaaaaaaaaaaaaaaaaaaaaaaaaa

SEQ ID NO: 26874 - RNA, 4283 nt, Artificial Sequence
  SARS-CoV-2/Wuhan/WIV05/2019__EPI_ISL_402128 spike protein mRNA gc (1-1273)(K986P_V987P_N439K_D614G)
agaauaaacuaguauucuucugguccccacagacucagagagaacccgccaccauguucguguuccuggugcugcugccccuggugagcagccagugcgugaaccugaccacccggacccagcugcccccugccuacaccaacagcuucacccggggcguguacuaccccgacaagguguuccggagcagcgugcugcacagcacccaggaccuguuccugcccuucuucagcaacgugaccugguuccacgccauccacgugagcggcaccaacggcaccaagcgguucgacaacccagugcugcccuucaacgacggcguguacuucgccagcaccgagaagucaaacaucauccggggcuggaucuucggcaccacccuggacagcaagacacagagccugcugaucgugaacaacgccaccaacguggugaucaaggugugcgaguuucaguucugcaacgaccccuuccugggcguguacuaccacaagaacaacaagagcuggauggagagcgaguuccgggucuacagcagcgcuaacaauugcaccuucgaguacgugagccagcccuuccugauggaccucgagggcaagcagggcaacuucaagaaccugcgggaguucguguucaagaacaucgauggcuacuucaagaucuacagcaagcacacccccaucaaccuggugcgggaccugccccagggauucagcgcccuggagccucugguggaccugcccaucggcaucaacaucaccagguuccagacccugcuggcccugcaccggagcuaccugacccccggcgacagcagcagcggcuggaccgccggcgccgccgcauacuacgugggcuaccugcagccacggaccuuccugcugaaguacaacgagaacggcaccaucaccgacgccguggacugcgcccuggacccccugagcgagaccaagugcacccuaaagagcuucaccguggagaagggcaucuaccagaccagcaacuuccgggugcagcccacugagagcaucgugcgguuccccaacauuaccaaccugugucccuucggcgagguguucaacgccacccgguucgccagcguguacgccuggaaccggaagcggaucagcaacugcguggccgacuacagcgugcuguacaacagcgccagcuucagcaccuucaagugcuacggcgugagcccuaccaagcugaacgaccugugcuucaccaacguguacgcugacagcuucgugauccggggcgacgaggugcggcagaucgcccccggccagaccggcaagaucgccgacuacaacuacaagcugcccgacgacuucaccggcugcgugaucgccuggaacagcaagaaccuggacagcaaggugggcggcaacuacaacuaccuguaccggcuguuccguaagagcaaccugaagccauucgagcgggacaucagcaccgagaucuaccaggccggcagcacccccugcaacgguguggagggcuuuaacugcuacuucccccugcagagcuacggcuuccagcccaccaacggcgugggcuaccagcccuaccgggugguggugcugagcuucgagcugcugcacgcccccgccaccgugugcggcccuaaaaagagcaccaaccuggugaagaacaagugcgugaacuucaacuucaauggccugaccggcaccggcgugcugaccgagagcaacaagaaguuccugcccuuccagcaguucggccgggauaucgccgacaccaccgacgcagugcgggacccccagacccuggagauccuggacaucaccccaugcagcuucggcggcgugagcgucaucacccccggcacaaacaccagcaaccagguggccgugcuguaccagggagugaacugcaccgaggugcccguggccauccacgccgaccagcugacccccaccuggcggguguacagcaccggcagcaacguguuccagacccgggccggcugccugaucggcgccgagcacgugaacaacuccuacgagugcgacauccccaucggcgcuggcaucugcgccagcuaccagacccagaccaacagcccccggcgggcccggagcguggccagccagagcaucaucgccuacaccaugagcuuaggcgccgagaacagcguggccuacagcaacaacagcaucgcgaucccuaccaacuucaccaucagcgugaccaccgagauacugcccgugagcaugaccaagaccagcguggacuguaccauguacaucugcggcgacagcaccgagugcagcaaccugcugcugcaguacggcagcuucugcacccagcugaaccgggcccugaccggcaucgccguggagcaggacaagaacacccaagagguguucgcccaggugaagcagaucuacaagacucccccaaucaaggacuucggcggcuucaacuucagccagauccugcccgaccccagcaagcccagcaagcggagcuucaucgaggaccugcuguucaacaaggugacccuggccgacgccggcuucaucaagcaguacggcgacugccugggggauaucgccgcucgggaccugaucugcgcccagaaguucaacggccugaccgugcugcccccucugcugaccgacgagaugaucgcccaguacaccagcgcccugcuugccggcaccaucaccagcggcuggaccuucggcgccggcgcagcccugcagauccccuucgccaugcagauggccuaccgguucaacggcaucggcgugacccagaacgugcuguacgagaaccagaagcugaucgccaaccaguucaacagcgccaucggcaagauccaggacagccugagcagcaccgccagcgcccugggcaagcugcaggacguggugaaccagaacgcucaggcccugaacacccuggugaagcagcugagcagcaacuucggcgccaucagcucagugcugaacgacauccugagcaggcuggaucccccagaggccgaggugcagaucgaccggcugaucaccggccggcugcagagccugcagaccuacgugacccagcagcugauccgggccgccgagauccgggccagcgccaaucuggcagccaccaagaugagcgagugcgugcugggccagagcaagcggguggacuuuugcggcaagggcuaccaccugaugagcuucccccagagcgcuccccacggcgugguguuccuccacgugacauacguccccgcccaggagaagaacuucaccaccgcccccgccauuugccacgacggcaaggcccacuucccccgggagggaguguucgugagcaacggcacccacugguucgugacccagcggaacuucuacgagccucagaucaucaccaccgacaacaccuucgugagcggcaacugcgacguggugaucggcaucgugaacaacaccguguacgacccccugcagcccgagcuggacagcuucaaggaggagcuggacaaguacuucaagaaccacaccagcccagacguggaccugggcgacaucagcggcaucaacgccagcguggugaacauccagaaggagaucgaccggcugaacgagguggccaagaaccugaacgagagccugaucgaccugcaggagcugggcaaguacgagcaguacaucaaguggcccugguacaucuggcugggcuucaucgccggccugaucgccaucgugauggugaccaucaugcugugcugcaugaccagcugcuguagcugccugaagggcugcugcagcugcggcagcugcugcaaguucgacgaggacgacagcgagcccgugcugaagggcgugaagcugcacuacaccugaugacucgagcugguacugcaugcacgcaaugcuagcugccccuuucccguccuggguaccccgagucucccccgaccucgggucccagguaugcucccaccuccaccugccccacucaccaccucugcuaguuccagacaccucccaagcacgcagcaaugcagcucaaaacgcuuagccuagccacacccccacgggaaacagcagugauuaaccuuuagcaauaaacgaaaguuuaacuaagcuauacuaaccccaggguuggucaauuucgugccagccacacccuggagcuagcaaaaaaaaaaaaaaaaaaaaaaaaaaaaaagcauaugacuaaaaaaaaaaaaaaaaaaaaaaaaaaaaaaaaaaaaaaaaaaaaaaaaaaaaaaaaaaaaaaaaaaaaaa

SEQ ID NO: 26875 - RNA, 4283 nt, Artificial Sequence
  SARS-CoV-2/Wuhan/WIV05/2019__EPI_ISL_402128 spike protein mRNA gc (1-1273)(K986P_V987P_S477N_D614G)
agaauaaacuaguauucuucugguccccacagacucagagagaacccgccaccauguucguguuccuggugcugcugccccuggugagcagccagugcgugaaccugaccacccggacccagcugcccccugccuacaccaacagcuucacccggggcguguacuaccccgacaagguguuccggagcagcgugcugcacagcacccaggaccuguuccugcccuucuucagcaacgugaccugguuccacgccauccacgugagcggcaccaacggcaccaagcgguucgacaacccagugcugcccuucaacgacggcguguacuucgccagcaccgagaagucaaacaucauccggggcuggaucuucggcaccacccuggacagcaagacacagagccugcugaucgugaacaacgccaccaacguggugaucaaggugugcgaguuucaguucugcaacgaccccuuccugggcguguacuaccacaagaacaacaagagcuggauggagagcgaguuccgggucuacagcagcgcuaacaauugcaccuucgaguacgugagccagcccuuccugauggaccucgagggcaagcagggcaacuucaagaaccugcgggaguucguguucaagaacaucgauggcuacuucaagaucuacagcaagcacacccccaucaaccuggugcgggaccugccccagggauucagcgcccuggagccucugguggaccugcccaucggcaucaacaucaccagguuccagacccugcuggcccugcaccggagcuaccugacccccggcgacagcagcagcggcuggaccgccggcgccgccgcauacuacgugggcuaccugcagccacggaccuuccugcugaaguacaacgagaacggcaccaucaccgacgccguggacugcgcccuggacccccugagcgagaccaagugcacccuaaagagcuucaccguggagaagggcaucuaccagaccagcaacuuccgggugcagcccacugagagcaucgugcgguuccccaacauuaccaaccugugucccuucggcgagguguucaacgccacccgguucgccagcguguacgccuggaaccggaagcggaucagcaacugcguggccgacuacagcgugcuguacaacagcgccagcuucagcaccuucaagugcuacggcgugagcccuaccaagcugaacgaccugugcuucaccaacguguacgcugacagcuucgugauccggggcgacgaggugcggcagaucgcccccggccagaccggcaagaucgccgacuacaacuacaagcugcccgacgacuucaccggcugcgugaucgccuggaacagcaacaaccuggacagcaaggugggcggcaacuacaacuaccuguaccggcuguuccguaagagcaaccugaagccauucgagcgggacaucagcaccgagaucuaccaggccggcaacacccccugcaacgguguggagggcuuuaacugcuacuucccccugcagagcuacggcuuccagcccaccaacggcgugggcuaccagcccuaccgggugguggugcugagcuucgagcugcugcacgcccccgccaccgugugcggcccuaaaaagagcaccaaccuggugaagaacaagugcgugaauuucaacuucaacggccugaccggcaccggcgugcugaccgagagcaacaagaaguuccugcccuuccagcaguucggccgggauaucgccgacaccaccgacgcagugcgggacccccagacccuggagauccuggacaucaccccaugcagcuucggcggcgugagcgucaucacccccggcacaaacaccagcaaccagguggccgugcuguaccagggagugaacugcaccgaggugcccguggccauccacgccgaccagcugacccccaccuggcggguguacagcaccggcagcaacguguuccagacccgggccggcugccugaucggcgccgagcacgugaacaacagcuacgagugcgacauccccaucggcgcuggcaucugcgccuccuaccagacccagaccaacagcccccggcgggcccggagcguggccagccagagcaucaucgccuacaccaugagcuuaggcgccgagaacagcguggccuacagcaacaacagcaucgcgaucccuaccaacuucaccaucagcgugaccaccgagauacugcccgugagcaugaccaagaccagcguggacuguaccauguacaucugcggcgacagcaccgagugcagcaaccugcugcugcaguacggcagcuucugcacccagcugaaccgggcccugaccggcaucgccguggagcaggacaagaacacccaagagguguucgcccaggugaagcagaucuacaagacucccccaaucaaggacuucggcggcuucaacuucagccagauccugcccgaccccagcaagcccagcaagcggagcuucaucgaggaccugcuguucaacaaggugacccuggccgacgccggcuucaucaagcaguacggcgacugccugggggauaucgccgcucgggaccugaucugcgcccagaaguucaacggccugaccgugcugcccccucugcugaccgacgagaugaucgcccaguacaccagcgcccugcuugccggcaccaucaccagcggcuggaccuucggcgccggcgcagcccugcagauccccuucgccaugcagauggccuaccgguucaacggcaucggcgugacccagaacgugcuguacgagaaccagaagcugaucgccaaccaguucaacagcgccaucggcaagauccaggacagccugagcagcaccgccagcgcccugggcaagcugcaggacguggugaaccagaacgcucaggcccugaacacccuggugaagcagcugagcagcaauuucggcgccaucagcagcgugcugaacgacauccugucaaggcuggaucccccagaggccgaggugcagaucgaccggcugaucaccggccggcugcagagccugcagaccuacgugacccagcagcugauccgggccgccgagauccgggccagcgccaaccuggcagccaccaagaugagcgagugcgugcugggccagagcaagcggguggacuuuugcggcaagggcuaccaccugaugagcuucccccagagcgcuccccacggcgugguguuccuccacgugacauacguccccgcccaggagaagaacuucaccaccgcccccgccauuugccacgacggcaaggcccacuucccccgggagggaguguucgugagcaacggcacccacugguucgugacccagcggaacuucuacgagccucagaucaucaccaccgacaacaccuucgugagcggcaacugcgacguggugaucggcaucgugaacaacaccguguacgacccccugcagcccgagcuggacagcuucaaggaggagcuggacaaguacuucaagaaccacaccagcccagacguggaccugggcgacaucagcggcaucaacgccagcguggugaacauccagaaggagaucgaccggcugaacgagguggccaagaaccugaacgagagccugaucgaccugcaggagcugggcaaguacgagcaguacaucaaguggcccugguacaucuggcugggcuucaucgccggccugaucgccaucgugauggugaccaucaugcugugcugcaugaccagcugcuguagcugccugaagggcugcugcagcugcggcagcugcugcaaguucgacgaggacgacagcgagcccgugcugaagggcgugaagcugcacuacaccugaugacucgagcugguacugcaugcacgcaaugcuagcugccccuuucccguccuggguaccccgagucucccccgaccucgggucccagguaugcucccaccuccaccugccccacucaccaccucugcuaguuccagacaccucccaagcacgcagcaaugcagcucaaaacgcuuagccuagccacacccccacgggaaacagcagugauuaaccuuuagcaauaaacgaaaguuuaacuaagcuauacuaaccccaggguuggucaauuucgugccagccacacccuggagcuagcaaaaaaaaaaaaaaaaaaaaaaaaaaaaaagcauaugacuaaaaaaaaaaaaaaaaaaaaaaaaaaaaaaaaaaaaaaaaaaaaaaaaaaaaaaaaaaaaaaaaaaaaaa

SEQ ID NO: 26876 - RNA, 4283 nt, Artificial Sequence
  SARS-CoV-2/Wuhan/WIV05/2019__EPI_ISL_402128 spike protein mRNA gc (1-1273)(K986P_V987P_N501Y_D614G)
agaauaaacuaguauucuucugguccccacagacucagagagaacccgccaccauguucguguuccuggugcugcugccccuggugagcagccagugcgugaaccugaccacccggacccagcugcccccugccuacaccaacagcuucacccggggcguguacuaccccgacaagguguuccggagcagcgugcugcacagcacccaggaccuguuccugcccuucuucagcaacgugaccugguuccacgccauccacgugagcggcaccaacggcaccaagcgguucgacaacccagugcugcccuucaacgacggcguguacuucgccagcaccgagaagucaaacaucauccggggcuggaucuucggcaccacccuggacagcaagacacagagccugcugaucgugaacaacgccaccaacguggugaucaaggugugcgaguuucaguucugcaacgaccccuuccugggcguguacuaccacaagaacaacaagagcuggauggagagcgaguuccgggucuacagcagcgcuaacaauugcaccuucgaguacgugagccagcccuuccugauggaccucgagggcaagcagggcaacuucaagaaccugcgggaguucguguucaagaacaucgauggcuacuucaagaucuacagcaagcacacccccaucaaccuggugcgggaccugccccagggauucagcgcccuggagccucugguggaccugcccaucggcaucaacaucaccagguuccagacccugcuggcccugcaccggagcuaccugacccccggcgacagcagcagcggcuggaccgccggcgccgccgcauacuacgugggcuaccugcagccacggaccuuccugcugaaguacaacgagaacggcaccaucaccgacgccguggacugcgcccuggacccccugagcgagaccaagugcacccuaaagagcuucaccguggagaagggcaucuaccagaccagcaacuuccgggugcagcccacugagagcaucgugcgguuccccaacauuaccaaccugugucccuucggcgagguguucaacgccacccgguucgccagcguguacgccuggaaccggaagcggaucagcaacugcguggccgacuacagcgugcuguacaacagcgccagcuucagcaccuucaagugcuacggcgugagcccuaccaagcugaacgaccugugcuucaccaacguguacgcugacagcuucgugauccggggcgacgaggugcggcagaucgcccccggccagaccggcaagaucgccgacuacaacuacaagcugcccgacgacuucaccggcugcgugaucgccuggaacagcaacaaccuggacagcaaggugggcggcaacuacaacuaccuguaccggcuguuccguaagagcaaccugaagccauucgagcgggacaucagcaccgagaucuaccaggccggcagcacccccugcaacgguguggagggcuuuaacugcuacuucccccugcagagcuacggcuuccagcccaccuacggcgugggcuaccagcccuaccgggugguggugcugagcuucgagcugcugcacgcccccgccaccgugugcggcccuaaaaagagcaccaaccuggugaagaacaagugcgugaacuucaacuucaauggccugaccggcaccggcgugcugaccgagagcaacaagaaguuccugcccuuccagcaguucggccgggauaucgccgacaccaccgacgcagugcgggacccccagacccuggagauccuggacaucaccccaugcagcuucggcggcgugagcgucaucacccccggcacaaacaccagcaaccagguggccgugcuguaccagggagugaacugcaccgaggugcccguggccauccacgccgaccagcugacccccaccuggcggguguacagcaccggcagcaacguguuccagacccgggccggcugccugaucggcgccgagcacgugaacaacuccuacgagugcgacauccccaucggcgcuggcaucugcgccagcuaccagacccagaccaacagcccccggcgggcccggagcguggccagccagagcaucaucgccuacaccaugagcuuaggcgccgagaacagcguggccuacagcaacaacagcaucgcgaucccuaccaacuucaccaucagcgugaccaccgagauacugcccgugagcaugaccaagaccagcguggacuguaccauguacaucugcggcgacagcaccgagugcagcaaccugcugcugcaguacggcagcuucugcacccagcugaaccgggcccugaccggcaucgccguggagcaggacaagaacacccaagagguguucgcccaggugaagcagaucuacaagacucccccaaucaaggacuucggcggcuucaacuucagccagauccugcccgaccccagcaagcccagcaagcggagcuucaucgaggaccugcuguucaacaaggugacccuggccgacgccggcuucaucaagcaguacggcgacugccugggggauaucgccgcucgggaccugaucugcgcccagaaguucaacggccugaccgugcugcccccucugcugaccgacgagaugaucgcccaguacaccagcgcccugcuugccggcaccaucaccagcggcuggaccuucggcgccggcgcagcccugcagauccccuucgccaugcagauggccuaccgguucaacggcaucggcgugacccagaacgugcuguacgagaaccagaagcugaucgccaaccaguucaacagcgccaucggcaagauccaggacagccugagcagcaccgccagcgcccugggcaagcugcaggacguggugaaccagaacgcucaggcccugaacacccuggugaagcagcugagcagcaacuucggcgccaucagcucagugcugaacgacauccugagcaggcuggaucccccagaggccgaggugcagaucgaccggcugaucaccggccggcugcagagccugcagaccuacgugacccagcagcugauccgggccgccgagauccgggccagcgccaaucuggcagccaccaagaugagcgagugcgugcugggccagagcaagcggguggacuuuugcggcaagggcuaccaccugaugagcuucccccagagcgcuccccacggcgugguguuccuccacgugacauacguccccgcccaggagaagaacuucaccaccgcccccgccauuugccacgacggcaaggcccacuucccccgggagggaguguucgugagcaacggcacccacugguucgugacccagcggaacuucuacgagccucagaucaucaccaccgacaacaccuucgugagcggcaacugcgacguggugaucggcaucgugaacaacaccguguacgacccccugcagcccgagcuggacagcuucaaggaggagcuggacaaguacuucaagaaccacaccagcccagacguggaccugggcgacaucagcggcaucaacgccagcguggugaacauccagaaggagaucgaccggcugaacgagguggccaagaaccugaacgagagccugaucgaccugcaggagcugggcaaguacgagcaguacaucaaguggcccugguacaucuggcugggcuucaucgccggccugaucgccaucgugauggugaccaucaugcugugcugcaugaccagcugcuguagcugccugaagggcugcugcagcugcggcagcugcugcaaguucgacgaggacgacagcgagcccgugcugaagggcgugaagcugcacuacaccugaugacucgagcugguacugcaugcacgcaaugcuagcugccccuuucccguccuggguaccccgagucucccccgaccucgggucccagguaugcucccaccuccaccugccccacucaccaccucugcuaguuccagacaccucccaagcacgcagcaaugcagcucaaaacgcuuagccuagccacacccccacgggaaacagcagugauuaaccuuuagcaauaaacgaaaguuuaacuaagcuauacuaaccccaggguuggucaauuucgugccagccacacccuggagcuagcaaaaaaaaaaaaaaaaaaaaaaaaaaaaaagcauaugacuaaaaaaaaaaaaaaaaaaaaaaaaaaaaaaaaaaaaaaaaaaaaaaaaaaaaaaaaaaaaaaaaaaaaaa

SEQ ID NO: 26877 - RNA, 4277 nt, Artificial Sequence
  SARS-CoV-2/Wuhan/WIV05/2019__EPI_ISL_402128 spike protein mRNA gc (1-1273)(K986P_V987P_H69del_V70del_D614G)
agaauaaacuaguauucuucugguccccacagacucagagagaacccgccaccauguucguguuccuggugcugcugccccuggugagcagccagugcgugaaccugaccacccggacccagcugcccccugccuacaccaacagcuucacccggggcguguacuaccccgacaagguguuccggagcagcgugcugcacagcacccaggaccuguuccugcccuucuucagcaacgugaccugguuccacgccaucagcggcaccaacggcaccaagcgguucgacaacccagugcugcccuucaacgacggcguguacuucgccagcaccgagaagucaaacaucauccggggcuggaucuucggcaccacccuggacagcaagacacagagccugcugaucgugaacaacgccaccaacguggugaucaaggugugcgaguuucaguucugcaacgaccccuuccugggcguguacuaccacaagaacaacaagagcuggauggagagcgaguuccggguguacagcagcgcuaacaauugcaccuucgaguacgucagccagcccuuccugauggaccucgagggcaagcagggcaacuucaagaaccugcgggaguucguguucaagaacaucgauggcuacuucaagaucuacagcaagcacacccccaucaaccuggugcgggaccugccccagggauucagcgcccuggagccucugguggaccugcccaucggcaucaacaucaccagguuccagacccugcuggcccugcaccggagcuaccugacccccggcgacagcagcagcggcuggaccgccggcgccgccgcauacuacgugggcuaccugcagccacggaccuuccugcugaaguacaacgagaacggcaccaucaccgacgccguggacugcgcccuggacccccugagcgagaccaagugcacccuaaagagcuucaccguggagaagggcaucuaccagaccagcaacuuccgggugcagcccacugagagcaucgugcgguuccccaacauuaccaaccugugucccuucggcgagguguucaacgccacccgguucgccagcguguacgccuggaaccggaagcggaucagcaacugcguggccgacuacagcgugcuguacaacagcgccagcuucagcaccuucaagugcuacggcgugagcccuaccaagcugaacgaccugugcuucaccaacguguacgcugacagcuucgugauccggggcgacgaggugcggcagaucgcccccggccagaccggcaagaucgccgacuacaacuacaagcugcccgacgacuucaccggcugcgugaucgccuggaacagcaacaaccuggacagcaaggugggcggcaacuacaacuaccuguaccggcuguuccguaagagcaaccugaagccauucgagcgggacaucagcaccgagaucuaccaggccggcagcacccccugcaacgguguggagggcuuuaacugcuacuucccccugcagagcuacggcuuccagcccaccaacggcgugggcuaccagcccuaccgggugguggugcugagcuucgagcugcugcacgcccccgccaccgugugcggcccuaaaaagagcaccaaccuggugaagaacaagugcgugaacuucaauuucaacggccugaccggcaccggcgugcugaccgagagcaacaagaaguuccugcccuuccagcaguucggccgggauaucgccgacaccaccgacgcagugcgggacccccagacccuggagauccuggacaucaccccaugcagcuucggcggcgugagcgugaucacccccggcacaaacaccagcaaccaggucgccgugcuguaccagggagugaacugcaccgaggugcccguggccauccacgccgaccagcugacccccaccuggcggguguacagcaccggcagcaacguguuccagacccgggccggcugccugaucggcgccgagcacgugaacaacuccuacgagugcgacauccccaucggcgcuggcaucugcgccagcuaccagacccagaccaacagcccccggcgggcccggagcguggccagccagagcaucaucgccuacaccaugagcuuaggcgccgagaacagcguggccuacagcaacaacagcaucgcgaucccuaccaacuucaccaucagcgugaccaccgagauacugcccgugagcaugaccaagaccagcguggacuguaccauguacaucugcggcgacagcaccgagugcagcaaccugcugcugcaguacggcagcuucugcacccagcugaaccgggcccugaccggcaucgccguggagcaggacaagaacacccaagagguguucgcccaggugaagcagaucuacaagacucccccaaucaaggacuucggcggcuucaacuucagccagauccugcccgaccccagcaagcccagcaagcggagcuucaucgaggaccugcuguucaacaaggugacccuggccgacgccggcuucaucaagcaguacggcgacugccugggggauaucgccgcucgggaccugaucugcgcccagaaguucaacggccugaccgugcugcccccucugcugaccgacgagaugaucgcccaguacaccagcgcccugcuugccggcaccaucaccagcggcuggaccuucggcgccggcgcagcccugcagauccccuucgccaugcagauggccuaccgguucaacggcaucggcgugacccagaacgugcuguacgagaaccagaagcugaucgccaaccaguucaacagcgccaucggcaagauccaggacagccugagcagcaccgccagcgcccugggcaagcugcaggacguggugaaccagaacgcucaggcccugaacacccuggugaagcagcugagcagcaacuucggcgccaucagcucagugcugaaugacauccugagcaggcuggaucccccagaggccgaggugcagaucgaccggcugaucaccggccggcugcagagccugcagaccuacgugacccagcagcugauccgggccgccgagauccgggccagcgccaaccuggcagccaccaagaugagcgagugcgugcugggccagagcaagcggguggacuuuugcggcaagggcuaccaccugaugagcuucccccagagcgcuccccacggcgugguguuccuccacgugacauacgugcccgcccaggagaagaacuucaccaccgcccccgccauuugccacgacggcaaggcccacuucccccgggagggagucuucgugagcaacggcacccacugguucgugacccagcggaacuucuacgagccucagaucaucaccaccgacaacaccuucgugagcggcaacugcgacguggugaucggcaucgugaacaacaccguguacgacccccugcagcccgagcuggacagcuucaaggaggagcuggacaaguacuucaagaaccacaccagcccagacguggaccugggcgacaucagcggcaucaacgccagcguggugaacauccagaaggagaucgaccggcugaacgagguggccaagaaccugaacgagagccugaucgaccugcaggagcugggcaaguacgagcaguacaucaaguggcccugguacaucuggcugggcuucaucgccggccugaucgccaucgugauggugaccaucaugcugugcugcaugaccagcugcuguagcugccugaagggcugcugcagcugcggcagcugcugcaaguucgacgaggacgacagcgagcccgugcugaagggcgugaagcugcacuacaccugaugacucgagcugguacugcaugcacgcaaugcuagcugccccuuucccguccuggguaccccgagucucccccgaccucgggucccagguaugcucccaccuccaccugccccacucaccaccucugcuaguuccagacaccucccaagcacgcagcaaugcagcucaaaacgcuuagccuagccacacccccacgggaaacagcagugauuaaccuuuagcaauaaacgaaaguuuaacuaagcuauacuaaccccaggguuggucaauuucgugccagccacacccuggagcuagcaaaaaaaaaaaaaaaaaaaaaaaaaaaaaagcauaugacuaaaaaaaaaaaaaaaaaaaaaaaaaaaaaaaaaaaaaaaaaaaaaaaaaaaaaaaaaaaaaaaaaaaaaa

SEQ ID NO: 26878 - RNA, 4283 nt, Artificial Sequence
  SARS-CoV-2/Wuhan/WIV05/2019__EPI_ISL_402128 spike protein mRNA gc (1-1273)(K986P_V987P_Y453F_D614G)
agaauaaacuaguauucuucugguccccacagacucagagagaacccgccaccauguucguguuccuggugcugcugccccuggugagcagccagugcgugaaccugaccacccggacccagcugcccccugccuacaccaacagcuucacccggggcguguacuaccccgacaagguguuccggagcagcgugcugcacagcacccaggaccuguuccugcccuucuucagcaacgugaccugguuccacgccauccacgugagcggcaccaacggcaccaagcgguucgacaacccagugcugcccuucaacgacggcguguacuucgccagcaccgagaagucaaacaucauccggggcuggaucuucggcaccacccuggacagcaagacacagagccugcugaucgugaacaacgccaccaacguggugaucaaggugugcgaguuucaguucugcaacgaccccuuccugggcguguacuaccacaagaacaacaagagcuggauggagagcgaguuccgggucuacagcagcgcuaacaauugcaccuucgaguacgugagccagcccuuccugauggaccucgagggcaagcagggcaacuucaagaaccugcgggaguucguguucaagaacaucgauggcuacuucaagaucuacagcaagcacacccccaucaaccuggugcgggaccugccccagggauucagcgcccuggagccucugguggaccugcccaucggcaucaacaucaccagguuccagacccugcuggcccugcaccggagcuaccugacccccggcgacagcagcagcggcuggaccgccggcgccgccgcauacuacgugggcuaccugcagccacggaccuuccugcugaaguacaacgagaacggcaccaucaccgacgccguggacugcgcccuggacccccugagcgagaccaagugcacccuaaagagcuucaccguggagaagggcaucuaccagaccagcaacuuccgggugcagcccacugagagcaucgugcgguuccccaacauuaccaaccugugucccuucggcgagguguucaacgccacccgguucgccagcguguacgccuggaaccggaagcggaucagcaacugcguggccgacuacagcgugcuguacaacagcgccagcuucagcaccuucaagugcuacggcgugagcccuaccaagcugaacgaccugugcuucaccaacguguacgcugacagcuucgugauccggggcgacgaggugcggcagaucgcccccggccagaccggcaagaucgccgacuacaacuacaagcugcccgacgacuucaccggcugcgugaucgccuggaacagcaacaaccuggacagcaaggugggcggcaacuacaacuaccuguuccggcuguuccguaagagcaaccugaagccauuugagcgggacaucagcaccgagaucuaccaggccggcagcacccccugcaacgguguggagggcuucaacugcuacuucccccugcagagcuacggcuuccagcccaccaacggcgugggcuaccagcccuaccgggugguggugcugagcuucgagcugcugcacgcccccgccaccgugugcggcccuaaaaagagcaccaaccuggugaagaacaagugcgugaacuucaauuucaacggccugaccggcaccggcgugcugaccgagagcaacaagaaguuccugcccuuccagcaguucggccgggauaucgccgacaccaccgacgcagugcgggacccccagacccuggagauccuggacaucaccccaugcagcuucggcggcgugagcgucaucacccccggcacaaacaccagcaaccagguggccgugcuguaccagggagugaacugcaccgaggugcccguggccauccacgccgaccagcugacccccaccuggcggguguacagcaccggcagcaacguguuccagacccgggccggcugccugaucggcgccgagcacgugaacaacuccuacgagugcgacauccccaucggcgcuggcaucugcgccagcuaccagacccagaccaacagcccccggcgggcccggagcguggccagccagagcaucaucgccuacaccaugagcuuaggcgccgagaacagcguggccuacagcaacaacagcaucgcgaucccuaccaacuucaccaucagcgugaccaccgagauacugcccgugagcaugaccaagaccagcguggacuguaccauguacaucugcggcgacagcaccgagugcagcaaccugcugcugcaguacggcagcuucugcacccagcugaaccgggcccugaccggcaucgccguggagcaggacaagaacacccaagagguguucgcccaggugaagcagaucuacaagacucccccaaucaaggacuucggcggcuucaacuucagccagauccugcccgaccccagcaagcccagcaagcggagcuucaucgaggaccugcuguucaacaaggugacccuggccgacgccggcuucaucaagcaguacggcgacugccugggggauaucgccgcucgggaccugaucugcgcccagaaguucaacggccugaccgugcugcccccucugcugaccgacgagaugaucgcccaguacaccagcgcccugcuugccggcaccaucaccagcggcuggaccuucggcgccggcgcagcccugcagauccccuucgccaugcagauggccuaccgguucaacggcaucggcgugacccagaacgugcuguacgagaaccagaagcugaucgccaaccaguucaacagcgccaucggcaagauccaggacagccugagcagcaccgccagcgcccugggcaagcugcaggacguggugaaccagaacgcucaggcccugaacacccuggugaagcagcugagcagcaacuuuggcgccaucagcucagugcugaaugacauccugagcaggcuggaucccccagaggccgaggugcagaucgaccggcugaucaccggccggcugcagagccugcagaccuacgugacccagcagcugauccgggccgccgagauccgggccagcgccaaccuggcagccaccaagaugagcgagugcgugcugggccagagcaagcggguggacuucugcggcaagggcuaccaccugaugagcuucccccagagcgcuccccacggcgugguguuccuccacgugacauacguccccgcccaggagaagaacuucaccaccgcccccgccauuugccacgacggcaaggcccacuucccccgggagggaguguucgugagcaacggcacccacugguucgugacccagcggaacuucuacgagccucagaucaucaccaccgacaacaccuucgugagcggcaacugcgacguggugaucggcaucgugaacaacaccguguacgacccccugcagcccgagcuggacagcuucaaggaggagcuggacaaguacuucaagaaccacaccagcccagacguggaccugggcgacaucagcggcaucaacgccagcguggugaacauccagaaggagaucgaccggcugaacgagguggccaagaaccugaacgagagccugaucgaccugcaggagcugggcaaguacgagcaguacaucaaguggcccugguacaucuggcugggcuucaucgccggccugaucgccaucgugauggugaccaucaugcugugcugcaugaccagcugcuguagcugccugaagggcugcugcagcugcggcagcugcugcaaguucgacgaggacgacagcgagcccgugcugaagggcgugaagcugcacuacaccugaugacucgagcugguacugcaugcacgcaaugcuagcugccccuuucccguccuggguaccccgagucucccccgaccucgggucccagguaugcucccaccuccaccugccccacucaccaccucugcuaguuccagacaccucccaagcacgcagcaaugcagcucaaaacgcuuagccuagccacacccccacgggaaacagcagugauuaaccuuuagcaauaaacgaaaguuuaacuaagcuauacuaaccccaggguuggucaauuucgugccagccacacccuggagcuagcaaaaaaaaaaaaaaaaaaaaaaaaaaaaaagcauaugacuaaaaaaaaaaaaaaaaaaaaaaaaaaaaaaaaaaaaaaaaaaaaaaaaaaaaaaaaaaaaaaaaaaaaaa

SEQ ID NO: 26879 - RNA, 4283 nt, Artificial Sequence
  SARS-CoV-2/Wuhan/WIV05/2019__EPI_ISL_402128 spike protein mRNA gc (1-1273)(K986P_V987P_D614G_I692V)
agaauaaacuaguauucuucugguccccacagacucagagagaacccgccaccauguucguguuccuggugcugcugccccuggugagcagccagugcgugaaccugaccacccggacccagcugcccccugccuacaccaacagcuucacccggggcguguacuaccccgacaagguguuccggagcagcgugcugcacagcacccaggaccuguuccugcccuucuucagcaacgugaccugguuccacgccauccacgugagcggcaccaacggcaccaagcgguucgacaacccagugcugcccuucaacgacggcguguacuucgccagcaccgagaagucaaacaucauccggggcuggaucuucggcaccacccuggacagcaagacacagagccugcugaucgugaacaacgccaccaacguggugaucaaggugugcgaguuucaguucugcaacgaccccuuccugggcguguacuaccacaagaacaacaagagcuggauggagagcgaguuccgggucuacagcagcgcuaacaauugcaccuucgaguacgugagccagcccuuccugauggaccucgagggcaagcagggcaacuucaagaaccugcgggaguucguguucaagaacaucgauggcuacuucaagaucuacagcaagcacacccccaucaaccuggugcgggaccugccccagggauucagcgcccuggagccucugguggaccugcccaucggcaucaacaucaccagguuccagacccugcuggcccugcaccggagcuaccugacccccggcgacagcagcagcggcuggaccgccggcgccgccgcauacuacgugggcuaccugcagccacggaccuuccugcugaaguacaacgagaacggcaccaucaccgacgccguggacugcgcccuggacccccugagcgagaccaagugcacccuaaagagcuucaccguggagaagggcaucuaccagaccagcaacuuccgggugcagcccacugagagcaucgugcgguuccccaacauuaccaaccugugucccuucggcgagguguucaacgccacccgguucgccagcguguacgccuggaaccggaagcggaucagcaacugcguggccgacuacagcgugcuguacaacagcgccagcuucagcaccuucaagugcuacggcgugagcccuaccaagcugaacgaccugugcuucaccaacguguacgcugacagcuucgugauccggggcgacgaggugcggcagaucgcccccggccagaccggcaagaucgccgacuacaacuacaagcugcccgacgacuucaccggcugcgugaucgccuggaacagcaacaaccuggacagcaaggugggcggcaacuacaacuaccuguaccggcuguuccguaagagcaaccugaagccauucgagcgggacaucagcaccgagaucuaccaggccggcagcacccccugcaacgguguggagggcuuuaacugcuacuucccccugcagagcuacggcuuccagcccaccaacggcgugggcuaccagcccuaccgggugguggugcugagcuucgagcugcugcacgcccccgccaccgugugcggcccuaaaaagagcaccaaccuggugaagaacaagugcgugaacuucaauuucaacggccugaccggcaccggcgugcugaccgagagcaacaagaaguuccugcccuuccagcaguucggccgggauaucgccgacaccaccgacgcagugcgggacccccagacccuggagauccuggacaucaccccaugcagcuucggcggcgugagcgucaucacccccggcacaaacaccagcaaccagguggccgugcuguaccagggagugaacugcaccgaggugcccguggccauccacgccgaccagcugacccccaccuggcggguguacagcaccggcagcaacguguuccagacccgggccggcugccugaucggcgccgagcacgugaacaacuccuacgagugcgacauccccaucggcgcuggcaucugcgccagcuaccagacccagaccaacagcccccggcgggcccggagcguggccagccagagcgugaucgccuacaccaugagcuuaggcgccgagaacagcguggccuacagcaacaacagcaucgcgaucccuaccaacuucaccaucagcgugaccaccgagauccugcccgugagcaugaccaagaccagcguggacuguaccauguacauaugcggcgacagcaccgagugcagcaaccugcugcugcaguacggcagcuucugcacccagcugaaccgggcccugaccggcaucgccguggagcaggacaagaacacccaagagguguucgcccaggugaagcagaucuacaagacucccccaaucaaggacuucggcggcuucaacuucagccagauccugcccgaccccagcaagcccagcaagcggagcuucaucgaggaccugcuguucaacaaggugacccuggccgacgccggcuucaucaagcaguacggcgacugccugggggauaucgccgcucgggaccugaucugcgcccagaaguucaacggccugaccgugcugcccccucugcugaccgacgagaugaucgcccaguacaccagcgcccugcuugccggcaccaucaccagcggcuggaccuucggcgccggcgcagcccugcagauccccuucgccaugcagauggccuaccgguucaacggcaucggcgugacccagaacgugcuguacgagaaccagaagcugaucgccaaccaguucaacagcgccaucggcaagauccaggacagccugagcagcaccgccagcgcccugggcaagcugcaggacguggugaaccagaacgcucaggcccugaacacccuggugaagcagcugagcagcaacuucggcgccaucagcucagugcugaaugacauccugagcaggcuggaucccccagaggccgaggugcagaucgaccggcugaucaccggccggcugcagagccugcagaccuacgugacccagcagcugauccgggccgccgagauccgggccagcgccaaccuggcagccaccaagaugagcgagugcgugcugggccagagcaagcggguggacuuuugcggcaagggcuaccaccugaugagcuucccccagagcgcuccccacggcgugguguuccuccacgucacauacgugcccgcccaggagaagaacuucaccaccgcccccgccaucugccacgacggcaaggcccacuucccccgggagggaguguucgugagcaacggcacccacugguucgugacccagcggaacuucuacgagccucagauuaucaccaccgacaacaccuucgugagcggcaacugcgacguggugaucggcaucgugaacaacaccguguacgacccccugcagcccgagcuggacagcuucaaggaggagcuggacaaguacuucaagaaccacaccagcccagacguggaccugggcgacaucagcggcaucaacgccagcguggugaacauccagaaggagaucgaccggcugaacgagguggccaagaaccugaacgagagccugaucgaccugcaggagcugggcaaguacgagcaguacaucaaguggcccugguacaucuggcugggcuucaucgccggccugaucgccaucgugauggugaccaucaugcugugcugcaugaccagcugcuguagcugccugaagggcugcugcagcugcggcagcugcugcaaguucgacgaggacgacagcgagcccgugcugaagggcgugaagcugcacuacaccugaugacucgagcugguacugcaugcacgcaaugcuagcugccccuuucccguccuggguaccccgagucucccccgaccucgggucccagguaugcucccaccuccaccugccccacucaccaccucugcuaguuccagacaccucccaagcacgcagcaaugcagcucaaaacgcuuagccuagccacacccccacgggaaacagcagugauuaaccuuuagcaauaaacgaaaguuuaacuaagcuauacuaaccccaggguuggucaauuucgugccagccacacccuggagcuagcaaaaaaaaaaaaaaaaaaaaaaaaaaaaaagcauaugacuaaaaaaaaaaaaaaaaaaaaaaaaaaaaaaaaaaaaaaaaaaaaaaaaaaaaaaaaaaaaaaaaaaaaaa

SEQ ID NO: 26880 - RNA, 4283 nt, Artificial Sequence
  SARS-CoV-2/Wuhan/WIV05/2019__EPI_ISL_402128 spike protein mRNA gc (1-1273)(K986P_V987P_D614G_M1229I)
agaauaaacuaguauucuucugguccccacagacucagagagaacccgccaccauguucguguuccuggugcugcugccccuggugagcagccagugcgugaaccugaccacccggacccagcugcccccugccuacaccaacagcuucacccggggcguguacuaccccgacaagguguuccggagcagcgugcugcacagcacccaggaccuguuccugcccuucuucagcaacgugaccugguuccacgccauccacgugagcggcaccaacggcaccaagcgguucgacaacccagugcugcccuucaacgacggcguguacuucgccagcaccgagaagucaaacaucauccggggcuggaucuucggcaccacccuggacagcaagacacagagccugcugaucgugaacaacgccaccaacguggugaucaaggugugcgaguuucaguucugcaacgaccccuuccugggcguguacuaccacaagaacaacaagagcuggauggagagcgaguuccgggucuacagcagcgcuaacaauugcaccuucgaguacgugagccagcccuuccugauggaccucgagggcaagcagggcaacuucaagaaccugcgggaguucguguucaagaacaucgauggcuacuucaagaucuacagcaagcacacccccaucaaccuggugcgggaccugccccagggauucagcgcccuggagccucugguggaccugcccaucggcaucaacaucaccagguuccagacccugcuggcccugcaccggagcuaccugacccccggcgacagcagcagcggcuggaccgccggcgccgccgcauacuacgugggcuaccugcagccacggaccuuccugcugaaguacaacgagaacggcaccaucaccgacgccguggacugcgcccuggacccccugagcgagaccaagugcacccuaaagagcuucaccguggagaagggcaucuaccagaccagcaacuuccgggugcagcccacugagagcaucgugcgguuccccaacauuaccaaccugugucccuucggcgagguguucaacgccacccgguucgccagcguguacgccuggaaccggaagcggaucagcaacugcguggccgacuacagcgugcuguacaacagcgccagcuucagcaccuucaagugcuacggcgugagcccuaccaagcugaacgaccugugcuucaccaacguguacgcugacagcuucgugauccggggcgacgaggugcggcagaucgcccccggccagaccggcaagaucgccgacuacaacuacaagcugcccgacgacuucaccggcugcgugaucgccuggaacagcaacaaccuggacagcaaggugggcggcaacuacaacuaccuguaccggcuguuccguaagagcaaccugaagccauucgagcgggacaucagcaccgagaucuaccaggccggcagcacccccugcaacgguguggagggcuuuaacugcuacuucccccugcagagcuacggcuuccagcccaccaacggcgugggcuaccagcccuaccgggugguggugcugagcuucgagcugcugcacgcccccgccaccgugugcggcccuaaaaagagcaccaaccuggugaagaacaagugcgugaacuucaauuucaacggccugaccggcaccggcgugcugaccgagagcaacaagaaguuccugcccuuccagcaguucggccgggauaucgccgacaccaccgacgcagugcgggacccccagacccuggagauccuggacaucaccccaugcagcuucggcggcgugagcgucaucacccccggcacaaacaccagcaaccagguggccgugcuguaccagggagugaacugcaccgaggugcccguggccauccacgccgaccagcugacccccaccuggcggguguacagcaccggcagcaacguguuccagacccgggccggcugccugaucggcgccgagcacgugaacaacuccuacgagugcgacauccccaucggcgcuggcaucugcgccagcuaccagacccagaccaacagcccccggcgggcccggagcguggccagccagagcaucaucgccuacaccaugagcuuaggcgccgagaacagcguggccuacagcaacaacagcaucgcgaucccuaccaacuucaccaucagcgugaccaccgagauacugcccgugagcaugaccaagaccagcguggacuguaccauguacaucugcggcgacagcaccgagugcagcaaccugcugcugcaguacggcagcuucugcacccagcugaaccgggcccugaccggcaucgccguggagcaggacaagaacacccaagagguguucgcccaggugaagcagaucuacaagacucccccaaucaaggacuucggcggcuucaacuucagccagauccugcccgaccccagcaagcccagcaagcggagcuucaucgaggaccugcuguucaacaaggugacccuggccgacgccggcuucaucaagcaguacggcgacugccugggggauaucgccgcucgggaccugaucugcgcccagaaguucaacggccugaccgugcugcccccucugcugaccgacgagaugaucgcccaguacaccagcgcccugcuugccggcaccaucaccagcggcuggaccuucggcgccggcgcagcccugcagauccccuucgccaugcagauggccuaccgguucaacggcaucggcgugacccagaacgugcuguacgagaaccagaagcugaucgccaaccaguucaacagcgccaucggcaagauccaggacagccugagcagcaccgccagcgcccugggcaagcugcaggacguggugaaccagaacgcucaggcccugaacacccuggugaagcagcugagcagcaacuucggcgccaucagcucagugcugaaugacauccugagcaggcuggaucccccagaggccgaggugcagaucgaccggcugaucaccggccggcugcagagccugcagaccuacgugacccagcagcugauccgggccgccgagauccgggccagcgccaaccuggcagccaccaagaugagcgagugcgugcugggccagagcaagcggguggacuuuugcggcaagggcuaccaccugaugagcuucccccagagcgcuccccacggcgugguguuccuccacgugacauacguccccgcccaggagaagaacuucaccaccgcccccgccauuugccacgacggcaaggcccacuucccccgggagggaguguucgugagcaacggcacccacugguucgugacccagcggaacuucuacgagccucagaucaucaccaccgacaacaccuucgugagcggcaacugcgacguggugaucggcaucgugaacaacaccguguacgacccccugcagcccgagcuggacagcuucaaggaggagcuggacaaguacuucaagaaccacaccagcccagacguggaccugggcgacaucagcggcaucaacgccagcguggugaacauccagaaggagaucgaccggcugaacgagguggccaagaaccugaacgagagccugaucgaccugcaggagcugggcaaguacgagcaguacaucaaguggcccugguacaucuggcugggcuucaucgccggccugaucgccaucgugaucgugaccaucaugcugugcugcaugaccagcugcuguagcugccugaagggcugcugcagcugcggcagcugcugcaaguucgacgaggacgacagcgagcccgugcugaagggcgugaagcugcacuacaccugaugacucgagcugguacugcaugcacgcaaugcuagcugccccuuucccguccuggguaccccgagucucccccgaccucgggucccagguaugcucccaccuccaccugccccacucaccaccucugcuaguuccagacaccucccaagcacgcagcaaugcagcucaaaacgcuuagccuagccacacccccacgggaaacagcagugauuaaccuuuagcaauaaacgaaaguuuaacuaagcuauacuaaccccaggguuggucaauuucgugccagccacacccuggagcuagcaaaaaaaaaaaaaaaaaaaaaaaaaaaaaagcauaugacuaaaaaaaaaaaaaaaaaaaaaaaaaaaaaaaaaaaaaaaaaaaaaaaaaaaaaaaaaaaaaaaaaaaaaa

SEQ ID NO: 26881 - RNA, 4277 nt, Artificial Sequence
  SARS-CoV-2/Wuhan/WIV05/2019__EPI_ISL_402128 spike protein mRNA gc (1-1273)(K986P_V987P_H69del_V70del_A222V_Y453F_S477N_D614G_I692V)
agaauaaacuaguauucuucugguccccacagacucagagagaacccgccaccauguucguguuccuggugcugcugccccuggugagcagccagugcgugaaccugaccacccggacccagcugcccccugccuacaccaacagcuucacccggggcguguacuaccccgacaagguguuccggagcagcgugcugcacagcacccaggaccuguuccugcccuucuucagcaacgugaccugguuccacgccaucagcggcaccaacggcaccaagcgguucgacaacccagugcugcccuucaacgacggcguguacuucgccagcaccgagaagucaaacaucauccggggcuggaucuucggcaccacccuggacagcaagacacagagccugcugaucgugaacaacgccaccaacguggugaucaaggugugcgaguuucaguucugcaacgaccccuuccugggcguguacuaccacaagaacaacaagagcuggauggagagcgaguuccggguguacagcagcgcuaacaauugcaccuucgaguacgucagccagcccuuccugauggaccucgagggcaagcagggcaacuucaagaaccugcgggaguucguguucaagaacaucgauggcuacuucaagaucuacagcaagcacacccccaucaaccuggugcgggaccugccccagggauucagcgugcuggagccucugguggaccugcccaucggcaucaacaucaccagguuccagacccugcuggcccugcaccggagcuaccugacccccggcgacagcagcagcggcuggaccgccggcgccgccgccuacuacgugggcuaccugcagccacggaccuuccugcugaaguacaacgagaacggcaccaucaccgacgcaguggacugcgcccuggacccccugagcgagaccaagugcacccuaaagagcuucaccguggagaagggcaucuaccagaccagcaacuuccgggugcagcccacugagagcaucgugcgguuccccaacauuaccaaccugugucccuucggcgagguguucaacgccacccgguucgccagcguguacgccuggaaccggaagcggaucagcaacugcguggccgacuacagcgugcuguacaacagcgccagcuucagcaccuucaagugcuacggcgugagcccuaccaagcugaacgaccugugcuucaccaacguguacgccgacagcuucgugauccggggcgacgaggugcggcagaucgcucccggccagaccggcaagaucgccgacuacaacuacaagcugcccgacgacuucaccggcugcgugaucgccuggaacagcaacaaccuggacagcaaggugggcggcaacuacaacuaccuguuccggcuguuccguaagagcaaccugaagccauuugagcgggacaucagcaccgagaucuaccaggccggcaacacccccugcaacgguguggagggcuucaacugcuacuucccccugcagagcuacggcuuccagcccaccaacggcgugggcuaccagcccuaccgggugguggugcugagcuucgagcugcugcacgcccccgccaccgugugcggcccuaaaaagagcaccaaccuggugaagaacaagugcgugaauuucaacuucaacggccugaccggcaccggcgugcugaccgagagcaacaagaaguuccugcccuuccagcaguucggccgggauaucgccgacaccaccgacgccgugcgggacccccagacccuggagauccuggacaucaccccaugcagcuucggcggcgugagcgucaucacccccggcacaaacaccagcaaccagguggcagugcuguaccagggagugaacugcaccgaggugcccguggccauccacgccgaccagcugacccccaccuggcggguguacagcaccggcagcaacguguuccagacccgggccggcugccugaucggcgccgagcacgugaacaacagcuacgagugcgacauccccaucggcgccggcaucugcgcuuccuaccagacccagaccaacagcccccggcgggcccggagcguggccagccagagcgugaucgccuacaccaugagcuuaggcgccgagaacagcguggccuacagcaacaacagcaucgccaucccuaccaacuucaccaucagcgugaccaccgagauccugcccgugagcaugaccaagaccagcguggacuguaccauguacauaugcggcgacagcaccgagugcagcaaccugcugcugcaguacggcagcuucugcacccagcugaaccgggcgcugaccggcaucgccguggagcaggacaagaacacccaagagguguucgcccaggugaagcagaucuacaagacucccccaaucaaggacuucggcggcuucaacuucagccagauccugcccgaccccagcaagcccagcaagcggagcuucaucgaggaccugcuguucaacaaggugacccuggccgacgccggcuucaucaagcaguacggcgacugccugggggauaucgccgcccgggaccugaucugcgcucagaaguucaacggccugaccgugcugcccccucugcugaccgacgagaugaucgcccaguacaccagcgcccugcuugccggcaccaucaccagcggcuggaccuucggcgccggcgccgcacugcagauccccuucgccaugcagauggccuaccgguucaacggcaucggcgugacccagaacgugcuguacgagaaccagaagcugaucgccaaccaguucaacagcgccaucggcaagauccaggacagccugagcagcaccgccagcgcccugggcaagcugcaggacguggugaaccagaacgcccaggcucugaacacccuggugaagcagcugagcagcaauuuuggcgccaucagcagcgugcugaacgacauccugucaaggcuggaucccccagaggccgaggugcagaucgaccggcugaucaccggccggcugcagagccugcagaccuacgugacccagcagcugauccgggccgccgagauccgggccagcgccaaccuggccgcaaccaagaugagcgagugcgugcugggccagagcaagcggguggacuucugcggcaagggcuaccaccugaugagcuucccccagagcgcuccccacggcgugguguuccuccacgucacauacgugcccgcccaggagaagaacuucaccaccgcccccgccaucugccacgacggcaaggcccacuucccccgggagggaguguucgugagcaacggcacccacugguucgugacccagcggaacuucuacgagccucagauuaucaccaccgacaacaccuucgugagcggcaacugcgacguggugaucggcaucgugaacaacaccguguacgacccccugcagcccgagcuggacagcuucaaggaggagcuggacaaguacuucaagaaccacaccagcccagacguggaccugggcgacaucagcggcaucaacgccagcguggugaacauccagaaggagaucgaccggcugaacgagguggccaagaaccugaacgagagccugaucgaccugcaggagcugggcaaguacgagcaguacaucaaguggcccugguacaucuggcugggcuucaucgccggccugaucgccaucgugauggugaccaucaugcugugcugcaugaccagcugcuguagcugccugaagggcugcugcagcugcggcagcugcugcaaguucgacgaggacgacagcgagcccgugcugaagggcgugaagcugcacuacaccugaugacucgagcugguacugcaugcacgcaaugcuagcugccccuuucccguccuggguaccccgagucucccccgaccucgggucccagguaugcucccaccuccaccugccccacucaccaccucugcuaguuccagacaccucccaagcacgcagcaaugcagcucaaaacgcuuagccuagccacacccccacgggaaacagcagugauuaaccuuuagcaauaaacgaaaguuuaacuaagcuauacuaaccccaggguuggucaauuucgugccagccacacccuggagcuagcaaaaaaaaaaaaaaaaaaaaaaaaaaaaaagcauaugacuaaaaaaaaaaaaaaaaaaaaaaaaaaaaaaaaaaaaaaaaaaaaaaaaaaaaaaaaaaaaaaaaaaaaaa

SEQ ID NO: 26882 - RNA, 4277 nt, Artificial Sequence
  SARS-CoV-2/Wuhan/WIV05/2019__EPI_ISL_402128 spike protein mRNA gc (1-1273)(K986P_V987P_H69del_V70del_Y453F_D614G_I692V_M1229I)
agaauaaacuaguauucuucugguccccacagacucagagagaacccgccaccauguucguguuccuggugcugcugccccuggugagcagccagugcgugaaccugaccacccggacccagcugcccccugccuacaccaacagcuucacccggggcguguacuaccccgacaagguguuccggagcagcgugcugcacagcacccaggaccuguuccugcccuucuucagcaacgugaccugguuccacgccaucagcggcaccaacggcaccaagcgguucgacaacccagugcugcccuucaacgacggcguguacuucgccagcaccgagaagucaaacaucauccggggcuggaucuucggcaccacccuggacagcaagacacagagccugcugaucgugaacaacgccaccaacguggugaucaaggugugcgaguuucaguucugcaacgaccccuuccugggcguguacuaccacaagaacaacaagagcuggauggagagcgaguuccggguguacagcagcgcuaacaauugcaccuucgaguacgucagccagcccuuccugauggaccucgagggcaagcagggcaacuucaagaaccugcgggaguucguguucaagaacaucgauggcuacuucaagaucuacagcaagcacacccccaucaaccuggugcgggaccugccccagggauucagcgcccuggagccucugguggaccugcccaucggcaucaacaucaccagguuccagacccugcuggcccugcaccggagcuaccugacccccggcgacagcagcagcggcuggaccgccggcgccgccgcauacuacgugggcuaccugcagccacggaccuuccugcugaaguacaacgagaacggcaccaucaccgacgccguggacugcgcccuggacccccugagcgagaccaagugcacccuaaagagcuucaccguggagaagggcaucuaccagaccagcaacuuccgggugcagcccacugagagcaucgugcgguuccccaacauuaccaaccugugucccuucggcgagguguucaacgccacccgguucgccagcguguacgccuggaaccggaagcggaucagcaacugcguggccgacuacagcgugcuguacaacagcgccagcuucagcaccuucaagugcuacggcgugagcccuaccaagcugaacgaccugugcuucaccaacguguacgcugacagcuucgugauccggggcgacgaggugcggcagaucgcccccggccagaccggcaagaucgccgacuacaacuacaagcugcccgacgacuucaccggcugcgugaucgccuggaacagcaacaaccuggacagcaaggugggcggcaacuacaacuaccuguuccggcuguuccguaagagcaaccugaagccauuugagcgggacaucagcaccgagaucuaccaggccggcagcacccccugcaacgguguggagggcuucaacugcuacuucccccugcagagcuacggcuuccagcccaccaacggcgugggcuaccagcccuaccgggugguggugcugagcuucgagcugcugcacgcccccgccaccgugugcggcccuaaaaagagcaccaaccuggugaagaacaagugcgugaacuucaauuucaacggccugaccggcaccggcgugcugaccgagagcaacaagaaguuccugcccuuccagcaguucggccgggauaucgccgacaccaccgacgcagugcgggacccccagacccuggagauccuggacaucaccccaugcagcuucggcggcgugagcgugaucacccccggcacaaacaccagcaaccaggucgccgugcuguaccagggagugaacugcaccgaggugcccguggccauccacgccgaccagcugacccccaccuggcggguguacagcaccggcagcaacguguuccagacccgggccggcugccugaucggcgccgagcacgugaacaacuccuacgagugcgacauccccaucggcgcuggcaucugcgccagcuaccagacccagaccaacagcccccggcgggcccggagcguggccagccagagcgugaucgccuacaccaugagcuuaggcgccgagaacagcguggccuacagcaacaacagcaucgcgaucccuaccaacuucaccaucagcgugaccaccgagauccugcccgugagcaugaccaagaccagcguggacuguaccauguacauaugcggcgacagcaccgagugcagcaaccugcugcugcaguacggcagcuucugcacccagcugaaccgggcccugaccggcaucgccguggagcaggacaagaacacccaagagguguucgcccaggugaagcagaucuacaagacucccccaaucaaggacuucggcggcuucaacuucagccagauccugcccgaccccagcaagcccagcaagcggagcuucaucgaggaccugcuguucaacaaggugacccuggccgacgccggcuucaucaagcaguacggcgacugccugggggauaucgccgcucgggaccugaucugcgcccagaaguucaacggccugaccgugcugcccccucugcugaccgacgagaugaucgcccaguacaccagcgcccugcuugccggcaccaucaccagcggcuggaccuucggcgccggcgcagcccugcagauccccuucgccaugcagauggccuaccgguucaacggcaucggcgugacccagaacgugcuguacgagaaccagaagcugaucgccaaccaguucaacagcgccaucggcaagauccaggacagccugagcagcaccgccagcgcccugggcaagcugcaggacguggugaaccagaacgcucaggcccugaacacccuggugaagcagcugagcagcaacuuuggcgccaucagcucagugcugaaugacauccugagcaggcuggaucccccagaggccgaggugcagaucgaccggcugaucaccggccggcugcagagccugcagaccuacgugacccagcagcugauccgggccgccgagauccgggccagcgccaaccuggcagccaccaagaugagcgagugcgugcugggccagagcaagcggguggacuucugcggcaagggcuaccaccugaugagcuucccccagagcgcuccccacggcgugguguuccuccacgugacauacguccccgcccaggagaagaacuucaccaccgcccccgccaucugccacgacggcaaggcccacuucccccgggagggaguguucgugagcaacggcacccacugguucgugacccagcggaacuucuacgagccucagauuaucaccaccgacaacaccuucgugagcggcaacugcgacguggugaucggcaucgugaacaacaccguguacgacccccugcagcccgagcuggacagcuucaaggaggagcuggacaaguacuucaagaaccacaccagcccagacguggaccugggcgacaucagcggcaucaacgccagcguggugaacauccagaaggagaucgaccggcugaacgagguggccaagaaccugaacgagagccugaucgaccugcaggagcugggcaaguacgagcaguacaucaaguggcccugguacaucuggcugggcuucaucgccggccugaucgccaucgugaucgugaccaucaugcugugcugcaugaccagcugcuguagcugccugaagggcugcugcagcugcggcagcugcugcaaguucgacgaggacgacagcgagcccgugcugaagggcgugaagcugcacuacaccugaugacucgagcugguacugcaugcacgcaaugcuagcugccccuuucccguccuggguaccccgagucucccccgaccucgggucccagguaugcucccaccuccaccugccccacucaccaccucugcuaguuccagacaccucccaagcacgcagcaaugcagcucaaaacgcuuagccuagccacacccccacgggaaacagcagugauuaaccuuuagcaauaaacgaaaguuuaacuaagcuauacuaaccccaggguuggucaauuucgugccagccacacccuggagcuagcaaaaaaaaaaaaaaaaaaaaaaaaaaaaaagcauaugacuaaaaaaaaaaaaaaaaaaaaaaaaaaaaaaaaaaaaaaaaaaaaaaaaaaaaaaaaaaaaaaaaaaaaaa

SEQ ID NO: 26883 - RNA, 4274 nt, Artificial Sequence
  SARS-CoV-2/Wuhan/WIV05/2019__EPI_ISL_402128 spike protein mRNA gc (1-1273)(K986P_V987P_K986P_V987P_H69del_V70del_Y144del_N501Y_A570 D_D614G_P681H_T716I_S982A_D1118H)
agaauaaacuaguauucuucugguccccacagacucagagagaacccgccaccauguucguguuccuggugcugcugccccuggugagcagccagugcgugaaccugaccacccggacccagcugcccccugccuacaccaacagcuucacccggggcguguacuaccccgacaagguguuccggagcagcgugcugcacagcacccaggaccuguuccugcccuucuucagcaacgugaccugguuccacgccaucagcggcaccaacggcaccaagcgguucgacaacccagugcugcccuucaacgacggcguguacuucgccagcaccgagaagucaaacaucauccggggcuggaucuucggcaccacccuggacagcaagacacagagccugcugaucgugaacaacgccaccaacguggugaucaaggugugcgaguuucaguucugcaacgaccccuuccugggcguguaccacaagaacaacaagagcuggauggagagcgaguuccggguguacagcagcgcuaacaauugcaccuucgaguacgucagccagcccuuccugauggaccucgagggcaagcagggcaacuucaagaaccugcgggaguucguguucaagaacaucgauggcuacuucaagaucuacagcaagcacacccccaucaaccuggugcgggaccugccccagggauucagcgcccuggagccucugguggaccugcccaucggcaucaacaucaccagguuccagacccugcuggcccugcaccggagcuaccugacccccggcgacagcagcagcggcuggaccgccggcgccgccgcauacuacgugggcuaccugcagccacggaccuuccugcugaaguacaacgagaacggcaccaucaccgacgccguggacugcgcccuggacccccugagcgagaccaagugcacccuaaagagcuucaccguggagaagggcaucuaccagaccagcaacuuccgggugcagcccacugagagcaucgugcgguuccccaacauuaccaaccugugucccuucggcgagguguucaacgccacccgguucgccagcguguacgccuggaaccggaagcggaucagcaacugcguggccgacuacagcgugcuguacaacagcgccagcuucagcaccuucaagugcuacggcgugagcccuaccaagcugaacgaccugugcuucaccaacguguacgcugacagcuucgugauccggggcgacgaggugcggcagaucgcccccggccagaccggcaagaucgccgacuacaacuacaagcugcccgacgacuucaccggcugcgugaucgccuggaacagcaacaaccuggacagcaaggugggcggcaacuacaacuaccuguaccggcuguuccguaagagcaaccugaagccauucgagcgggacaucagcaccgagaucuaccaggccggcagcacccccugcaacgguguggagggcuuuaacugcuacuucccccugcagagcuacggcuuccagcccaccuacggcgugggcuaccagcccuaccgggugguggugcugagcuucgagcugcugcacgcccccgccaccgugugcggcccuaaaaagagcaccaaccuggugaagaacaagugcgugaacuucaacuucaauggccugaccggcaccggcgugcugaccgagagcaacaagaaguuccugcccuuccagcaguucggccgggauaucgacgacaccaccgacgccgugcgggacccccagacccuggagauccuggacaucaccccaugcagcuucggcggcgugagcgugaucacccccggcacaaacaccagcaaccaggucgcagugcuguaccagggagugaacugcaccgaggugcccguggccauccacgccgaccagcugacccccaccuggcggguguacagcaccggcagcaacguguuccagacccgggccggcugccugaucggcgccgagcacgugaacaacuccuacgagugcgacauccccaucggcgccggcaucugcgcuagcuaccagacccagaccaacagccaccggcgggcccggagcguggccagccagagcaucaucgccuacaccaugagcuuaggcgccgagaacagcguggccuacagcaacaacagcaucgccauccccaucaacuucaccauaagcgugaccaccgagauccugccugugagcaugaccaagaccagcguggacuguaccauguacaucugcggcgacagcaccgagugcagcaaccugcugcugcaguacggcagcuucugcacccagcugaaccgggcgcugaccggcaucgccguggagcaggacaagaacacccaagagguguucgcccaggugaagcagaucuacaagaccccacccaucaaggacuucggcggcuucaacuucagccagauccugcccgaccccagcaagcccagcaagcggagcuucaucgaggaccugcuguucaacaaggugacucuggccgacgccggcuucaucaagcaguacggcgauugccugggggacaucgccgcccgggaccugaucugcgcucagaaguucaacggccugaccgugcugccuccccugcugaccgacgagaugaucgcccaguacaccagcgcccugcuugccggcaccaucaccagcggcuggaccuucggcgccggcgccgcacugcagauccccuucgccaugcagauggccuaccgguucaacggcaucggcgugacccagaacgugcuguacgagaaccagaagcugaucgccaaccaguucaacagcgccaucggcaagauccaggacagccugagcagcaccgccagcgcccugggcaagcugcaggacguggugaaccagaacgcccaggcucugaacacccuggugaagcagcugagcagcaacuucggcgccaucagcucagugcugaacgacauccuggccaggcuggacccacccgaggccgaggugcagaucgaccggcugaucaccggccggcugcagagccugcagaccuacgugacccagcagcugauccgggccgccgagauucgggccagcgccaaucuggcagccaccaagaugagcgagugcgugcugggccagagcaagcggguggacuuuugcggcaagggcuaccaccugaugagcuucccccagagcgcuccccacggcgugguguuccuccacgugaccuacgugcccgcccaggagaagaacuucacaaccgcccccgccaucugccacgacggcaaggcccacuucccccgggagggagucuucgugagcaacggcacccacugguucgugacccagcggaacuucuacgagccccagaucaucaccacccacaacaccuucgugagcggcaacugcgacguggugaucggcaucgugaacaacaccguguacgacccucugcagcccgagcuggacagcuucaaggaggagcuggacaaguacuucaagaaccacaccagccccgacguggaucugggcgacaucagcggcaucaacgccagcguggugaacauccagaaggagaucgaccggcugaacgagguggccaagaaccugaacgagagccugaucgaccugcaggagcugggcaaguacgagcaguacaucaaguggccaugguacaucuggcugggcuucaucgccggccugaucgccaucgugauggugaccaucaugcugugcugcaugaccagcugcuguagcugccugaagggcugcugcagcugcggcagcugcugcaaguucgacgaggacgacagcgagcccgugcugaagggcgugaagcugcacuacaccugaugacucgagcugguacugcaugcacgcaaugcuagcugccccuuucccguccuggguaccccgagucucccccgaccucgggucccagguaugcucccaccuccaccugccccacucaccaccucugcuaguuccagacaccucccaagcacgcagcaaugcagcucaaaacgcuuagccuagccacacccccacgggaaacagcagugauuaaccuuuagcaauaaacgaaaguuuaacuaagcuauacuaaccccaggguuggucaauuucgugccagccacacccuggagcuagcaaaaaaaaaaaaaaaaaaaaaaaaaaaaaagcauaugacuaaaaaaaaaaaaaaaaaaaaaaaaaaaaaaaaaaaaaaaaaaaaaaaaaaaaaaaaaaaaaaaaaaaaaa

SEQ ID NO: 26884 - RNA, 4283 nt, Artificial Sequence
  SARS-CoV-2/Wuhan/WIV05/2019__EPI_ISL_402128 spike protein mRNA gc (1-1273)(K986P_V987P_K986P_V987P_K417N_E484K_N501Y_D614G)
agaauaaacuaguauucuucugguccccacagacucagagagaacccgccaccauguucguguuccuggugcugcugccccuggugagcagccagugcgugaaccugaccacccggacccagcugcccccugccuacaccaacagcuucacccggggcguguacuaccccgacaagguguuccggagcagcgugcugcacagcacccaggaccuguuccugcccuucuucagcaacgugaccugguuccacgccauccacgugagcggcaccaacggcaccaagcgguucgacaacccagugcugcccuucaacgacggcguguacuucgccagcaccgagaagucaaacaucauccggggcuggaucuucggcaccacccuggacagcaagacacagagccugcugaucgugaacaacgccaccaacguggugaucaaggugugcgaguuucaguucugcaacgaccccuuccugggcguguacuaccacaagaacaacaagagcuggauggagagcgaguuccgggucuacagcagcgcuaacaauugcaccuucgaguacgugagccagcccuuccugauggaccucgagggcaagcagggcaacuucaagaaccugcgggaguucguguucaagaacaucgauggcuacuucaagaucuacagcaagcacacccccaucaaccuggugcgggaccugccccagggauucagcgcccuggagccucugguggaccugcccaucggcaucaacaucaccagguuccagacccugcuggcccugcaccggagcuaccugacccccggcgacagcagcagcggcuggaccgccggcgccgccgcauacuacgugggcuaccugcagccacggaccuuccugcugaaguacaacgagaacggcaccaucaccgacgccguggacugcgcccuggacccccugagcgagaccaagugcacccuaaagagcuucaccguggagaagggcaucuaccagaccagcaacuuccgggugcagcccacugagagcaucgugcgguuccccaacauuaccaaccugugucccuucggcgagguguucaacgccacccgguucgccagcguguacgccuggaaccggaagcggaucagcaacugcguggccgacuacagcgugcuguacaacagcgccagcuucagcaccuucaagugcuacggcgugagcccuaccaagcugaacgaccugugcuucaccaacguguacgcugacagcuucgugauccggggcgacgaggugcggcagaucgcccccggccagaccggcaacaucgccgacuacaacuacaagcugcccgacgacuucaccggcugcgugaucgccuggaacagcaacaaccuggacagcaaggugggcggcaacuacaacuaccuguaccggcuguuccguaagagcaaccugaagccauucgagcgggacaucagcaccgagaucuaccaggccggcagcacccccugcaacggugugaagggcuuuaacugcuacuucccccugcagagcuacggcuuccagcccaccuacggcgugggcuaccagcccuaccgggugguggugcugagcuucgagcugcugcacgcccccgccaccgugugcggcccuaaaaagagcaccaaccuggugaagaacaagugcgugaacuucaauuucaacggccugaccggcaccggcgugcugaccgagagcaacaagaaguuccugcccuuccagcaguucggccgggauaucgccgacaccaccgacgcagugcgggacccccagacccuggagauccuggacaucaccccaugcagcuucggcggcgugagcgucaucacccccggcacaaacaccagcaaccagguggccgugcuguaccagggagugaacugcaccgaggugcccguggccauccacgccgaccagcugacccccaccuggcggguguacagcaccggcagcaacguguuccagacccgggccggcugccugaucggcgccgagcacgugaacaacuccuacgagugcgacauccccaucggcgcuggcaucugcgccagcuaccagacccagaccaacagcccccggcgggcccggagcguggccagccagagcaucaucgccuacaccaugagcuuaggcgccgagaacagcguggccuacagcaacaacagcaucgcgaucccuaccaacuucaccaucagcgugaccaccgagauacugcccgugagcaugaccaagaccagcguggacuguaccauguacaucugcggcgacagcaccgagugcagcaaccugcugcugcaguacggcagcuucugcacccagcugaaccgggcccugaccggcaucgccguggagcaggacaagaacacccaagagguguucgcccaggugaagcagaucuacaagacucccccaaucaaggacuucggcggcuucaacuucagccagauccugcccgaccccagcaagcccagcaagcggagcuucaucgaggaccugcuguucaacaaggugacccuggccgacgccggcuucaucaagcaguacggcgacugccugggggauaucgccgcucgggaccugaucugcgcccagaaguucaacggccugaccgugcugcccccucugcugaccgacgagaugaucgcccaguacaccagcgcccugcuugccggcaccaucaccagcggcuggaccuucggcgccggcgcagcccugcagauccccuucgccaugcagauggccuaccgguucaacggcaucggcgugacccagaacgugcuguacgagaaccagaagcugaucgccaaccaguucaacagcgccaucggcaagauccaggacagccugagcagcaccgccagcgcccugggcaagcugcaggacguggugaaccagaacgcucaggcccugaacacccuggugaagcagcugagcagcaacuucggcgccaucagcucagugcugaaugacauccugagcaggcuggaucccccagaggccgaggugcagaucgaccggcugaucaccggccggcugcagagccugcagaccuacgugacccagcagcugauccgggccgccgagauccgggccagcgccaaccuggcagccaccaagaugagcgagugcgugcugggccagagcaagcggguggacuuuugcggcaagggcuaccaccugaugagcuucccccagagcgcuccccacggcgugguguuccuccacgugacauacguccccgcccaggagaagaacuucaccaccgcccccgccauuugccacgacggcaaggcccacuucccccgggagggaguguucgugagcaacggcacccacugguucgugacccagcggaacuucuacgagccucagaucaucaccaccgacaacaccuucgugagcggcaacugcgacguggugaucggcaucgugaacaacaccguguacgacccccugcagcccgagcuggacagcuucaaggaggagcuggacaaguacuucaagaaccacaccagcccagacguggaccugggcgacaucagcggcaucaacgccagcguggugaacauccagaaggagaucgaccggcugaacgagguggccaagaaccugaacgagagccugaucgaccugcaggagcugggcaaguacgagcaguacaucaaguggcccugguacaucuggcugggcuucaucgccggccugaucgccaucgugauggugaccaucaugcugugcugcaugaccagcugcuguagcugccugaagggcugcugcagcugcggcagcugcugcaaguucgacgaggacgacagcgagcccgugcugaagggcgugaagcugcacuacaccugaugacucgagcugguacugcaugcacgcaaugcuagcugccccuuucccguccuggguaccccgagucucccccgaccucgggucccagguaugcucccaccuccaccugccccacucaccaccucugcuaguuccagacaccucccaagcacgcagcaaugcagcucaaaacgcuuagccuagccacacccccacgggaaacagcagugauuaaccuuuagcaauaaacgaaaguuuaacuaagcuauacuaaccccaggguuggucaauuucgugccagccacacccuggagcuagcaaaaaaaaaaaaaaaaaaaaaaaaaaaaaagcauaugacuaaaaaaaaaaaaaaaaaaaaaaaaaaaaaaaaaaaaaaaaaaaaaaaaaaaaaaaaaaaaaaaaaaaaaa

SEQ ID NO: 26885 - RNA, 4274 nt, Artificial Sequence
  SARS-CoV-2/Wuhan/WIV05/2019__EPI_ISL_402128 spike protein mRNA gc (1-1273)(K986P_V987P_K986P_V987P_L18F_D80A_D215G_L242del_A243del_ L244del_R246I_K417N_E484K_N501Y_D614G_A701V)
agaauaaacuaguauucuucugguccccacagacucagagagaacccgccaccauguucguguuccuggugcugcugccccuggugagcagccagugcgugaacuucaccacccggacccagcugcccccugccuacaccaacagcuucacccggggcguguacuaccccgacaagguguuccggagcagcgugcugcacagcacccaggaccuguuccugcccuucuucagcaacgugaccugguuccacgccauccacgugagcggcaccaacggcaccaagcgguucgccaacccagugcugcccuucaacgacggcguguacuucgccagcaccgagaagucaaacaucauccggggcuggaucuuuggcaccacccuggacagcaagacacagagccugcugaucgugaacaacgcuaccaacguggugaucaaggugugcgaguuccaguucugcaacgaccccuuccugggcguguacuaccacaagaacaacaagagcuggauggagagcgaguuccgggucuacagcagcgccaacaauugcaccuucgaguacgugagccagcccuuccugauggaccuggagggcaagcagggcaacuucaagaaccuccgggaguucguguucaagaacaucgacggcuacuucaagaucuacagcaagcacacccccaucaaccuggugcggggacugccccagggcuucagcgcccuggagccucugguggaucugcccaucggcaucaacaucaccagguuccagacccugcacaucagcuaccugacccccggcgacagcagcagcggcuggaccgccggcgccgccgcauacuacgugggcuaccugcagccacggaccuuccugcugaaguacaacgagaacggcaccaucaccgacgccguggacugcgcccuggacccccugagcgagaccaagugcacccuuaagagcuucaccguggagaagggcaucuaccagaccagcaacuuccgggugcagcccacugagagcauugugcgguuccccaacaucaccaaccugugucccuucggcgagguguucaacgccacccgguucgccagcguguacgccuggaaccggaagcggaucagcaacugcguggccgacuacagcgugcuguacaacagcgccagcuucagcaccuucaagugcuacggcgugagcccuaccaagcugaacgaccugugcuucaccaacguguacgcugacagcuucgugauccggggcgacgaggugcggcagaucgcccccggccagaccggcaacaucgccgacuacaacuacaagcugcccgacgacuucaccggcugcgugaucgccuggaacagcaacaaccuggacagcaaggugggcggcaacuacaacuaccuguaccggcuauuccguaagagcaaccugaagccauuugagcgggacaucagcaccgagaucuaccaggccgguagcacccccugcaacggcgugaagggcuucaacugcuacuucccccugcagagcuacggcuuccagcccaccuacggcgugggcuaccagcccuaccgggugguggugcugagcuucgagcugcugcacgcccccgccaccgugugcggcccuaaaaagagcaccaaccuggugaagaacaagugcgugaacuucaauuucaacggccugaccggcaccggcgugcugaccgagagcaacaagaaguuccugcccuuccagcaguucggccgggacaucgccgacaccaccgaugcagugcgggacccccagacccuggagauccuggacaucaccccaugcagcuucggcggcgugagcgucaucacccccggaacaaacaccagcaaccagguggccgugcuguaccagggcgugaacugcaccgaggugcccguggccauccacgccgaccagcugacccccaccuggcggguguacagcaccggcagcaacguguuccagacccgggccggcugccugaucggcgccgagcacgugaacaacuccuacgagugcgacauccccaucggcgcuggcaucugcgccagcuaccagacccagaccaacagcccccggcgggcccggagcguggccagccagagcaucaucgccuacaccaugagccugggcguggagaacagcguggccuacagcaacaacagcaucgccaucccuaccaacuucaccauaagcgugaccaccgagauccugcccgugagcaugaccaagaccagcguggacuguaccauguacaucugcggcgacagcaccgagugcagcaaccuguuacugcaguacggcagcuucugcacccagcugaaccgggcgcugaccggcaucgccguggagcaggacaagaacacccaagagguguucgcccaggugaagcagaucuacaagacucccccaaucaaggacuucggcggcuucaacuucagccagauccugcccgaccccagcaagcccagcaagcggagcuucaucgaggaccugcuguucaacaaggugacccuggccgacgccggcuucaucaagcaguacggggacugccugggcgacaucgccgcccgggaccugaucugcgcucagaaguucaacggccugaccgugcugcccccucugcugaccgaugagaugaucgcccaguacaccagcgcccugcuggccggcaccaucaccagcggcuggaccuucggcgccggcgccgcacugcagauccccuucgccaugcagauggccuaccgguucaacggcaucggcgugacccagaacgugcuguacgagaaccagaagcugaucgccaaccaguucaacagcgccaucggcaagauccaggacagccugagcagcaccgccagcgcccugggcaagcugcaggacguggugaaccagaacgcccaggcucugaacacccuggugaagcagcugagcagcaacuuuggcgccaucagcucagugcugaaugacauccugagccggcuggaucccccagaggccgaggugcagaucgacaggcugaucaccggccggcugcagagccugcagaccuacgugacccagcagcugauccgggccgccgagauucgggccagcgccaaccuggccgcaaccaagaugagcgagugcgugcugggccagagcaagcggguggacuucugcggcaagggcuaccaccugaugagcuucccccagagcgcuccccacggcgugguguuccugcacgucacauacgugcccgcccaggagaagaacuucaccaccgcccccgccaucugccacgacggaaaggcccacuucccccgggagggcguguucgugagcaacggcacccacugguucgugacccagcggaacuucuacgagccucagaucaucaccaccgacaacaccuucgugagcggcaacugcgacguggugaucggcaucgugaacaacaccguguacgacccccugcagcccgagcuggacagcuucaaggaggagcucgacaaguacuucaagaaccacaccagcccagacguggaccugggcgacaucagcggcaucaacgccagcguggugaacauccagaaggagaucgaccggcugaacgagguggccaagaaccugaacgagagccugaucgaccugcaggagcugggcaaguacgagcaguacaucaaguggcccugguacaucuggcugggcuucaucgccggccugaucgccaucgugauggugaccaucaugcugugcugcaugaccagcugcuguagcugccugaagggcugcugcagcugcggcagcugcugcaaguucgacgaggacgacagcgagcccgugcugaagggcgugaagcugcacuacaccugaugacucgagcugguacugcaugcacgcaaugcuagcugccccuuucccguccuggguaccccgagucucccccgaccucgggucccagguaugcucccaccuccaccugccccacucaccaccucugcuaguuccagacaccucccaagcacgcagcaaugcagcucaaaacgcuuagccuagccacacccccacgggaaacagcagugauuaaccuuuagcaauaaacgaaaguuuaacuaagcuauacuaaccccaggguuggucaauuucgugccagccacacccuggagcuagcaaaaaaaaaaaaaaaaaaaaaaaaaaaaaagcauaugacuaaaaaaaaaaaaaaaaaaaaaaaaaaaaaaaaaaaaaaaaaaaaaaaaaaaaaaaaaaaaaaaaaaaaaa

SEQ ID NO: 26886 - RNA, 4283 nt, Artificial Sequence
  SARS-CoV-2/Wuhan/WIV05/2019__EPI_ISL_402128 spike protein mRNA gc (1-1273)(K986P_V987P_K986P_V987P_E484K_D614G)
agaauaaacuaguauucuucugguccccacagacucagagagaacccgccaccauguucguguuccuggugcugcugccccuggugagcagccagugcgugaaccugaccacccggacccagcugcccccugccuacaccaacagcuucacccggggcguguacuaccccgacaagguguuccggagcagcgugcugcacagcacccaggaccuguuccugcccuucuucagcaacgugaccugguuccacgccauccacgugagcggcaccaacggcaccaagcgguucgacaacccagugcugcccuucaacgacggcguguacuucgccagcaccgagaagucaaacaucauccggggcuggaucuucggcaccacccuggacagcaagacacagagccugcugaucgugaacaacgccaccaacguggugaucaaggugugcgaguuucaguucugcaacgaccccuuccugggcguguacuaccacaagaacaacaagagcuggauggagagcgaguuccgggucuacagcagcgcuaacaauugcaccuucgaguacgugagccagcccuuccugauggaccucgagggcaagcagggcaacuucaagaaccugcgggaguucguguucaagaacaucgauggcuacuucaagaucuacagcaagcacacccccaucaaccuggugcgggaccugccccagggauucagcgcccuggagccucugguggaccugcccaucggcaucaacaucaccagguuccagacccugcuggcccugcaccggagcuaccugacccccggcgacagcagcagcggcuggaccgccggcgccgccgcauacuacgugggcuaccugcagccacggaccuuccugcugaaguacaacgagaacggcaccaucaccgacgccguggacugcgcccuggacccccugagcgagaccaagugcacccuaaagagcuucaccguggagaagggcaucuaccagaccagcaacuuccgggugcagcccacugagagcaucgugcgguuccccaacauuaccaaccugugucccuucggcgagguguucaacgccacccgguucgccagcguguacgccuggaaccggaagcggaucagcaacugcguggccgacuacagcgugcuguacaacagcgccagcuucagcaccuucaagugcuacggcgugagcccuaccaagcugaacgaccugugcuucaccaacguguacgcugacagcuucgugauccggggcgacgaggugcggcagaucgcccccggccagaccggcaagaucgccgacuacaacuacaagcugcccgacgacuucaccggcugcgugaucgccuggaacagcaacaaccuggacagcaaggugggcggcaacuacaacuaccuguaccggcuguuccguaagagcaaccugaagccauucgagcgggacaucagcaccgagaucuaccaggccggcagcacccccugcaacggugugaagggcuuuaacugcuacuucccccugcagagcuacggcuuccagcccaccaacggcgugggcuaccagcccuaccgggugguggugcugagcuucgagcugcugcacgcccccgccaccgugugcggcccuaaaaagagcaccaaccuggugaagaacaagugcgugaacuucaauuucaacggccugaccggcaccggcgugcugaccgagagcaacaagaaguuccugcccuuccagcaguucggccgggauaucgccgacaccaccgacgcagugcgggacccccagacccuggagauccuggacaucaccccaugcagcuucggcggcgugagcgucaucacccccggcacaaacaccagcaaccagguggccgugcuguaccagggagugaacugcaccgaggugcccguggccauccacgccgaccagcugacccccaccuggcggguguacagcaccggcagcaacguguuccagacccgggccggcugccugaucggcgccgagcacgugaacaacuccuacgagugcgacauccccaucggcgcuggcaucugcgccagcuaccagacccagaccaacagcccccggcgggcccggagcguggccagccagagcaucaucgccuacaccaugagcuuaggcgccgagaacagcguggccuacagcaacaacagcaucgcgaucccuaccaacuucaccaucagcgugaccaccgagauacugcccgugagcaugaccaagaccagcguggacuguaccauguacaucugcggcgacagcaccgagugcagcaaccugcugcugcaguacggcagcuucugcacccagcugaaccgggcccugaccggcaucgccguggagcaggacaagaacacccaagagguguucgcccaggugaagcagaucuacaagacucccccaaucaaggacuucggcggcuucaacuucagccagauccugcccgaccccagcaagcccagcaagcggagcuucaucgaggaccugcuguucaacaaggugacccuggccgacgccggcuucaucaagcaguacggcgacugccugggggauaucgccgcucgggaccugaucugcgcccagaaguucaacggccugaccgugcugcccccucugcugaccgacgagaugaucgcccaguacaccagcgcccugcuugccggcaccaucaccagcggcuggaccuucggcgccggcgcagcccugcagauccccuucgccaugcagauggccuaccgguucaacggcaucggcgugacccagaacgugcuguacgagaaccagaagcugaucgccaaccaguucaacagcgccaucggcaagauccaggacagccugagcagcaccgccagcgcccugggcaagcugcaggacguggugaaccagaacgcucaggcccugaacacccuggugaagcagcugagcagcaacuucggcgccaucagcucagugcugaaugacauccugagcaggcuggaucccccagaggccgaggugcagaucgaccggcugaucaccggccggcugcagagccugcagaccuacgugacccagcagcugauccgggccgccgagauccgggccagcgccaaccuggcagccaccaagaugagcgagugcgugcugggccagagcaagcggguggacuuuugcggcaagggcuaccaccugaugagcuucccccagagcgcuccccacggcgugguguuccuccacgugacauacguccccgcccaggagaagaacuucaccaccgcccccgccauuugccacgacggcaaggcccacuucccccgggagggaguguucgugagcaacggcacccacugguucgugacccagcggaacuucuacgagccucagaucaucaccaccgacaacaccuucgugagcggcaacugcgacguggugaucggcaucgugaacaacaccguguacgacccccugcagcccgagcuggacagcuucaaggaggagcuggacaaguacuucaagaaccacaccagcccagacguggaccugggcgacaucagcggcaucaacgccagcguggugaacauccagaaggagaucgaccggcugaacgagguggccaagaaccugaacgagagccugaucgaccugcaggagcugggcaaguacgagcaguacaucaaguggcccugguacaucuggcugggcuucaucgccggccugaucgccaucgugauggugaccaucaugcugugcugcaugaccagcugcuguagcugccugaagggcugcugcagcugcggcagcugcugcaaguucgacgaggacgacagcgagcccgugcugaagggcgugaagcugcacuacaccugaugacucgagcugguacugcaugcacgcaaugcuagcugccccuuucccguccuggguaccccgagucucccccgaccucgggucccagguaugcucccaccuccaccugccccacucaccaccucugcuaguuccagacaccucccaagcacgcagcaaugcagcucaaaacgcuuagccuagccacacccccacgggaaacagcagugauuaaccuuuagcaauaaacgaaaguuuaacuaagcuauacuaaccccaggguuggucaauuucgugccagccacacccuggagcuagcaaaaaaaaaaaaaaaaaaaaaaaaaaaaaagcauaugacuaaaaaaaaaaaaaaaaaaaaaaaaaaaaaaaaaaaaaaaaaaaaaaaaaaaaaaaaaaaaaaaaaaaaaa

SEQ ID NO: 26887 - RNA, 4283 nt, Artificial Sequence
  SARS-CoV-2/Wuhan/WIV05/2019__EPI_ISL_402128 spike protein mRNA gc (1-1273)(K986P_V987P_K986P_V987P_L18F_T20N_P26S_D138Y_R190S_K417T _E484K_N501Y_D614G_H655Y_T1027I)
agaauaaacuaguauucuucugguccccacagacucagagagaacccgccaccauguucguguuccuggugcugcugccccuggugagcagccagugcgugaacuucaccaaccggacccagcugcccagcgccuacaccaacagcuucacccggggcguguacuacccugacaagguguuccggagcagcgugcugcacagcacccaggaccuguuccugcccuucuucagcaacgugaccugguuccacgccauccacgugagcggcaccaacggcaccaagcgguucgacaaccccgugcugccauucaacgacggcguguacuucgccagcaccgagaagucaaacaucauccggggcuggaucuuuggcaccacccuggacagcaagacccagagccugcugaucgugaacaacgccacaaacguggugaucaaggugugcgaguuccaguucugcaacuaccccuuccugggcguguacuaccacaagaacaacaagagcuggauggagagcgaguuccgggucuacagcagcgcuaauaacugcaccuucgaguacgugagccagcccuuccugauggaccuggagggcaagcagggcaacuucaagaaccucagcgaguucguguucaagaacaucgacggcuacuucaagaucuacagcaagcacacccccaucaaccuggugcgggaucugccccagggauucagcgcccuggagccccugguggaccugccuaucggcaucaacaucacccgguuccagacccugcuggcccugcacaggagcuaccugacccccggcgacagcagcagcggcuggaccgccggcgccgccgcauacuacgugggcuaccugcagccccggaccuuccugcugaaguacaacgagaacggcaccaucaccgacgccguggacugcgcccuggacccacugagcgagaccaagugcacccuaaagagcuucaccguggagaagggcaucuaccagaccagcaacuuccgggugcagcccaccgagagcaucgugcgguuccccaacauuacuaaccugugucccuucggcgagguguucaacgccacccgguucgccagcguguacgccuggaaccggaagcggaucagcaacugcguggccgacuacagcgugcuguacaacagcgccagcuucagcaccuucaagugcuacggcgugagccccaccaagcugaacgaccugugcuucaccaacguguacgcugacagcuucgugauccggggcgacgaggugcggcagaucgccccuggccagaccggcaccaucgccgacuacaacuacaagcugcccgacgacuucaccggcugcgugaucgccuggaacagcaacaaccuggacagcaaggugggcggcaacuacaacuaccuguaccggcuguuccguaagagcaaccugaagcccuuugagcgggacaucagcaccgagaucuaccaggccggcagcaccccaugcaacggugugaagggcuucaacugcuacuucccccugcagagcuacggcuuccagcccaccuacggcgugggcuaccagcccuaccgggugguggugcugagcuucgagcugcugcacgcccccgccaccgugugcggccccaaaaagagcaccaaccuggugaagaacaagugcgugaacuucaauuucaacggccugaccggcaccggcgugcugaccgagagcaacaagaaguuccugccuuuccagcaguucggccgggacaucgccgauaccaccgacgcagugcgggacccccagacccuggagauccuggacaucacccccugcagcuucggcggcgugagcgucaucaccccaggcacaaacaccagcaaccagguggccgugcuguaccagggagugaacugcaccgaggugcccguggccauccacgccgaccagcugacccccaccuggcggguguacuccaccggcagcaacguguuccagacccgggccggcugccugaucggcgccgaguacgugaacaacagcuacgagugcgacauccccaucggcgcuggcaucugcgccagcuaccagacccagaccaacagcccccggcgggcccggagcguggccagccagagcaucaucgccuacaccaugagccugggcgccgagaacagcguggccuacagcaacaacagcaucgcgauccccaccaacuucaccaucagcgugaccaccgagauauuaccugugagcaugaccaagaccagcguggacuguaccauguacaucugcggcgacagcaccgagugcagcaaccugcugcugcaguacggcagcuucugcacccagcugaaccgggcccugaccggcaucgccguggagcaggacaagaacacccaagagguguucgcccaggugaagcagaucuacaagacuccacccaucaaggacuucggcggcuucaacuucagccagauccugcccgaccccagcaagcccagcaagcggagcuucaucgaggaccugcuguucaacaaggugacccuggccgacgccggcuucaucaagcaguacggcgacugccugggggacaucgccgcucgggaucugaucugcgcccagaaguucaacggccugaccgugcugccuccccugcugaccgacgagaugaucgcccaguacaccagcgcccugcuggccggcaccaucaccagcggcuggaccuucggcgccggcgcagcccuucagauccccuucgccaugcagauggccuaccgguucaacggcaucggcgugacccagaacgugcuguacgagaaccagaagcugaucgccaaccaguucaacagcgccaucggcaagauccaggacagccugagcagcaccgccagcgcccugggcaagcugcaggacguggugaaccagaacgcucaggcccugaacacccuggugaagcagcugagcucaaacuuuggcgccaucagcagcgugcugaaugacauccugagccggcuggacccacccgaggccgaggugcagaucgacaggcugaucaccggccggcugcagagccugcagaccuacgugacccagcagcugauccgggccgccgagauccgggccagcgccaaccuggcagccauuaagaugagcgagugcgugcugggccagagcaagcggguggacuucugcggcaagggcuaccaccugaugagcuucccccagagcgcuccccacggcgugguguuccugcacgugaccuacguccccgcccaggagaagaacuucacaaccgcccccgccaucugccacgacggcaaggcccacuucccccgggagggaguguucgugagcaacggcacccacugguucgugacccagcggaacuucuacgagccccagaucaucaccaccgacaacaccuucgugagcggcaacugcgacguggugaucggcaucgugaacaacaccguguacgacccucuccagcccgagcuggacagcuucaaggaggagcuggacaaguacuucaagaaccacaccagccccgacguggaccugggcgauaucagcggcaucaacgccagcguggugaacauccagaaggagaucgaccggcugaacgagguggccaagaaccugaacgagagccugaucgaccugcaggagcugggcaaguacgagcaguacaucaaguggccaugguacaucuggcugggcuucaucgccggccugaucgccaucgugauggugaccaucaugcugugcugcaugaccagcugcuguagcugccugaagggcugcugcagcugcggcagcugcugcaaguucgacgaggacgacagcgagcccgugcugaagggcgugaagcugcacuacaccugaugacucgagcugguacugcaugcacgcaaugcuagcugccccuuucccguccuggguaccccgagucucccccgaccucgggucccagguaugcucccaccuccaccugccccacucaccaccucugcuaguuccagacaccucccaagcacgcagcaaugcagcucaaaacgcuuagccuagccacacccccacgggaaacagcagugauuaaccuuuagcaauaaacgaaaguuuaacuaagcuauacuaaccccaggguuggucaauuucgugccagccacacccuggagcuagcaaaaaaaaaaaaaaaaaaaaaaaaaaaaaagcauaugacuaaaaaaaaaaaaaaaaaaaaaaaaaaaaaaaaaaaaaaaaaaaaaaaaaaaaaaaaaaaaaaaaaaaaaa

SEQ ID NO: 26888 - RNA, 4283 nt, Artificial Sequence
  SARS-CoV-2/Wuhan/WIV05/2019__EPI_ISL_402128 spike protein mRNA gc (1-1273)(K986P_V987P_K986P_V987P_S13I_W152C_L452R_D614G)
agaauaaacuaguauucuucugguccccacagacucagagagaacccgccaccauguucguguuccuggugcugcugccccuggugagcauccagugcgugaaccugaccacccggacccagcugcccccugccuacaccaacagcuucacccggggcguguacuaccccgacaagguguuccggagcagcgugcugcacagcacccaggaccuguuccugcccuucuucagcaacgugaccugguuccacgccauccacgugagcggcaccaacggcaccaagcgguucgacaacccagugcugcccuucaacgacggcguguacuucgccagcaccgagaagucaaacaucauccggggcuggaucuucggcaccacccuggacagcaagacacagagccugcugaucgugaacaacgccaccaacguggugaucaaggugugcgaguuucaguucugcaacgaccccuuccugggcguguacuaccacaagaacaacaagagcugcauggagagcgaguuccgggucuacagcagcgcuaacaauugcaccuucgaguacgugagccagcccuuccugauggaccucgagggcaagcagggcaacuucaagaaccugcgggaguucguguucaagaacaucgauggcuacuucaagaucuacagcaagcacacccccaucaaccuggugcgggaccugccccagggauucagcgcccuggagccucugguggaccugcccaucggcaucaacaucaccagguuccagacccugcuggcccugcaccggagcuaccugacccccggcgacagcagcagcggcuggaccgccggcgccgccgcauacuacgugggcuaccugcagccacggaccuuccugcugaaguacaacgagaacggcaccaucaccgacgccguggacugcgcccuggacccccugagcgagaccaaguguacccuaaagagcuucaccguggagaagggcaucuaccagaccagcaacuuccgggugcagcccacugagagcauugugcgguuccccaacaucaccaaccugugccccuucggcgagguguucaacgccacccgguucgccagcguguacgccuggaaccggaagcggaucagcaacugcguggccgacuacagcgugcuguacaacagcgccagcuucagcaccuucaagugcuacggcgugagcccuaccaagcugaacgaccugugcuucaccaacguguacgcugacagcuucgugauccggggcgacgaggugcggcagaucgcccccggccagaccggcaagaucgccgacuacaacuacaagcugcccgacgacuucaccggcugcgugaucgccuggaacagcaacaaccuggacagcaaggugggcggcaacuacaacuaccgguaccggcuguuccguaagagcaaccugaagccauucgagcgggacaucagcaccgagaucuaccaggccggcagcacccccugcaacgguguggagggcuuuaacugcuacuucccccugcagagcuacggcuuccagcccaccaacggcgugggcuaccagcccuaccgggugguggugcugagcuucgagcugcugcacgcccccgccaccgugugcggcccuaaaaagagcaccaaccuggugaagaacaagugcgugaacuucaauuucaacggccugaccggcaccggcgugcugaccgagagcaacaagaaguuccugcccuuccagcaguucggccgggauaucgccgacaccaccgacgcagugcgggacccccagacccuggagauccuggacaucaccccaugcagcuucggcggcgugagcgucaucacccccggcacaaacaccagcaaccagguggccgugcuguaccagggagugaacugcaccgaggugcccguggccauccacgccgaccagcugacccccaccuggcggguguacagcaccggcagcaacguguuccagacccgggccggcugccugaucggcgccgagcacgugaacaacagcuacgagugcgacauccccaucggcgcuggcaucugugccuccuaccagacccagaccaacagcccccggcgggcccggagcguggccagccagagcaucaucgccuacaccaugagccugggcgccgagaacagcguggccuacagcaacaacagcaucgcgaucccuaccaacuucaccauaagcgugaccaccgagaucuuacccgugagcaugaccaagaccagcguggacugcaccauguacaucugcggcgacagcaccgagugcagcaaccugcugcugcaguacggcagcuucugcacccagcugaaccgggcccugaccggcaucgccguggagcaggacaagaacacccaagagguguucgcccaggugaagcagaucuacaagacucccccaaucaaggacuucggcggcuucaacuucagccagauccugcccgaccccagcaagcccagcaagcggagcuucaucgaggaccugcuguucaacaaggugacccuggccgacgccggcuucaucaagcaguacggcgacugccugggggauaucgccgcucgggaccugaucugcgcccagaaguucaacggccugaccgugcugcccccucugcugaccgacgagaugaucgcccaguacaccagcgcccugcuggccggcaccaucaccagcggcuggaccuucggcgccggcgcagcccuucagauccccuucgccaugcagauggccuacagguucaacggcaucggcgugacccagaacgugcuguacgagaaccagaagcugaucgccaaccaguucaacagcgccaucggcaagauccaggacagccugagcagcaccgccagcgcccugggcaagcugcaggacguggugaaccagaacgcucaggcccugaacacccuggugaagcagcugagcagcaacuucggcgccaucagcagcgugcugaaugacauccugucacggcuggaucccccagaggccgaggugcagaucgaccggcugaucaccggccggcugcagagccugcagaccuacgugacccagcagcugauccgggccgccgagauucgggccagcgccaaccuggcagccaccaagaugagcgagugcgugcugggccagagcaagcggguggacuuuugcggcaagggcuaccaccugaugagcuucccccagagcgcuccccacggcgugguguuccugcacgugacauacguccccgcccaggagaagaacuucaccaccgcccccgccaucugccacgacggcaaggcccacuucccccgggagggaguguucgugagcaacggcacccacugguucgugacccagcggaacuucuacgagccucagaucaucaccaccgacaacaccuucgugagcggcaacugcgacguggugaucggcaucgugaacaacaccguguacgacccccuccagcccgagcuggacagcuucaaggaggagcuggacaaguacuucaagaaccacaccagcccagacguggaccugggcgacaucagcggcaucaacgccagcguggugaacauccagaaggagaucgaccggcugaacgagguggccaagaaccugaacgagagccugaucgaccugcaggagcugggcaaguacgagcaguacaucaaguggcccugguacaucuggcugggcuucaucgccggccugaucgccaucgugauggugaccaucaugcugugcugcaugaccagcuguugcagcugccugaagggcugcugcagcugcggcagcugcugcaaguucgacgaggacgacagcgagcccgugcugaagggcgugaagcugcacuacaccugaugacucgagcugguacugcaugcacgcaaugcuagcugccccuuucccguccuggguaccccgagucucccccgaccucgggucccagguaugcucccaccuccaccugccccacucaccaccucugcuaguuccagacaccucccaagcacgcagcaaugcagcucaaaacgcuuagccuagccacacccccacgggaaacagcagugauuaaccuuuagcaauaaacgaaaguuuaacuaagcuauacuaaccccaggguuggucaauuucgugccagccacacccuggagcuagcaaaaaaaaaaaaaaaaaaaaaaaaaaaaaagcauaugacuaaaaaaaaaaaaaaaaaaaaaaaaaaaaaaaaaaaaaaaaaaaaaaaaaaaaaaaaaaaaaaaaaaaaaa

SEQ ID NO: 26889 - RNA, 4283 nt, Artificial Sequence
  SARS-CoV-2/Wuhan/WIV05/2019__EPI_ISL_402128 spike protein mRNA gc mod (1-1273)(K986P_V987P)
agaauaaacuaguauucuucugguccccacagacucagagagaacccgccaccauguucguguuucuggugcugcugccccugguguccagccagugugugaaccugaccaccagaacacagcugccuccagccuacaccaacagcuucaccagaggcguguacuaccccgacaagguguucagauccagcgugcugcacucuacccaggaccuguuccugccuuucuucagcaacgugaccugguuccacgccauccacguguccggcaccaauggcaccaagagauucgacaaccccgugcugcccuucaacgacgggguguacuuugccagcaccgagaaguccaacaucaucagaggcuggaucuucggcaccacacuggacagcaagacccagagccugcugaucgugaacaacgccaccaacguggucaucaaagugugcgaguuccaguucugcaacgaccccuuccugggcgucuacuaccacaagaacaacaagagcuggauggaaagcgaguuccggguguacagcagcgccaacaacugcaccuucgaguacgugucccagccuuuccugauggaccuggaaggcaagcagggcaacuucaagaaccugcgcgaguucguguucaagaacaucgacggcuacuucaaaaucuacagcaagcacaccccuaucaaccucgugcgggaucugccucagggcuucucugcucuggaaccccugguggaucugcccaucggcaucaacaucacccgguuucagacacugcuggcccugcacagaagcuaccugacaccuggcgauagcagcagcggauggacagcuggugccgccgcuuacuaugugggcuaccugcagccuagaaccuuccugcugaaguacaacgagaacggcaccaucaccgacgccguggauugugcucuggauccucugagcgagacaaagugcacccugaaguccuucaccguggaaaagggcaucuaccagaccagcaacuuccgggugcagcccaccgaauccaucgugcgguuccccaauaucaccaaucugugccccuucggcgagguguucaaugccaccagauucgccucuguguacgccuggaaccggaagcggaucagcaauugcguggccgacuacuccgugcuguacaacuccgccagcuucagcaccuucaagugcuacggcguguccccuaccaagcugaacgaccugugcuucacaaacguguacgccgacagcuucgugauccggggagaugaagugcggcagauugccccuggacagacaggcaagaucgccgacuacaacuacaagcugcccgacgacuucaccggcugugugauugccuggaacagcaacaaccuggacuccaaagucggcggcaacuacaauuaccuguaccggcuguuccggaaguccaaucugaagcccuucgagcgggacaucagcaccgaaaucuaucaggccggcagcaccccuugcaacggcguggaaggcuucaacugcuacuucccacugcaguccuacggcuuucagcccacaaauggcgugggcuaucagcccuacagagugguggugcugagcuucgaacugcugcaugcuccugccacagugugcggcccuaagaaaagcaccaaucucgugaagaacaaaugcgugaacuucaacuucaacggccugaccggcaccggcgugcugacagagagcaacaagaaguuccugccauuccagcaguuuggccgggauaucgccgauaccacagacgccguuagagauccccagacacuggaaauccuggacaucaccccaugcagcuucggcggagugucugugaucaccccuggcaccaacaccagcaaucagguggcagugcuguaccaggacgugaacuguaccgaagugcccguggccauucacgccgaucagcugacaccuacauggcggguguacuccaccggcagcaauguguuucagaccagagccggcugucugaucggagccgagcacgugaacaauagcuacgagugcgacauccccaucggcgcuggcaucugugccagcuaccagacacagacaaacagccccagacgggcuagaagcguggccagccagagcaucauugccuacacaaugucucugggcgccgagaacagcguggccuacuccaacaacucuaucgcuauccccaccaacuucaccaucagcgugaccaccgagauccugccuguguccaugaccaagaccagcguggacugcaccauguacaucugcggcgauuccaccgagugcuccaaccugcugcugcaguacggcagcuucugcacccagcugaauagagcccugacagggaucgccguggaacaggacaagaacacccaagagguguucgcccaagugaagcaaaucuacaagaccccuccuaucaaggacuucggcggcuucaauuucagccagauucugcccgauccuagcaagcccagcaagcggagcuucaucgaggaccugcuguucaacaaagugacacuggccgacgccggcuucaucaagcaguauggcgauugucugggcgacauugccgccagggaucugauuugcgcccagaaguuuaacggacugacagugcugccuccucugcugaccgaugagaugaucgcccaguacacaucugcccugcuggccggcacaaucacaagcggcuggacauuuggagcuggcgccgcucugcagauccccuuugcuaugcagauggccuaccgguucaacggcaucggagugacccagaaugugcuguacgagaaccagaagcugaucgccaaccaguucaacagcgccaucggcaagauccaggacagccugagcagcacagcaagcgcccugggaaagcugcaggacguggucaaccagaaugcccaggcacugaacacccuggucaagcagcuguccuccaacuucggcgccaucagcucugugcugaacgauauccugagcagacuggacccuccugaggccgaggugcagaucgacagacugaucacaggcagacugcagagccuccagacauacgugacccagcagcugaucagagccgccgagauuagagccucugccaaucuggccgccaccaagaugucugagugugugcugggccagagcaagagaguggacuuuugcggcaagggcuaccaccugaugagcuucccucagucugccccucacggcgugguguuucugcacgugacauaugugcccgcucaagagaagaauuucaccaccgcuccagccaucugccacgacggcaaagcccacuuuccuagagaaggcguguucguguccaacggcacccauugguucgugacacagcggaacuucuacgagccccagaucaucaccaccgacaacaccuucgugucuggcaacugcgacguugugaucggcauugugaacaauaccguguacgacccucugcagcccgagcuggacagcuucaaagaggaacuggacaaguacuuuaagaaccacacaagccccgacguggaccugggcgauaucagcggaaucaaugccagcgucgugaacauccagaaagagaucgaccggcugaacgagguggccaagaaucugaacgagagccugaucgaccugcaagaacuggggaaguacgagcaguacaucaaguggcccugguacaucuggcugggcuuuaucgccggacugauugccaucgugauggucacaaucaugcuguguugcaugaccagcugcuguagcugccugaagggcuguuguagcuguggcagcugcugcaaguucgacgaggacgauucugagcccgugcugaagggcgugaaacugcacuacaccugaugacucgagcugguacugcaugcacgcaaugcuagcugccccuuucccguccuggguaccccgagucucccccgaccucgggucccagguaugcucccaccuccaccugccccacucaccaccucugcuaguuccagacaccucccaagcacgcagcaaugcagcucaaaacgcuuagccuagccacacccccacgggaaacagcagugauuaaccuuuagcaauaaacgaaaguuuaacuaagcuauacuaaccccaggguuggucaauuucgugccagccacacccuggagcuagcaaaaaaaaaaaaaaaaaaaaaaaaaaaaaagcauaugacuaaaaaaaaaaaaaaaaaaaaaaaaaaaaaaaaaaaaaaaaaaaaaaaaaaaaaaaaaaaaaaaaaaaaaa

SEQ ID NO: 26890 - RNA, 4283 nt, Artificial Sequence
  SARS-CoV-2/Wuhan/WIV05/2019__EPI_ISL_402128 spike protein mRNA gc mod (1-1273)(K986P_V987P_ D614G)
agaauaaacuaguauucuucugguccccacagacucagagagaacccgccaccauguucguguuucuggugcugcugccccugguguccagccagugugugaaccugaccaccagaacacagcugccuccagccuacaccaacagcuucaccagaggcguguacuaccccgacaagguguucagauccagcgugcugcacucuacccaggaccuguuccugccuuucuucagcaacgugaccugguuccacgccauccacguguccggcaccaauggcaccaagagauucgacaaccccgugcugcccuucaacgacgggguguacuuugccagcaccgagaaguccaacaucaucagaggcuggaucuucggcaccacacuggacagcaagacccagagccugcugaucgugaacaacgccaccaacguggucaucaaagugugcgaguuccaguucugcaacgaccccuuccugggcgucuacuaccacaagaacaacaagagcuggauggaaagcgaguuccggguguacagcagcgccaacaacugcaccuucgaguacgugucccagccuuuccugauggaccuggaaggcaagcagggcaacuucaagaaccugcgcgaguucguguucaagaacaucgacggcuacuucaaaaucuacagcaagcacaccccuaucaaccucgugcgggaucugccucagggcuucucugcucuggaaccccugguggaucugcccaucggcaucaacaucacccgguuucagacacugcuggcccugcacagaagcuaccugacaccuggcgauagcagcagcggauggacagcuggugccgccgcuuacuaugugggcuaccugcagccuagaaccuuccugcugaaguacaacgagaacggcaccaucaccgacgccguggauugugcucuggauccucugagcgagacaaagugcacccugaaguccuucaccguggaaaagggcaucuaccagaccagcaacuuccgggugcagcccaccgaauccaucgugcgguuccccaauaucaccaaucugugccccuucggcgagguguucaaugccaccagauucgccucuguguacgccuggaaccggaagcggaucagcaauugcguggccgacuacuccgugcuguacaacuccgccagcuucagcaccuucaagugcuacggcguguccccuaccaagcugaacgaccugugcuucacaaacguguacgccgacagcuucgugauccggggagaugaagugcggcagauugccccuggacagacaggcaagaucgccgacuacaacuacaagcugcccgacgacuucaccggcugugugauugccuggaacagcaacaaccuggacuccaaagucggcggcaacuacaauuaccuguaccggcuguuccggaaguccaaucugaagcccuucgagcgggacaucagcaccgaaaucuaucaggccggcagcaccccuugcaacggcguggaaggcuucaacugcuacuucccacugcaguccuacggcuuucagcccacaaauggcgugggcuaucagcccuacagagugguggugcugagcuucgaacugcugcaugcuccugccacagugugcggcccuaagaaaagcaccaaucucgugaagaacaaaugcgugaacuucaacuucaacggccugaccggcaccggcgugcugacagagagcaacaagaaguuccugccauuccagcaguuuggccgggauaucgccgauaccacagacgccguuagagauccccagacacuggaaauccuggacaucaccccaugcagcuucggcggagugucugugaucaccccuggcaccaacaccagcaaucagguggcagugcuguaccagggcgugaacuguaccgaagugcccguggccauucacgccgaucagcugacaccuacauggcggguguacuccaccggcagcaauguguuucagaccagagccggcugucugaucggagccgagcacgugaacaauagcuacgagugcgacauccccaucggcgcuggcaucugugccagcuaccagacacagacaaacagccccagacgggcuagaagcguggccagccagagcaucauugccuacacaaugucucugggcgccgagaacagcguggccuacuccaacaacucuaucgcuauccccaccaacuucaccaucagcgugaccaccgagauccugccuguguccaugaccaagaccagcguggacugcaccauguacaucugcggcgauuccaccgagugcuccaaccugcugcugcaguacggcagcuucugcacccagcugaauagagcccugacagggaucgccguggaacaggacaagaacacccaagagguguucgcccaagugaagcaaaucuacaagaccccuccuaucaaggacuucggcggcuucaauuucagccagauucugcccgauccuagcaagcccagcaagcggagcuucaucgaggaccugcuguucaacaaagugacacuggccgacgccggcuucaucaagcaguauggcgauugucugggcgacauugccgccagggaucugauuugcgcccagaaguuuaacggacugacagugcugccuccucugcugaccgaugagaugaucgcccaguacacaucugcccugcuggccggcacaaucacaagcggcuggacauuuggagcuggcgccgcucugcagauccccuuugcuaugcagauggccuaccgguucaacggcaucggagugacccagaaugugcuguacgagaaccagaagcugaucgccaaccaguucaacagcgccaucggcaagauccaggacagccugagcagcacagcaagcgcccugggaaagcugcaggacguggucaaccagaaugcccaggcacugaacacccuggucaagcagcuguccuccaacuucggcgccaucagcucugugcugaacgauauccugagcagacuggacccuccugaggccgaggugcagaucgacagacugaucacaggcagacugcagagccuccagacauacgugacccagcagcugaucagagccgccgagauuagagccucugccaaucuggccgccaccaagaugucugagugugugcugggccagagcaagagaguggacuuuugcggcaagggcuaccaccugaugagcuucccucagucugccccucacggcgugguguuucugcacgugacauaugugcccgcucaagagaagaauuucaccaccgcuccagccaucugccacgacggcaaagcccacuuuccuagagaaggcguguucguguccaacggcacccauugguucgugacacagcggaacuucuacgagccccagaucaucaccaccgacaacaccuucgugucuggcaacugcgacguugugaucggcauugugaacaauaccguguacgacccucugcagcccgagcuggacagcuucaaagaggaacuggacaaguacuuuaagaaccacacaagccccgacguggaccugggcgauaucagcggaaucaaugccagcgucgugaacauccagaaagagaucgaccggcugaacgagguggccaagaaucugaacgagagccugaucgaccugcaagaacuggggaaguacgagcaguacaucaaguggcccugguacaucuggcugggcuuuaucgccggacugauugccaucgugauggucacaaucaugcuguguugcaugaccagcugcuguagcugccugaagggcuguuguagcuguggcagcugcugcaaguucgacgaggacgauucugagcccgugcugaagggcgugaaacugcacuacaccugaugacucgagcugguacugcaugcacgcaaugcuagcugccccuuucccguccuggguaccccgagucucccccgaccucgggucccagguaugcucccaccuccaccugccccacucaccaccucugcuaguuccagacaccucccaagcacgcagcaaugcagcucaaaacgcuuagccuagccacacccccacgggaaacagcagugauuaaccuuuagcaauaaacgaaaguuuaacuaagcuauacuaaccccaggguuggucaauuucgugccagccacacccuggagcuagcaaaaaaaaaaaaaaaaaaaaaaaaaaaaaagcauaugacuaaaaaaaaaaaaaaaaaaaaaaaaaaaaaaaaaaaaaaaaaaaaaaaaaaaaaaaaaaaaaaaaaaaaaa

SEQ ID NO: 26891 - RNA, 4283 nt, Artificial Sequence
  SARS-CoV-2/Wuhan/WIV05/2019__EPI_ISL_402128 spike protein mRNA gc mod (1-1273)(K986P_V987P_A222V_D614G)
agaauaaacuaguauucuucugguccccacagacucagagagaacccgccaccauguucguguuucuggugcugcugccccugguguccagccagugugugaaccugaccaccagaacacagcugccuccagccuacaccaacagcuucaccagaggcguguacuaccccgacaagguguucagauccagcgugcugcacucuacccaggaccuguuccugccuuucuucagcaacgugaccugguuccacgccauccacguguccggcaccaauggcaccaagagauucgacaaccccgugcugcccuucaacgacgggguguacuuugccagcaccgagaaguccaacaucaucagaggcuggaucuucggcaccacacuggacagcaagacccagagccugcugaucgugaacaacgccaccaacguggucaucaaagugugcgaguuccaguucugcaacgaccccuuccugggcgucuacuaccacaagaacaacaagagcuggauggaaagcgaguuccggguguacagcagcgccaacaacugcaccuucgaguacgugucccagccuuuccugauggaccuggaaggcaagcagggcaacuucaagaaccugcgcgaguucguguucaagaacaucgacggcuacuucaaaaucuacagcaagcacaccccuaucaaccucgugcgggaucugccucagggcuucucugugcuggaaccccugguggaucugcccaucggcaucaacaucacccgguuucagacacugcuggcccugcacagaagcuaccugacaccuggcgauagcagcagcggauggacagcuggugccgccgcuuacuaugugggcuaccugcagccuagaaccuuccugcugaaguacaacgagaacggcaccaucaccgacgccguggauugugcucuggauccucugagcgagacaaagugcacccugaaguccuucaccguggaaaagggcaucuaccagaccagcaacuuccgggugcagcccaccgaauccaucgugcgguuccccaauaucaccaaucugugccccuucggcgagguguucaaugccaccagauucgccucuguguacgccuggaaccggaagcggaucagcaauugcguggccgacuacuccgugcuguacaacuccgccagcuucagcaccuucaagugcuacggcguguccccuaccaagcugaacgaccugugcuucacaaacguguacgccgacagcuucgugauccggggagaugaagugcggcagauugccccuggacagacaggcaagaucgccgacuacaacuacaagcugcccgacgacuucaccggcugugugauugccuggaacagcaacaaccuggacuccaaagucggcggcaacuacaauuaccuguaccggcuguuccggaaguccaaucugaagcccuucgagcgggacaucagcaccgaaaucuaucaggccggcagcaccccuugcaacggcguggaaggcuucaacugcuacuucccacugcaguccuacggcuuucagcccacaaauggcgugggcuaucagcccuacagagugguggugcugagcuucgaacugcugcaugcuccugccacagugugcggcccuaagaaaagcaccaaucucgugaagaacaaaugcgugaacuucaacuucaacggccugaccggcaccggcgugcugacagagagcaacaagaaguuccugccauuccagcaguuuggccgggauaucgccgauaccacagacgccguuagagauccccagacacuggaaauccuggacaucaccccaugcagcuucggcggagugucugugaucaccccuggcaccaacaccagcaaucagguggcagugcuguaccagggcgugaacuguaccgaagugcccguggccauucacgccgaucagcugacaccuacauggcggguguacuccaccggcagcaauguguuucagaccagagccggcugucugaucggagccgagcacgugaacaauagcuacgagugcgacauccccaucggcgcuggcaucugugccagcuaccagacacagacaaacagccccagacgggcuagaagcguggccagccagagcaucauugccuacacaaugucucugggcgccgagaacagcguggccuacuccaacaacucuaucgcuauccccaccaacuucaccaucagcgugaccaccgagauccugccuguguccaugaccaagaccagcguggacugcaccauguacaucugcggcgauuccaccgagugcuccaaccugcugcugcaguacggcagcuucugcacccagcugaauagagcccugacagggaucgccguggaacaggacaagaacacccaagagguguucgcccaagugaagcaaaucuacaagaccccuccuaucaaggacuucggcggcuucaauuucagccagauucugcccgauccuagcaagcccagcaagcggagcuucaucgaggaccugcuguucaacaaagugacacuggccgacgccggcuucaucaagcaguauggcgauugucugggcgacauugccgccagggaucugauuugcgcccagaaguuuaacggacugacagugcugccuccucugcugaccgaugagaugaucgcccaguacacaucugcccugcuggccggcacaaucacaagcggcuggacauuuggagcuggcgccgcucugcagauccccuuugcuaugcagauggccuaccgguucaacggcaucggagugacccagaaugugcuguacgagaaccagaagcugaucgccaaccaguucaacagcgccaucggcaagauccaggacagccugagcagcacagcaagcgcccugggaaagcugcaggacguggucaaccagaaugcccaggcacugaacacccuggucaagcagcuguccuccaacuucggcgccaucagcucugugcugaacgauauccugagcagacuggacccuccugaggccgaggugcagaucgacagacugaucacaggcagacugcagagccuccagacauacgugacccagcagcugaucagagccgccgagauuagagccucugccaaucuggccgccaccaagaugucugagugugugcugggccagagcaagagaguggacuuuugcggcaagggcuaccaccugaugagcuucccucagucugccccucacggcgugguguuucugcacgugacauaugugcccgcucaagagaagaauuucaccaccgcuccagccaucugccacgacggcaaagcccacuuuccuagagaaggcguguucguguccaacggcacccauugguucgugacacagcggaacuucuacgagccccagaucaucaccaccgacaacaccuucgugucuggcaacugcgacguugugaucggcauugugaacaauaccguguacgacccucugcagcccgagcuggacagcuucaaagaggaacuggacaaguacuuuaagaaccacacaagccccgacguggaccugggcgauaucagcggaaucaaugccagcgucgugaacauccagaaagagaucgaccggcugaacgagguggccaagaaucugaacgagagccugaucgaccugcaagaacuggggaaguacgagcaguacaucaaguggcccugguacaucuggcugggcuuuaucgccggacugauugccaucgugauggucacaaucaugcuguguugcaugaccagcugcuguagcugccugaagggcuguuguagcuguggcagcugcugcaaguucgacgaggacgauucugagcccgugcugaagggcgugaaacugcacuacaccugaugacucgagcugguacugcaugcacgcaaugcuagcugccccuuucccguccuggguaccccgagucucccccgaccucgggucccagguaugcucccaccuccaccugccccacucaccaccucugcuaguuccagacaccucccaagcacgcagcaaugcagcucaaaacgcuuagccuagccacacccccacgggaaacagcagugauuaaccuuuagcaauaaacgaaaguuuaacuaagcuauacuaaccccaggguuggucaauuucgugccagccacacccuggagcuagcaaaaaaaaaaaaaaaaaaaaaaaaaaaaaagcauaugacuaaaaaaaaaaaaaaaaaaaaaaaaaaaaaaaaaaaaaaaaaaaaaaaaaaaaaaaaaaaaaaaaaaaaaa

SEQ ID NO: 26892 - RNA, 4283 nt, Artificial Sequence
  SARS-CoV-2/Wuhan/WIV05/2019__EPI_ISL_402128 spike protein mRNA gc mod (1-1273)(K986P_V987P_N439K_D614G)
agaauaaacuaguauucuucugguccccacagacucagagagaacccgccaccauguucguguuucuggugcugcugccccugguguccagccagugugugaaccugaccaccagaacacagcugccuccagccuacaccaacagcuucaccagaggcguguacuaccccgacaagguguucagauccagcgugcugcacucuacccaggaccuguuccugccuuucuucagcaacgugaccugguuccacgccauccacguguccggcaccaauggcaccaagagauucgacaaccccgugcugcccuucaacgacgggguguacuuugccagcaccgagaaguccaacaucaucagaggcuggaucuucggcaccacacuggacagcaagacccagagccugcugaucgugaacaacgccaccaacguggucaucaaagugugcgaguuccaguucugcaacgaccccuuccugggcgucuacuaccacaagaacaacaagagcuggauggaaagcgaguuccggguguacagcagcgccaacaacugcaccuucgaguacgugucccagccuuuccugauggaccuggaaggcaagcagggcaacuucaagaaccugcgcgaguucguguucaagaacaucgacggcuacuucaaaaucuacagcaagcacaccccuaucaaccucgugcgggaucugccucagggcuucucugcucuggaaccccugguggaucugcccaucggcaucaacaucacccgguuucagacacugcuggcccugcacagaagcuaccugacaccuggcgauagcagcagcggauggacagcuggugccgccgcuuacuaugugggcuaccugcagccuagaaccuuccugcugaaguacaacgagaacggcaccaucaccgacgccguggauugugcucuggauccucugagcgagacaaagugcacccugaaguccuucaccguggaaaagggcaucuaccagaccagcaacuuccgggugcagcccaccgaauccaucgugcgguuccccaauaucaccaaucugugccccuucggcgagguguucaaugccaccagauucgccucuguguacgccuggaaccggaagcggaucagcaauugcguggccgacuacuccgugcuguacaacuccgccagcuucagcaccuucaagugcuacggcguguccccuaccaagcugaacgaccugugcuucacaaacguguacgccgacagcuucgugauccggggagaugaagugcggcagauugccccuggacagacaggcaagaucgccgacuacaacuacaagcugcccgacgacuucaccggcugugugauugccuggaacagcaagaaccuggacuccaaagucggcggcaacuacaauuaccuguaccggcuguuccggaaguccaaucugaagcccuucgagcgggacaucagcaccgaaaucuaucaggccggcagcaccccuugcaacggcguggaaggcuucaacugcuacuucccacugcaguccuacggcuuucagcccacaaauggcgugggcuaucagcccuacagagugguggugcugagcuucgaacugcugcaugcuccugccacagugugcggcccuaagaaaagcaccaaucucgugaagaacaaaugcgugaacuucaacuucaacggccugaccggcaccggcgugcugacagagagcaacaagaaguuccugccauuccagcaguuuggccgggauaucgccgauaccacagacgccguuagagauccccagacacuggaaauccuggacaucaccccaugcagcuucggcggagugucugugaucaccccuggcaccaacaccagcaaucagguggcagugcuguaccagggcgugaacuguaccgaagugcccguggccauucacgccgaucagcugacaccuacauggcggguguacuccaccggcagcaauguguuucagaccagagccggcugucugaucggagccgagcacgugaacaauagcuacgagugcgacauccccaucggcgcuggcaucugugccagcuaccagacacagacaaacagccccagacgggcuagaagcguggccagccagagcaucauugccuacacaaugucucugggcgccgagaacagcguggccuacuccaacaacucuaucgcuauccccaccaacuucaccaucagcgugaccaccgagauccugccuguguccaugaccaagaccagcguggacugcaccauguacaucugcggcgauuccaccgagugcuccaaccugcugcugcaguacggcagcuucugcacccagcugaauagagcccugacagggaucgccguggaacaggacaagaacacccaagagguguucgcccaagugaagcaaaucuacaagaccccuccuaucaaggacuucggcggcuucaauuucagccagauucugcccgauccuagcaagcccagcaagcggagcuucaucgaggaccugcuguucaacaaagugacacuggccgacgccggcuucaucaagcaguauggcgauugucugggcgacauugccgccagggaucugauuugcgcccagaaguuuaacggacugacagugcugccuccucugcugaccgaugagaugaucgcccaguacacaucugcccugcuggccggcacaaucacaagcggcuggacauuuggagcuggcgccgcucugcagauccccuuugcuaugcagauggccuaccgguucaacggcaucggagugacccagaaugugcuguacgagaaccagaagcugaucgccaaccaguucaacagcgccaucggcaagauccaggacagccugagcagcacagcaagcgcccugggaaagcugcaggacguggucaaccagaaugcccaggcacugaacacccuggucaagcagcuguccuccaacuucggcgccaucagcucugugcugaacgauauccugagcagacuggacccuccugaggccgaggugcagaucgacagacugaucacaggcagacugcagagccuccagacauacgugacccagcagcugaucagagccgccgagauuagagccucugccaaucuggccgccaccaagaugucugagugugugcugggccagagcaagagaguggacuuuugcggcaagggcuaccaccugaugagcuucccucagucugccccucacggcgugguguuucugcacgugacauaugugcccgcucaagagaagaauuucaccaccgcuccagccaucugccacgacggcaaagcccacuuuccuagagaaggcguguucguguccaacggcacccauugguucgugacacagcggaacuucuacgagccccagaucaucaccaccgacaacaccuucgugucuggcaacugcgacguugugaucggcauugugaacaauaccguguacgacccucugcagcccgagcuggacagcuucaaagaggaacuggacaaguacuuuaagaaccacacaagccccgacguggaccugggcgauaucagcggaaucaaugccagcgucgugaacauccagaaagagaucgaccggcugaacgagguggccaagaaucugaacgagagccugaucgaccugcaagaacuggggaaguacgagcaguacaucaaguggcccugguacaucuggcugggcuuuaucgccggacugauugccaucgugauggucacaaucaugcuguguugcaugaccagcugcuguagcugccugaagggcuguuguagcuguggcagcugcugcaaguucgacgaggacgauucugagcccgugcugaagggcgugaaacugcacuacaccugaugacucgagcugguacugcaugcacgcaaugcuagcugccccuuucccguccuggguaccccgagucucccccgaccucgggucccagguaugcucccaccuccaccugccccacucaccaccucugcuaguuccagacaccucccaagcacgcagcaaugcagcucaaaacgcuuagccuagccacacccccacgggaaacagcagugauuaaccuuuagcaauaaacgaaaguuuaacuaagcuauacuaaccccaggguuggucaauuucgugccagccacacccuggagcuagcaaaaaaaaaaaaaaaaaaaaaaaaaaaaaagcauaugacuaaaaaaaaaaaaaaaaaaaaaaaaaaaaaaaaaaaaaaaaaaaaaaaaaaaaaaaaaaaaaaaaaaaaaa

SEQ ID NO: 26893 - RNA, 4283 nt, Artificial Sequence
  SARS-CoV-2/Wuhan/WIV05/2019__EPI_ISL_402128 spike protein mRNA gc mod (1-1273)(K986P_V987P_S477N_D614G)
agaauaaacuaguauucuucugguccccacagacucagagagaacccgccaccauguucguguuucuggugcugcugccccugguguccagccagugugugaaccugaccaccagaacacagcugccuccagccuacaccaacagcuucaccagaggcguguacuaccccgacaagguguucagauccagcgugcugcacucuacccaggaccuguuccugccuuucuucagcaacgugaccugguuccacgccauccacguguccggcaccaauggcaccaagagauucgacaaccccgugcugcccuucaacgacgggguguacuuugccagcaccgagaaguccaacaucaucagaggcuggaucuucggcaccacacuggacagcaagacccagagccugcugaucgugaacaacgccaccaacguggucaucaaagugugcgaguuccaguucugcaacgaccccuuccugggcgucuacuaccacaagaacaacaagagcuggauggaaagcgaguuccggguguacagcagcgccaacaacugcaccuucgaguacgugucccagccuuuccugauggaccuggaaggcaagcagggcaacuucaagaaccugcgcgaguucguguucaagaacaucgacggcuacuucaaaaucuacagcaagcacaccccuaucaaccucgugcgggaucugccucagggcuucucugcucuggaaccccugguggaucugcccaucggcaucaacaucacccgguuucagacacugcuggcccugcacagaagcuaccugacaccuggcgauagcagcagcggauggacagcuggugccgccgcuuacuaugugggcuaccugcagccuagaaccuuccugcugaaguacaacgagaacggcaccaucaccgacgccguggauugugcucuggauccucugagcgagacaaagugcacccugaaguccuucaccguggaaaagggcaucuaccagaccagcaacuuccgggugcagcccaccgaauccaucgugcgguuccccaauaucaccaaucugugccccuucggcgagguguucaaugccaccagauucgccucuguguacgccuggaaccggaagcggaucagcaauugcguggccgacuacuccgugcuguacaacuccgccagcuucagcaccuucaagugcuacggcguguccccuaccaagcugaacgaccugugcuucacaaacguguacgccgacagcuucgugauccggggagaugaagugcggcagauugccccuggacagacaggcaagaucgccgacuacaacuacaagcugcccgacgacuucaccggcugugugauugccuggaacagcaacaaccuggacuccaaagucggcggcaacuacaauuaccuguaccggcuguuccggaaguccaaucugaagcccuucgagcgggacaucagcaccgaaaucuaucaggccggcaacaccccuugcaacggcguggaaggcuucaacugcuacuucccacugcaguccuacggcuuucagcccacaaauggcgugggcuaucagcccuacagagugguggugcugagcuucgaacugcugcaugcuccugccacagugugcggcccuaagaaaagcaccaaucucgugaagaacaaaugcgugaacuucaacuucaacggccugaccggcaccggcgugcugacagagagcaacaagaaguuccugccauuccagcaguuuggccgggauaucgccgauaccacagacgccguuagagauccccagacacuggaaauccuggacaucaccccaugcagcuucggcggagugucugugaucaccccuggcaccaacaccagcaaucagguggcagugcuguaccagggcgugaacuguaccgaagugcccguggccauucacgccgaucagcugacaccuacauggcggguguacuccaccggcagcaauguguuucagaccagagccggcugucugaucggagccgagcacgugaacaauagcuacgagugcgacauccccaucggcgcuggcaucugugccagcuaccagacacagacaaacagccccagacgggcuagaagcguggccagccagagcaucauugccuacacaaugucucugggcgccgagaacagcguggccuacuccaacaacucuaucgcuauccccaccaacuucaccaucagcgugaccaccgagauccugccuguguccaugaccaagaccagcguggacugcaccauguacaucugcggcgauuccaccgagugcuccaaccugcugcugcaguacggcagcuucugcacccagcugaauagagcccugacagggaucgccguggaacaggacaagaacacccaagagguguucgcccaagugaagcaaaucuacaagaccccuccuaucaaggacuucggcggcuucaauuucagccagauucugcccgauccuagcaagcccagcaagcggagcuucaucgaggaccugcuguucaacaaagugacacuggccgacgccggcuucaucaagcaguauggcgauugucugggcgacauugccgccagggaucugauuugcgcccagaaguuuaacggacugacagugcugccuccucugcugaccgaugagaugaucgcccaguacacaucugcccugcuggccggcacaaucacaagcggcuggacauuuggagcuggcgccgcucugcagauccccuuugcuaugcagauggccuaccgguucaacggcaucggagugacccagaaugugcuguacgagaaccagaagcugaucgccaaccaguucaacagcgccaucggcaagauccaggacagccugagcagcacagcaagcgcccugggaaagcugcaggacguggucaaccagaaugcccaggcacugaacacccuggucaagcagcuguccuccaacuucggcgccaucagcucugugcugaacgauauccugagcagacuggacccuccugaggccgaggugcagaucgacagacugaucacaggcagacugcagagccuccagacauacgugacccagcagcugaucagagccgccgagauuagagccucugccaaucuggccgccaccaagaugucugagugugugcugggccagagcaagagaguggacuuuugcggcaagggcuaccaccugaugagcuucccucagucugccccucacggcgugguguuucugcacgugacauaugugcccgcucaagagaagaauuucaccaccgcuccagccaucugccacgacggcaaagcccacuuuccuagagaaggcguguucguguccaacggcacccauugguucgugacacagcggaacuucuacgagccccagaucaucaccaccgacaacaccuucgugucuggcaacugcgacguugugaucggcauugugaacaauaccguguacgacccucugcagcccgagcuggacagcuucaaagaggaacuggacaaguacuuuaagaaccacacaagccccgacguggaccugggcgauaucagcggaaucaaugccagcgucgugaacauccagaaagagaucgaccggcugaacgagguggccaagaaucugaacgagagccugaucgaccugcaagaacuggggaaguacgagcaguacaucaaguggcccugguacaucuggcugggcuuuaucgccggacugauugccaucgugauggucacaaucaugcuguguugcaugaccagcugcuguagcugccugaagggcuguuguagcuguggcagcugcugcaaguucgacgaggacgauucugagcccgugcugaagggcgugaaacugcacuacaccugaugacucgagcugguacugcaugcacgcaaugcuagcugccccuuucccguccuggguaccccgagucucccccgaccucgggucccagguaugcucccaccuccaccugccccacucaccaccucugcuaguuccagacaccucccaagcacgcagcaaugcagcucaaaacgcuuagccuagccacacccccacgggaaacagcagugauuaaccuuuagcaauaaacgaaaguuuaacuaagcuauacuaaccccaggguuggucaauuucgugccagccacacccuggagcuagcaaaaaaaaaaaaaaaaaaaaaaaaaaaaaagcauaugacuaaaaaaaaaaaaaaaaaaaaaaaaaaaaaaaaaaaaaaaaaaaaaaaaaaaaaaaaaaaaaaaaaaaaaa

SEQ ID NO: 26894 - RNA, 4283 nt, Artificial Sequence
  SARS-CoV-2/Wuhan/WIV05/2019__EPI_ISL_402128 spike protein mRNA gc mod (1-1273)(K986P_V987P_N501Y_D614G)
agaauaaacuaguauucuucugguccccacagacucagagagaacccgccaccauguucguguuucuggugcugcugccccugguguccagccagugugugaaccugaccaccagaacacagcugccuccagccuacaccaacagcuucaccagaggcguguacuaccccgacaagguguucagauccagcgugcugcacucuacccaggaccuguuccugccuuucuucagcaacgugaccugguuccacgccauccacguguccggcaccaauggcaccaagagauucgacaaccccgugcugcccuucaacgacgggguguacuuugccagcaccgagaaguccaacaucaucagaggcuggaucuucggcaccacacuggacagcaagacccagagccugcugaucgugaacaacgccaccaacguggucaucaaagugugcgaguuccaguucugcaacgaccccuuccugggcgucuacuaccacaagaacaacaagagcuggauggaaagcgaguuccggguguacagcagcgccaacaacugcaccuucgaguacgugucccagccuuuccugauggaccuggaaggcaagcagggcaacuucaagaaccugcgcgaguucguguucaagaacaucgacggcuacuucaaaaucuacagcaagcacaccccuaucaaccucgugcgggaucugccucagggcuucucugcucuggaaccccugguggaucugcccaucggcaucaacaucacccgguuucagacacugcuggcccugcacagaagcuaccugacaccuggcgauagcagcagcggauggacagcuggugccgccgcuuacuaugugggcuaccugcagccuagaaccuuccugcugaaguacaacgagaacggcaccaucaccgacgccguggauugugcucuggauccucugagcgagacaaagugcacccugaaguccuucaccguggaaaagggcaucuaccagaccagcaacuuccgggugcagcccaccgaauccaucgugcgguuccccaauaucaccaaucugugccccuucggcgagguguucaaugccaccagauucgccucuguguacgccuggaaccggaagcggaucagcaauugcguggccgacuacuccgugcuguacaacuccgccagcuucagcaccuucaagugcuacggcguguccccuaccaagcugaacgaccugugcuucacaaacguguacgccgacagcuucgugauccggggagaugaagugcggcagauugccccuggacagacaggcaagaucgccgacuacaacuacaagcugcccgacgacuucaccggcugugugauugccuggaacagcaacaaccuggacuccaaagucggcggcaacuacaauuaccuguaccggcuguuccggaaguccaaucugaagcccuucgagcgggacaucagcaccgaaaucuaucaggccggcagcaccccuugcaacggcguggaaggcuucaacugcuacuucccacugcaguccuacggcuuucagcccacauacggcgugggcuaucagcccuacagagugguggugcugagcuucgaacugcugcaugcuccugccacagugugcggcccuaagaaaagcaccaaucucgugaagaacaaaugcgugaacuucaacuucaacggccugaccggcaccggcgugcugacagagagcaacaagaaguuccugccauuccagcaguuuggccgggauaucgccgauaccacagacgccguuagagauccccagacacuggaaauccuggacaucaccccaugcagcuucggcggagugucugugaucaccccuggcaccaacaccagcaaucagguggcagugcuguaccagggcgugaacuguaccgaagugcccguggccauucacgccgaucagcugacaccuacauggcggguguacuccaccggcagcaauguguuucagaccagagccggcugucugaucggagccgagcacgugaacaauagcuacgagugcgacauccccaucggcgcuggcaucugugccagcuaccagacacagacaaacagccccagacgggcuagaagcguggccagccagagcaucauugccuacacaaugucucugggcgccgagaacagcguggccuacuccaacaacucuaucgcuauccccaccaacuucaccaucagcgugaccaccgagauccugccuguguccaugaccaagaccagcguggacugcaccauguacaucugcggcgauuccaccgagugcuccaaccugcugcugcaguacggcagcuucugcacccagcugaauagagcccugacagggaucgccguggaacaggacaagaacacccaagagguguucgcccaagugaagcaaaucuacaagaccccuccuaucaaggacuucggcggcuucaauuucagccagauucugcccgauccuagcaagcccagcaagcggagcuucaucgaggaccugcuguucaacaaagugacacuggccgacgccggcuucaucaagcaguauggcgauugucugggcgacauugccgccagggaucugauuugcgcccagaaguuuaacggacugacagugcugccuccucugcugaccgaugagaugaucgcccaguacacaucugcccugcuggccggcacaaucacaagcggcuggacauuuggagcuggcgccgcucugcagauccccuuugcuaugcagauggccuaccgguucaacggcaucggagugacccagaaugugcuguacgagaaccagaagcugaucgccaaccaguucaacagcgccaucggcaagauccaggacagccugagcagcacagcaagcgcccugggaaagcugcaggacguggucaaccagaaugcccaggcacugaacacccuggucaagcagcuguccuccaacuucggcgccaucagcucugugcugaacgauauccugagcagacuggacccuccugaggccgaggugcagaucgacagacugaucacaggcagacugcagagccuccagacauacgugacccagcagcugaucagagccgccgagauuagagccucugccaaucuggccgccaccaagaugucugagugugugcugggccagagcaagagaguggacuuuugcggcaagggcuaccaccugaugagcuucccucagucugccccucacggcgugguguuucugcacgugacauaugugcccgcucaagagaagaauuucaccaccgcuccagccaucugccacgacggcaaagcccacuuuccuagagaaggcguguucguguccaacggcacccauugguucgugacacagcggaacuucuacgagccccagaucaucaccaccgacaacaccuucgugucuggcaacugcgacguugugaucggcauugugaacaauaccguguacgacccucugcagcccgagcuggacagcuucaaagaggaacuggacaaguacuuuaagaaccacacaagccccgacguggaccugggcgauaucagcggaaucaaugccagcgucgugaacauccagaaagagaucgaccggcugaacgagguggccaagaaucugaacgagagccugaucgaccugcaagaacuggggaaguacgagcaguacaucaaguggcccugguacaucuggcugggcuuuaucgccggacugauugccaucgugauggucacaaucaugcuguguugcaugaccagcugcuguagcugccugaagggcuguuguagcuguggcagcugcugcaaguucgacgaggacgauucugagcccgugcugaagggcgugaaacugcacuacaccugaugacucgagcugguacugcaugcacgcaaugcuagcugccccuuucccguccuggguaccccgagucucccccgaccucgggucccagguaugcucccaccuccaccugccccacucaccaccucugcuaguuccagacaccucccaagcacgcagcaaugcagcucaaaacgcuuagccuagccacacccccacgggaaacagcagugauuaaccuuuagcaauaaacgaaaguuuaacuaagcuauacuaaccccaggguuggucaauuucgugccagccacacccuggagcuagcaaaaaaaaaaaaaaaaaaaaaaaaaaaaaagcauaugacuaaaaaaaaaaaaaaaaaaaaaaaaaaaaaaaaaaaaaaaaaaaaaaaaaaaaaaaaaaaaaaaaaaaaaa

SEQ ID NO: 26895 - RNA, 4277 nt, Artificial Sequence
  SARS-CoV-2/Wuhan/WIV05/2019__EPI_ISL_402128 spike protein mRNA gc mod (1-1273)(K986P_V987P_H69del_V70del_D614G)
agaauaaacuaguauucuucugguccccacagacucagagagaacccgccaccauguucguguuucuggugcugcugccccugguguccagccagugugugaaccugaccaccagaacacagcugccuccagccuacaccaacagcuucaccagaggcguguacuaccccgacaagguguucagauccagcgugcugcacucuacccaggaccuguuccugccuuucuucagcaacgugaccugguuccacgccaucuccggcaccaauggcaccaagagauucgacaaccccgugcugcccuucaacgacgggguguacuuugccagcaccgagaaguccaacaucaucagaggcuggaucuucggcaccacacuggacagcaagacccagagccugcugaucgugaacaacgccaccaacguggucaucaaagugugcgaguuccaguucugcaacgaccccuuccugggcgucuacuaccacaagaacaacaagagcuggauggaaagcgaguuccggguguacagcagcgccaacaacugcaccuucgaguacgugucccagccuuuccugauggaccuggaaggcaagcagggcaacuucaagaaccugcgcgaguucguguucaagaacaucgacggcuacuucaaaaucuacagcaagcacaccccuaucaaccucgugcgggaucugccucagggcuucucugcucuggaaccccugguggaucugcccaucggcaucaacaucacccgguuucagacacugcuggcccugcacagaagcuaccugacaccuggcgauagcagcagcggauggacagcuggugccgccgcuuacuaugugggcuaccugcagccuagaaccuuccugcugaaguacaacgagaacggcaccaucaccgacgccguggauugugcucuggauccucugagcgagacaaagugcacccugaaguccuucaccguggaaaagggcaucuaccagaccagcaacuuccgggugcagcccaccgaauccaucgugcgguuccccaauaucaccaaucugugccccuucggcgagguguucaaugccaccagauucgccucuguguacgccuggaaccggaagcggaucagcaauugcguggccgacuacuccgugcuguacaacuccgccagcuucagcaccuucaagugcuacggcguguccccuaccaagcugaacgaccugugcuucacaaacguguacgccgacagcuucgugauccggggagaugaagugcggcagauugccccuggacagacaggcaagaucgccgacuacaacuacaagcugcccgacgacuucaccggcugugugauugccuggaacagcaacaaccuggacuccaaagucggcggcaacuacaauuaccuguaccggcuguuccggaaguccaaucugaagcccuucgagcgggacaucagcaccgaaaucuaucaggccggcagcaccccuugcaacggcguggaaggcuucaacugcuacuucccacugcaguccuacggcuuucagcccacaaauggcgugggcuaucagcccuacagagugguggugcugagcuucgaacugcugcaugcuccugccacagugugcggcccuaagaaaagcaccaaucucgugaagaacaaaugcgugaacuucaacuucaacggccugaccggcaccggcgugcugacagagagcaacaagaaguuccugccauuccagcaguuuggccgggauaucgccgauaccacagacgccguuagagauccccagacacuggaaauccuggacaucaccccaugcagcuucggcggagugucugugaucaccccuggcaccaacaccagcaaucagguggcagugcuguaccagggcgugaacuguaccgaagugcccguggccauucacgccgaucagcugacaccuacauggcggguguacuccaccggcagcaauguguuucagaccagagccggcugucugaucggagccgagcacgugaacaauagcuacgagugcgacauccccaucggcgcuggcaucugugccagcuaccagacacagacaaacagccccagacgggcuagaagcguggccagccagagcaucauugccuacacaaugucucugggcgccgagaacagcguggccuacuccaacaacucuaucgcuauccccaccaacuucaccaucagcgugaccaccgagauccugccuguguccaugaccaagaccagcguggacugcaccauguacaucugcggcgauuccaccgagugcuccaaccugcugcugcaguacggcagcuucugcacccagcugaauagagcccugacagggaucgccguggaacaggacaagaacacccaagagguguucgcccaagugaagcaaaucuacaagaccccuccuaucaaggacuucggcggcuucaauuucagccagauucugcccgauccuagcaagcccagcaagcggagcuucaucgaggaccugcuguucaacaaagugacacuggccgacgccggcuucaucaagcaguauggcgauugucugggcgacauugccgccagggaucugauuugcgcccagaaguuuaacggacugacagugcugccuccucugcugaccgaugagaugaucgcccaguacacaucugcccugcuggccggcacaaucacaagcggcuggacauuuggagcuggcgccgcucugcagauccccuuugcuaugcagauggccuaccgguucaacggcaucggagugacccagaaugugcuguacgagaaccagaagcugaucgccaaccaguucaacagcgccaucggcaagauccaggacagccugagcagcacagcaagcgcccugggaaagcugcaggacguggucaaccagaaugcccaggcacugaacacccuggucaagcagcuguccuccaacuucggcgccaucagcucugugcugaacgauauccugagcagacuggacccuccugaggccgaggugcagaucgacagacugaucacaggcagacugcagagccuccagacauacgugacccagcagcugaucagagccgccgagauuagagccucugccaaucuggccgccaccaagaugucugagugugugcugggccagagcaagagaguggacuuuugcggcaagggcuaccaccugaugagcuucccucagucugccccucacggcgugguguuucugcacgugacauaugugcccgcucaagagaagaauuucaccaccgcuccagccaucugccacgacggcaaagcccacuuuccuagagaaggcguguucguguccaacggcacccauugguucgugacacagcggaacuucuacgagccccagaucaucaccaccgacaacaccuucgugucuggcaacugcgacguugugaucggcauugugaacaauaccguguacgacccucugcagcccgagcuggacagcuucaaagaggaacuggacaaguacuuuaagaaccacacaagccccgacguggaccugggcgauaucagcggaaucaaugccagcgucgugaacauccagaaagagaucgaccggcugaacgagguggccaagaaucugaacgagagccugaucgaccugcaagaacuggggaaguacgagcaguacaucaaguggcccugguacaucuggcugggcuuuaucgccggacugauugccaucgugauggucacaaucaugcuguguugcaugaccagcugcuguagcugccugaagggcuguuguagcuguggcagcugcugcaaguucgacgaggacgauucugagcccgugcugaagggcgugaaacugcacuacaccugaugacucgagcugguacugcaugcacgcaaugcuagcugccccuuucccguccuggguaccccgagucucccccgaccucgggucccagguaugcucccaccuccaccugccccacucaccaccucugcuaguuccagacaccucccaagcacgcagcaaugcagcucaaaacgcuuagccuagccacacccccacgggaaacagcagugauuaaccuuuagcaauaaacgaaaguuuaacuaagcuauacuaaccccaggguuggucaauuucgugccagccacacccuggagcuagcaaaaaaaaaaaaaaaaaaaaaaaaaaaaaagcauaugacuaaaaaaaaaaaaaaaaaaaaaaaaaaaaaaaaaaaaaaaaaaaaaaaaaaaaaaaaaaaaaaaaaaaaaa

SEQ ID NO: 26896 - RNA, 4283 nt, Artificial Sequence
  SARS-CoV-2/Wuhan/WIV05/2019__EPI_ISL_402128 spike protein mRNA gc mod (1-1273)(K986P_V987P_Y453F_D614G)
agaauaaacuaguauucuucugguccccacagacucagagagaacccgccaccauguucguguuucuggugcugcugccccugguguccagccagugugugaaccugaccaccagaacacagcugccuccagccuacaccaacagcuucaccagaggcguguacuaccccgacaagguguucagauccagcgugcugcacucuacccaggaccuguuccugccuuucuucagcaacgugaccugguuccacgccauccacguguccggcaccaauggcaccaagagauucgacaaccccgugcugcccuucaacgacgggguguacuuugccagcaccgagaaguccaacaucaucagaggcuggaucuucggcaccacacuggacagcaagacccagagccugcugaucgugaacaacgccaccaacguggucaucaaagugugcgaguuccaguucugcaacgaccccuuccugggcgucuacuaccacaagaacaacaagagcuggauggaaagcgaguuccggguguacagcagcgccaacaacugcaccuucgaguacgugucccagccuuuccugauggaccuggaaggcaagcagggcaacuucaagaaccugcgcgaguucguguucaagaacaucgacggcuacuucaaaaucuacagcaagcacaccccuaucaaccucgugcgggaucugccucagggcuucucugcucuggaaccccugguggaucugcccaucggcaucaacaucacccgguuucagacacugcuggcccugcacagaagcuaccugacaccuggcgauagcagcagcggauggacagcuggugccgccgcuuacuaugugggcuaccugcagccuagaaccuuccugcugaaguacaacgagaacggcaccaucaccgacgccguggauugugcucuggauccucugagcgagacaaagugcacccugaaguccuucaccguggaaaagggcaucuaccagaccagcaacuuccgggugcagcccaccgaauccaucgugcgguuccccaauaucaccaaucugugccccuucggcgagguguucaaugccaccagauucgccucuguguacgccuggaaccggaagcggaucagcaauugcguggccgacuacuccgugcuguacaacuccgccagcuucagcaccuucaagugcuacggcguguccccuaccaagcugaacgaccugugcuucacaaacguguacgccgacagcuucgugauccggggagaugaagugcggcagauugccccuggacagacaggcaagaucgccgacuacaacuacaagcugcccgacgacuucaccggcugugugauugccuggaacagcaacaaccuggacuccaaagucggcggcaacuacaauuaccuguuccggcuguuccggaaguccaaucugaagcccuucgagcgggacaucagcaccgaaaucuaucaggccggcagcaccccuugcaacggcguggaaggcuucaacugcuacuucccacugcaguccuacggcuuucagcccacaaauggcgugggcuaucagcccuacagagugguggugcugagcuucgaacugcugcaugcuccugccacagugugcggcccuaagaaaagcaccaaucucgugaagaacaaaugcgugaacuucaacuucaacggccugaccggcaccggcgugcugacagagagcaacaagaaguuccugccauuccagcaguuuggccgggauaucgccgauaccacagacgccguuagagauccccagacacuggaaauccuggacaucaccccaugcagcuucggcggagugucugugaucaccccuggcaccaacaccagcaaucagguggcagugcuguaccagggcgugaacuguaccgaagugcccguggccauucacgccgaucagcugacaccuacauggcggguguacuccaccggcagcaauguguuucagaccagagccggcugucugaucggagccgagcacgugaacaauagcuacgagugcgacauccccaucggcgcuggcaucugugccagcuaccagacacagacaaacagccccagacgggcuagaagcguggccagccagagcaucauugccuacacaaugucucugggcgccgagaacagcguggccuacuccaacaacucuaucgcuauccccaccaacuucaccaucagcgugaccaccgagauccugccuguguccaugaccaagaccagcguggacugcaccauguacaucugcggcgauuccaccgagugcuccaaccugcugcugcaguacggcagcuucugcacccagcugaauagagcccugacagggaucgccguggaacaggacaagaacacccaagagguguucgcccaagugaagcaaaucuacaagaccccuccuaucaaggacuucggcggcuucaauuucagccagauucugcccgauccuagcaagcccagcaagcggagcuucaucgaggaccugcuguucaacaaagugacacuggccgacgccggcuucaucaagcaguauggcgauugucugggcgacauugccgccagggaucugauuugcgcccagaaguuuaacggacugacagugcugccuccucugcugaccgaugagaugaucgcccaguacacaucugcccugcuggccggcacaaucacaagcggcuggacauuuggagcuggcgccgcucugcagauccccuuugcuaugcagauggccuaccgguucaacggcaucggagugacccagaaugugcuguacgagaaccagaagcugaucgccaaccaguucaacagcgccaucggcaagauccaggacagccugagcagcacagcaagcgcccugggaaagcugcaggacguggucaaccagaaugcccaggcacugaacacccuggucaagcagcuguccuccaacuucggcgccaucagcucugugcugaacgauauccugagcagacuggacccuccugaggccgaggugcagaucgacagacugaucacaggcagacugcagagccuccagacauacgugacccagcagcugaucagagccgccgagauuagagccucugccaaucuggccgccaccaagaugucugagugugugcugggccagagcaagagaguggacuuuugcggcaagggcuaccaccugaugagcuucccucagucugccccucacggcgugguguuucugcacgugacauaugugcccgcucaagagaagaauuucaccaccgcuccagccaucugccacgacggcaaagcccacuuuccuagagaaggcguguucguguccaacggcacccauugguucgugacacagcggaacuucuacgagccccagaucaucaccaccgacaacaccuucgugucuggcaacugcgacguugugaucggcauugugaacaauaccguguacgacccucugcagcccgagcuggacagcuucaaagaggaacuggacaaguacuuuaagaaccacacaagccccgacguggaccugggcgauaucagcggaaucaaugccagcgucgugaacauccagaaagagaucgaccggcugaacgagguggccaagaaucugaacgagagccugaucgaccugcaagaacuggggaaguacgagcaguacaucaaguggcccugguacaucuggcugggcuuuaucgccggacugauugccaucgugauggucacaaucaugcuguguugcaugaccagcugcuguagcugccugaagggcuguuguagcuguggcagcugcugcaaguucgacgaggacgauucugagcccgugcugaagggcgugaaacugcacuacaccugaugacucgagcugguacugcaugcacgcaaugcuagcugccccuuucccguccuggguaccccgagucucccccgaccucgggucccagguaugcucccaccuccaccugccccacucaccaccucugcuaguuccagacaccucccaagcacgcagcaaugcagcucaaaacgcuuagccuagccacacccccacgggaaacagcagugauuaaccuuuagcaauaaacgaaaguuuaacuaagcuauacuaaccccaggguuggucaauuucgugccagccacacccuggagcuagcaaaaaaaaaaaaaaaaaaaaaaaaaaaaaagcauaugacuaaaaaaaaaaaaaaaaaaaaaaaaaaaaaaaaaaaaaaaaaaaaaaaaaaaaaaaaaaaaaaaaaaaaaa

SEQ ID NO: 26897 - RNA, 4283 nt, Artificial Sequence
  SARS-CoV-2/Wuhan/WIV05/2019__EPI_ISL_402128 spike protein mRNA gc mod (1-1273)(K986P_V987P_D614G_I692V)
agaauaaacuaguauucuucugguccccacagacucagagagaacccgccaccauguucguguuucuggugcugcugccccugguguccagccagugugugaaccugaccaccagaacacagcugccuccagccuacaccaacagcuucaccagaggcguguacuaccccgacaagguguucagauccagcgugcugcacucuacccaggaccuguuccugccuuucuucagcaacgugaccugguuccacgccauccacguguccggcaccaauggcaccaagagauucgacaaccccgugcugcccuucaacgacgggguguacuuugccagcaccgagaaguccaacaucaucagaggcuggaucuucggcaccacacuggacagcaagacccagagccugcugaucgugaacaacgccaccaacguggucaucaaagugugcgaguuccaguucugcaacgaccccuuccugggcgucuacuaccacaagaacaacaagagcuggauggaaagcgaguuccggguguacagcagcgccaacaacugcaccuucgaguacgugucccagccuuuccugauggaccuggaaggcaagcagggcaacuucaagaaccugcgcgaguucguguucaagaacaucgacggcuacuucaaaaucuacagcaagcacaccccuaucaaccucgugcgggaucugccucagggcuucucugcucuggaaccccugguggaucugcccaucggcaucaacaucacccgguuucagacacugcuggcccugcacagaagcuaccugacaccuggcgauagcagcagcggauggacagcuggugccgccgcuuacuaugugggcuaccugcagccuagaaccuuccugcugaaguacaacgagaacggcaccaucaccgacgccguggauugugcucuggauccucugagcgagacaaagugcacccugaaguccuucaccguggaaaagggcaucuaccagaccagcaacuuccgggugcagcccaccgaauccaucgugcgguuccccaauaucaccaaucugugccccuucggcgagguguucaaugccaccagauucgccucuguguacgccuggaaccggaagcggaucagcaauugcguggccgacuacuccgugcuguacaacuccgccagcuucagcaccuucaagugcuacggcguguccccuaccaagcugaacgaccugugcuucacaaacguguacgccgacagcuucgugauccggggagaugaagugcggcagauugccccuggacagacaggcaagaucgccgacuacaacuacaagcugcccgacgacuucaccggcugugugauugccuggaacagcaacaaccuggacuccaaagucggcggcaacuacaauuaccuguaccggcuguuccggaaguccaaucugaagcccuucgagcgggacaucagcaccgaaaucuaucaggccggcagcaccccuugcaacggcguggaaggcuucaacugcuacuucccacugcaguccuacggcuuucagcccacaaauggcgugggcuaucagcccuacagagugguggugcugagcuucgaacugcugcaugcuccugccacagugugcggcccuaagaaaagcaccaaucucgugaagaacaaaugcgugaacuucaacuucaacggccugaccggcaccggcgugcugacagagagcaacaagaaguuccugccauuccagcaguuuggccgggauaucgccgauaccacagacgccguuagagauccccagacacuggaaauccuggacaucaccccaugcagcuucggcggagugucugugaucaccccuggcaccaacaccagcaaucagguggcagugcuguaccagggcgugaacuguaccgaagugcccguggccauucacgccgaucagcugacaccuacauggcggguguacuccaccggcagcaauguguuucagaccagagccggcugucugaucggagccgagcacgugaacaauagcuacgagugcgacauccccaucggcgcuggcaucugugccagcuaccagacacagacaaacagccccagacgggcuagaagcguggccagccagagcgugauugccuacacaaugucucugggcgccgagaacagcguggccuacuccaacaacucuaucgcuauccccaccaacuucaccaucagcgugaccaccgagauccugccuguguccaugaccaagaccagcguggacugcaccauguacaucugcggcgauuccaccgagugcuccaaccugcugcugcaguacggcagcuucugcacccagcugaauagagcccugacagggaucgccguggaacaggacaagaacacccaagagguguucgcccaagugaagcaaaucuacaagaccccuccuaucaaggacuucggcggcuucaauuucagccagauucugcccgauccuagcaagcccagcaagcggagcuucaucgaggaccugcuguucaacaaagugacacuggccgacgccggcuucaucaagcaguauggcgauugucugggcgacauugccgccagggaucugauuugcgcccagaaguuuaacggacugacagugcugccuccucugcugaccgaugagaugaucgcccaguacacaucugcccugcuggccggcacaaucacaagcggcuggacauuuggagcuggcgccgcucugcagauccccuuugcuaugcagauggccuaccgguucaacggcaucggagugacccagaaugugcuguacgagaaccagaagcugaucgccaaccaguucaacagcgccaucggcaagauccaggacagccugagcagcacagcaagcgcccugggaaagcugcaggacguggucaaccagaaugcccaggcacugaacacccuggucaagcagcuguccuccaacuucggcgccaucagcucugugcugaacgauauccugagcagacuggacccuccugaggccgaggugcagaucgacagacugaucacaggcagacugcagagccuccagacauacgugacccagcagcugaucagagccgccgagauuagagccucugccaaucuggccgccaccaagaugucugagugugugcugggccagagcaagagaguggacuuuugcggcaagggcuaccaccugaugagcuucccucagucugccccucacggcgugguguuucugcacgugacauaugugcccgcucaagagaagaauuucaccaccgcuccagccaucugccacgacggcaaagcccacuuuccuagagaaggcguguucguguccaacggcacccauugguucgugacacagcggaacuucuacgagccccagaucaucaccaccgacaacaccuucgugucuggcaacugcgacguugugaucggcauugugaacaauaccguguacgacccucugcagcccgagcuggacagcuucaaagaggaacuggacaaguacuuuaagaaccacacaagccccgacguggaccugggcgauaucagcggaaucaaugccagcgucgugaacauccagaaagagaucgaccggcugaacgagguggccaagaaucugaacgagagccugaucgaccugcaagaacuggggaaguacgagcaguacaucaaguggcccugguacaucuggcugggcuuuaucgccggacugauugccaucgugauggucacaaucaugcuguguugcaugaccagcugcuguagcugccugaagggcuguuguagcuguggcagcugcugcaaguucgacgaggacgauucugagcccgugcugaagggcgugaaacugcacuacaccugaugacucgagcugguacugcaugcacgcaaugcuagcugccccuuucccguccuggguaccccgagucucccccgaccucgggucccagguaugcucccaccuccaccugccccacucaccaccucugcuaguuccagacaccucccaagcacgcagcaaugcagcucaaaacgcuuagccuagccacacccccacgggaaacagcagugauuaaccuuuagcaauaaacgaaaguuuaacuaagcuauacuaaccccaggguuggucaauuucgugccagccacacccuggagcuagcaaaaaaaaaaaaaaaaaaaaaaaaaaaaaagcauaugacuaaaaaaaaaaaaaaaaaaaaaaaaaaaaaaaaaaaaaaaaaaaaaaaaaaaaaaaaaaaaaaaaaaaaaa

SEQ ID NO: 26898 - RNA, 4283 nt, Artificial Sequence
  SARS-CoV-2/Wuhan/WIV05/2019__EPI_ISL_402128 spike protein mRNA gc mod (1-1273)(K986P_V987P_D614G_M1229I)
agaauaaacuaguauucuucugguccccacagacucagagagaacccgccaccauguucguguuucuggugcugcugccccugguguccagccagugugugaaccugaccaccagaacacagcugccuccagccuacaccaacagcuucaccagaggcguguacuaccccgacaagguguucagauccagcgugcugcacucuacccaggaccuguuccugccuuucuucagcaacgugaccugguuccacgccauccacguguccggcaccaauggcaccaagagauucgacaaccccgugcugcccuucaacgacgggguguacuuugccagcaccgagaaguccaacaucaucagaggcuggaucuucggcaccacacuggacagcaagacccagagccugcugaucgugaacaacgccaccaacguggucaucaaagugugcgaguuccaguucugcaacgaccccuuccugggcgucuacuaccacaagaacaacaagagcuggauggaaagcgaguuccggguguacagcagcgccaacaacugcaccuucgaguacgugucccagccuuuccugauggaccuggaaggcaagcagggcaacuucaagaaccugcgcgaguucguguucaagaacaucgacggcuacuucaaaaucuacagcaagcacaccccuaucaaccucgugcgggaucugccucagggcuucucugcucuggaaccccugguggaucugcccaucggcaucaacaucacccgguuucagacacugcuggcccugcacagaagcuaccugacaccuggcgauagcagcagcggauggacagcuggugccgccgcuuacuaugugggcuaccugcagccuagaaccuuccugcugaaguacaacgagaacggcaccaucaccgacgccguggauugugcucuggauccucugagcgagacaaagugcacccugaaguccuucaccguggaaaagggcaucuaccagaccagcaacuuccgggugcagcccaccgaauccaucgugcgguuccccaauaucaccaaucugugccccuucggcgagguguucaaugccaccagauucgccucuguguacgccuggaaccggaagcggaucagcaauugcguggccgacuacuccgugcuguacaacuccgccagcuucagcaccuucaagugcuacggcguguccccuaccaagcugaacgaccugugcuucacaaacguguacgccgacagcuucgugauccggggagaugaagugcggcagauugccccuggacagacaggcaagaucgccgacuacaacuacaagcugcccgacgacuucaccggcugugugauugccuggaacagcaacaaccuggacuccaaagucggcggcaacuacaauuaccuguaccggcuguuccggaaguccaaucugaagcccuucgagcgggacaucagcaccgaaaucuaucaggccggcagcaccccuugcaacggcguggaaggcuucaacugcuacuucccacugcaguccuacggcuuucagcccacaaauggcgugggcuaucagcccuacagagugguggugcugagcuucgaacugcugcaugcuccugccacagugugcggcccuaagaaaagcaccaaucucgugaagaacaaaugcgugaacuucaacuucaacggccugaccggcaccggcgugcugacagagagcaacaagaaguuccugccauuccagcaguuuggccgggauaucgccgauaccacagacgccguuagagauccccagacacuggaaauccuggacaucaccccaugcagcuucggcggagugucugugaucaccccuggcaccaacaccagcaaucagguggcagugcuguaccagggcgugaacuguaccgaagugcccguggccauucacgccgaucagcugacaccuacauggcggguguacuccaccggcagcaauguguuucagaccagagccggcugucugaucggagccgagcacgugaacaauagcuacgagugcgacauccccaucggcgcuggcaucugugccagcuaccagacacagacaaacagccccagacgggcuagaagcguggccagccagagcaucauugccuacacaaugucucugggcgccgagaacagcguggccuacuccaacaacucuaucgcuauccccaccaacuucaccaucagcgugaccaccgagauccugccuguguccaugaccaagaccagcguggacugcaccauguacaucugcggcgauuccaccgagugcuccaaccugcugcugcaguacggcagcuucugcacccagcugaauagagcccugacagggaucgccguggaacaggacaagaacacccaagagguguucgcccaagugaagcaaaucuacaagaccccuccuaucaaggacuucggcggcuucaauuucagccagauucugcccgauccuagcaagcccagcaagcggagcuucaucgaggaccugcuguucaacaaagugacacuggccgacgccggcuucaucaagcaguauggcgauugucugggcgacauugccgccagggaucugauuugcgcccagaaguuuaacggacugacagugcugccuccucugcugaccgaugagaugaucgcccaguacacaucugcccugcuggccggcacaaucacaagcggcuggacauuuggagcuggcgccgcucugcagauccccuuugcuaugcagauggccuaccgguucaacggcaucggagugacccagaaugugcuguacgagaaccagaagcugaucgccaaccaguucaacagcgccaucggcaagauccaggacagccugagcagcacagcaagcgcccugggaaagcugcaggacguggucaaccagaaugcccaggcacugaacacccuggucaagcagcuguccuccaacuucggcgccaucagcucugugcugaacgauauccugagcagacuggacccuccugaggccgaggugcagaucgacagacugaucacaggcagacugcagagccuccagacauacgugacccagcagcugaucagagccgccgagauuagagccucugccaaucuggccgccaccaagaugucugagugugugcugggccagagcaagagaguggacuuuugcggcaagggcuaccaccugaugagcuucccucagucugccccucacggcgugguguuucugcacgugacauaugugcccgcucaagagaagaauuucaccaccgcuccagccaucugccacgacggcaaagcccacuuuccuagagaaggcguguucguguccaacggcacccauugguucgugacacagcggaacuucuacgagccccagaucaucaccaccgacaacaccuucgugucuggcaacugcgacguugugaucggcauugugaacaauaccguguacgacccucugcagcccgagcuggacagcuucaaagaggaacuggacaaguacuuuaagaaccacacaagccccgacguggaccugggcgauaucagcggaaucaaugccagcgucgugaacauccagaaagagaucgaccggcugaacgagguggccaagaaucugaacgagagccugaucgaccugcaagaacuggggaaguacgagcaguacaucaaguggcccugguacaucuggcugggcuuuaucgccggacugauugccaucgugaucgucacaaucaugcuguguugcaugaccagcugcuguagcugccugaagggcuguuguagcuguggcagcugcugcaaguucgacgaggacgauucugagcccgugcugaagggcgugaaacugcacuacaccugaugacucgagcugguacugcaugcacgcaaugcuagcugccccuuucccguccuggguaccccgagucucccccgaccucgggucccagguaugcucccaccuccaccugccccacucaccaccucugcuaguuccagacaccucccaagcacgcagcaaugcagcucaaaacgcuuagccuagccacacccccacgggaaacagcagugauuaaccuuuagcaauaaacgaaaguuuaacuaagcuauacuaaccccaggguuggucaauuucgugccagccacacccuggagcuagcaaaaaaaaaaaaaaaaaaaaaaaaaaaaaagcauaugacuaaaaaaaaaaaaaaaaaaaaaaaaaaaaaaaaaaaaaaaaaaaaaaaaaaaaaaaaaaaaaaaaaaaaaa

SEQ ID NO: 26899 - RNA, 4277 nt, Artificial Sequence
  SARS-CoV-2/Wuhan/WIV05/2019__EPI_ISL_402128 spike protein mRNA gc mod (1-1273)(K986P_V987P_H69del_V70del_A222V_Y453F_S477N_D614G_I692V)
agaauaaacuaguauucuucugguccccacagacucagagagaacccgccaccauguucguguuucuggugcugcugccccugguguccagccagugugugaaccugaccaccagaacacagcugccuccagccuacaccaacagcuucaccagaggcguguacuaccccgacaagguguucagauccagcgugcugcacucuacccaggaccuguuccugccuuucuucagcaacgugaccugguuccacgccaucuccggcaccaauggcaccaagagauucgacaaccccgugcugcccuucaacgacgggguguacuuugccagcaccgagaaguccaacaucaucagaggcuggaucuucggcaccacacuggacagcaagacccagagccugcugaucgugaacaacgccaccaacguggucaucaaagugugcgaguuccaguucugcaacgaccccuuccugggcgucuacuaccacaagaacaacaagagcuggauggaaagcgaguuccggguguacagcagcgccaacaacugcaccuucgaguacgugucccagccuuuccugauggaccuggaaggcaagcagggcaacuucaagaaccugcgcgaguucguguucaagaacaucgacggcuacuucaaaaucuacagcaagcacaccccuaucaaccucgugcgggaucugccucagggcuucucugugcuggaaccccugguggaucugcccaucggcaucaacaucacccgguuucagacacugcuggcccugcacagaagcuaccugacaccuggcgauagcagcagcggauggacagcuggugccgccgcuuacuaugugggcuaccugcagccuagaaccuuccugcugaaguacaacgagaacggcaccaucaccgacgccguggauugugcucuggauccucugagcgagacaaagugcacccugaaguccuucaccguggaaaagggcaucuaccagaccagcaacuuccgggugcagcccaccgaauccaucgugcgguuccccaauaucaccaaucugugccccuucggcgagguguucaaugccaccagauucgccucuguguacgccuggaaccggaagcggaucagcaauugcguggccgacuacuccgugcuguacaacuccgccagcuucagcaccuucaagugcuacggcguguccccuaccaagcugaacgaccugugcuucacaaacguguacgccgacagcuucgugauccggggagaugaagugcggcagauugccccuggacagacaggcaagaucgccgacuacaacuacaagcugcccgacgacuucaccggcugugugauugccuggaacagcaacaaccuggacuccaaagucggcggcaacuacaauuaccuguuccggcuguuccggaaguccaaucugaagcccuucgagcgggacaucagcaccgaaaucuaucaggccggcaacaccccuugcaacggcguggaaggcuucaacugcuacuucccacugcaguccuacggcuuucagcccacaaauggcgugggcuaucagcccuacagagugguggugcugagcuucgaacugcugcaugcuccugccacagugugcggcccuaagaaaagcaccaaucucgugaagaacaaaugcgugaacuucaacuucaacggccugaccggcaccggcgugcugacagagagcaacaagaaguuccugccauuccagcaguuuggccgggauaucgccgauaccacagacgccguuagagauccccagacacuggaaauccuggacaucaccccaugcagcuucggcggagugucugugaucaccccuggcaccaacaccagcaaucagguggcagugcuguaccagggcgugaacuguaccgaagugcccguggccauucacgccgaucagcugacaccuacauggcggguguacuccaccggcagcaauguguuucagaccagagccggcugucugaucggagccgagcacgugaacaauagcuacgagugcgacauccccaucggcgcuggcaucugugccagcuaccagacacagacaaacagccccagacgggcuagaagcguggccagccagagcgugauugccuacacaaugucucugggcgccgagaacagcguggccuacuccaacaacucuaucgcuauccccaccaacuucaccaucagcgugaccaccgagauccugccuguguccaugaccaagaccagcguggacugcaccauguacaucugcggcgauuccaccgagugcuccaaccugcugcugcaguacggcagcuucugcacccagcugaauagagcccugacagggaucgccguggaacaggacaagaacacccaagagguguucgcccaagugaagcaaaucuacaagaccccuccuaucaaggacuucggcggcuucaauuucagccagauucugcccgauccuagcaagcccagcaagcggagcuucaucgaggaccugcuguucaacaaagugacacuggccgacgccggcuucaucaagcaguauggcgauugucugggcgacauugccgccagggaucugauuugcgcccagaaguuuaacggacugacagugcugccuccucugcugaccgaugagaugaucgcccaguacacaucugcccugcuggccggcacaaucacaagcggcuggacauuuggagcuggcgccgcucugcagauccccuuugcuaugcagauggccuaccgguucaacggcaucggagugacccagaaugugcuguacgagaaccagaagcugaucgccaaccaguucaacagcgccaucggcaagauccaggacagccugagcagcacagcaagcgcccugggaaagcugcaggacguggucaaccagaaugcccaggcacugaacacccuggucaagcagcuguccuccaacuucggcgccaucagcucugugcugaacgauauccugagcagacuggacccuccugaggccgaggugcagaucgacagacugaucacaggcagacugcagagccuccagacauacgugacccagcagcugaucagagccgccgagauuagagccucugccaaucuggccgccaccaagaugucugagugugugcugggccagagcaagagaguggacuuuugcggcaagggcuaccaccugaugagcuucccucagucugccccucacggcgugguguuucugcacgugacauaugugcccgcucaagagaagaauuucaccaccgcuccagccaucugccacgacggcaaagcccacuuuccuagagaaggcguguucguguccaacggcacccauugguucgugacacagcggaacuucuacgagccccagaucaucaccaccgacaacaccuucgugucuggcaacugcgacguugugaucggcauugugaacaauaccguguacgacccucugcagcccgagcuggacagcuucaaagaggaacuggacaaguacuuuaagaaccacacaagccccgacguggaccugggcgauaucagcggaaucaaugccagcgucgugaacauccagaaagagaucgaccggcugaacgagguggccaagaaucugaacgagagccugaucgaccugcaagaacuggggaaguacgagcaguacaucaaguggcccugguacaucuggcugggcuuuaucgccggacugauugccaucgugauggucacaaucaugcuguguugcaugaccagcugcuguagcugccugaagggcuguuguagcuguggcagcugcugcaaguucgacgaggacgauucugagcccgugcugaagggcgugaaacugcacuacaccugaugacucgagcugguacugcaugcacgcaaugcuagcugccccuuucccguccuggguaccccgagucucccccgaccucgggucccagguaugcucccaccuccaccugccccacucaccaccucugcuaguuccagacaccucccaagcacgcagcaaugcagcucaaaacgcuuagccuagccacacccccacgggaaacagcagugauuaaccuuuagcaauaaacgaaaguuuaacuaagcuauacuaaccccaggguuggucaauuucgugccagccacacccuggagcuagcaaaaaaaaaaaaaaaaaaaaaaaaaaaaaagcauaugacuaaaaaaaaaaaaaaaaaaaaaaaaaaaaaaaaaaaaaaaaaaaaaaaaaaaaaaaaaaaaaaaaaaaaaa

SEQ ID NO: 26900 - RNA, 4277 nt, Artificial Sequence
  SARS-CoV-2/Wuhan/WIV05/2019__EPI_ISL_402128 spike protein mRNA gc mod (1-1273)(K986P_V987P_H69del_V70del_Y453F_D614G_I692V_M1229I)
agaauaaacuaguauucuucugguccccacagacucagagagaacccgccaccauguucguguuucuggugcugcugccccugguguccagccagugugugaaccugaccaccagaacacagcugccuccagccuacaccaacagcuucaccagaggcguguacuaccccgacaagguguucagauccagcgugcugcacucuacccaggaccuguuccugccuuucuucagcaacgugaccugguuccacgccaucuccggcaccaauggcaccaagagauucgacaaccccgugcugcccuucaacgacgggguguacuuugccagcaccgagaaguccaacaucaucagaggcuggaucuucggcaccacacuggacagcaagacccagagccugcugaucgugaacaacgccaccaacguggucaucaaagugugcgaguuccaguucugcaacgaccccuuccugggcgucuacuaccacaagaacaacaagagcuggauggaaagcgaguuccggguguacagcagcgccaacaacugcaccuucgaguacgugucccagccuuuccugauggaccuggaaggcaagcagggcaacuucaagaaccugcgcgaguucguguucaagaacaucgacggcuacuucaaaaucuacagcaagcacaccccuaucaaccucgugcgggaucugccucagggcuucucugcucuggaaccccugguggaucugcccaucggcaucaacaucacccgguuucagacacugcuggcccugcacagaagcuaccugacaccuggcgauagcagcagcggauggacagcuggugccgccgcuuacuaugugggcuaccugcagccuagaaccuuccugcugaaguacaacgagaacggcaccaucaccgacgccguggauugugcucuggauccucugagcgagacaaagugcacccugaaguccuucaccguggaaaagggcaucuaccagaccagcaacuuccgggugcagcccaccgaauccaucgugcgguuccccaauaucaccaaucugugccccuucggcgagguguucaaugccaccagauucgccucuguguacgccuggaaccggaagcggaucagcaauugcguggccgacuacuccgugcuguacaacuccgccagcuucagcaccuucaagugcuacggcguguccccuaccaagcugaacgaccugugcuucacaaacguguacgccgacagcuucgugauccggggagaugaagugcggcagauugccccuggacagacaggcaagaucgccgacuacaacuacaagcugcccgacgacuucaccggcugugugauugccuggaacagcaacaaccuggacuccaaagucggcggcaacuacaauuaccuguuccggcuguuccggaaguccaaucugaagcccuucgagcgggacaucagcaccgaaaucuaucaggccggcagcaccccuugcaacggcguggaaggcuucaacugcuacuucccacugcaguccuacggcuuucagcccacaaauggcgugggcuaucagcccuacagagugguggugcugagcuucgaacugcugcaugcuccugccacagugugcggcccuaagaaaagcaccaaucucgugaagaacaaaugcgugaacuucaacuucaacggccugaccggcaccggcgugcugacagagagcaacaagaaguuccugccauuccagcaguuuggccgggauaucgccgauaccacagacgccguuagagauccccagacacuggaaauccuggacaucaccccaugcagcuucggcggagugucugugaucaccccuggcaccaacaccagcaaucagguggcagugcuguaccagggcgugaacuguaccgaagugcccguggccauucacgccgaucagcugacaccuacauggcggguguacuccaccggcagcaauguguuucagaccagagccggcugucugaucggagccgagcacgugaacaauagcuacgagugcgacauccccaucggcgcuggcaucugugccagcuaccagacacagacaaacagccccagacgggcuagaagcguggccagccagagcgugauugccuacacaaugucucugggcgccgagaacagcguggccuacuccaacaacucuaucgcuauccccaccaacuucaccaucagcgugaccaccgagauccugccuguguccaugaccaagaccagcguggacugcaccauguacaucugcggcgauuccaccgagugcuccaaccugcugcugcaguacggcagcuucugcacccagcugaauagagcccugacagggaucgccguggaacaggacaagaacacccaagagguguucgcccaagugaagcaaaucuacaagaccccuccuaucaaggacuucggcggcuucaauuucagccagauucugcccgauccuagcaagcccagcaagcggagcuucaucgaggaccugcuguucaacaaagugacacuggccgacgccggcuucaucaagcaguauggcgauugucugggcgacauugccgccagggaucugauuugcgcccagaaguuuaacggacugacagugcugccuccucugcugaccgaugagaugaucgcccaguacacaucugcccugcuggccggcacaaucacaagcggcuggacauuuggagcuggcgccgcucugcagauccccuuugcuaugcagauggccuaccgguucaacggcaucggagugacccagaaugugcuguacgagaaccagaagcugaucgccaaccaguucaacagcgccaucggcaagauccaggacagccugagcagcacagcaagcgcccugggaaagcugcaggacguggucaaccagaaugcccaggcacugaacacccuggucaagcagcuguccuccaacuucggcgccaucagcucugugcugaacgauauccugagcagacuggacccuccugaggccgaggugcagaucgacagacugaucacaggcagacugcagagccuccagacauacgugacccagcagcugaucagagccgccgagauuagagccucugccaaucuggccgccaccaagaugucugagugugugcugggccagagcaagagaguggacuuuugcggcaagggcuaccaccugaugagcuucccucagucugccccucacggcgugguguuucugcacgugacauaugugcccgcucaagagaagaauuucaccaccgcuccagccaucugccacgacggcaaagcccacuuuccuagagaaggcguguucguguccaacggcacccauugguucgugacacagcggaacuucuacgagccccagaucaucaccaccgacaacaccuucgugucuggcaacugcgacguugugaucggcauugugaacaauaccguguacgacccucugcagcccgagcuggacagcuucaaagaggaacuggacaaguacuuuaagaaccacacaagccccgacguggaccugggcgauaucagcggaaucaaugccagcgucgugaacauccagaaagagaucgaccggcugaacgagguggccaagaaucugaacgagagccugaucgaccugcaagaacuggggaaguacgagcaguacaucaaguggcccugguacaucuggcugggcuuuaucgccggacugauugccaucgugaucgucacaaucaugcuguguugcaugaccagcugcuguagcugccugaagggcuguuguagcuguggcagcugcugcaaguucgacgaggacgauucugagcccgugcugaagggcgugaaacugcacuacaccugaugacucgagcugguacugcaugcacgcaaugcuagcugccccuuucccguccuggguaccccgagucucccccgaccucgggucccagguaugcucccaccuccaccugccccacucaccaccucugcuaguuccagacaccucccaagcacgcagcaaugcagcucaaaacgcuuagccuagccacacccccacgggaaacagcagugauuaaccuuuagcaauaaacgaaaguuuaacuaagcuauacuaaccccaggguuggucaauuucgugccagccacacccuggagcuagcaaaaaaaaaaaaaaaaaaaaaaaaaaaaaagcauaugacuaaaaaaaaaaaaaaaaaaaaaaaaaaaaaaaaaaaaaaaaaaaaaaaaaaaaaaaaaaaaaaaaaaaaaa

SEQ ID NO: 26901 - RNA, 4274 nt, Artificial Sequence
  SARS-CoV-2/Wuhan/WIV05/2019__EPI_ISL_402128 spike protein mRNA gc mod (1-1273)(K986P_V987P_K986P_V987P_H69del_V70del_Y144del_N501Y_A570 D_D614G_P681H_T716I_S982A_D1118H)
agaauaaacuaguauucuucugguccccacagacucagagagaacccgccaccauguucguguuucuggugcugcugccccugguguccagccagugugugaaccugaccaccagaacacagcugccuccagccuacaccaacagcuucaccagaggcguguacuaccccgacaagguguucagauccagcgugcugcacucuacccaggaccuguuccugccuuucuucagcaacgugaccugguuccacgccaucuccggcaccaauggcaccaagagauucgacaaccccgugcugcccuucaacgacgggguguacuuugccagcaccgagaaguccaacaucaucagaggcuggaucuucggcaccacacuggacagcaagacccagagccugcugaucgugaacaacgccaccaacguggucaucaaagugugcgaguuccaguucugcaacgaccccuuccugggcgucuaccacaagaacaacaagagcuggauggaaagcgaguuccggguguacagcagcgccaacaacugcaccuucgaguacgugucccagccuuuccugauggaccuggaaggcaagcagggcaacuucaagaaccugcgcgaguucguguucaagaacaucgacggcuacuucaaaaucuacagcaagcacaccccuaucaaccucgugcgggaucugccucagggcuucucugcucuggaaccccugguggaucugcccaucggcaucaacaucacccgguuucagacacugcuggcccugcacagaagcuaccugacaccuggcgauagcagcagcggauggacagcuggugccgccgcuuacuaugugggcuaccugcagccuagaaccuuccugcugaaguacaacgagaacggcaccaucaccgacgccguggauugugcucuggauccucugagcgagacaaagugcacccugaaguccuucaccguggaaaagggcaucuaccagaccagcaacuuccgggugcagcccaccgaauccaucgugcgguuccccaauaucaccaaucugugccccuucggcgagguguucaaugccaccagauucgccucuguguacgccuggaaccggaagcggaucagcaauugcguggccgacuacuccgugcuguacaacuccgccagcuucagcaccuucaagugcuacggcguguccccuaccaagcugaacgaccugugcuucacaaacguguacgccgacagcuucgugauccggggagaugaagugcggcagauugccccuggacagacaggcaagaucgccgacuacaacuacaagcugcccgacgacuucaccggcugugugauugccuggaacagcaacaaccuggacuccaaagucggcggcaacuacaauuaccuguaccggcuguuccggaaguccaaucugaagcccuucgagcgggacaucagcaccgaaaucuaucaggccggcagcaccccuugcaacggcguggaaggcuucaacugcuacuucccacugcaguccuacggcuuucagcccacauacggcgugggcuaucagcccuacagagugguggugcugagcuucgaacugcugcaugcuccugccacagugugcggcccuaagaaaagcaccaaucucgugaagaacaaaugcgugaacuucaacuucaacggccugaccggcaccggcgugcugacagagagcaacaagaaguuccugccauuccagcaguuuggccgggauaucgacgauaccacagacgccguuagagauccccagacacuggaaauccuggacaucaccccaugcagcuucggcggagugucugugaucaccccuggcaccaacaccagcaaucagguggcagugcuguaccagggcgugaacuguaccgaagugcccguggccauucacgccgaucagcugacaccuacauggcggguguacuccaccggcagcaauguguuucagaccagagccggcugucugaucggagccgagcacgugaacaauagcuacgagugcgacauccccaucggcgcuggcaucugugccagcuaccagacacagacaaacagccacagacgggcuagaagcguggccagccagagcaucauugccuacacaaugucucugggcgccgagaacagcguggccuacuccaacaacucuaucgcuauccccaucaacuucaccaucagcgugaccaccgagauccugccuguguccaugaccaagaccagcguggacugcaccauguacaucugcggcgauuccaccgagugcuccaaccugcugcugcaguacggcagcuucugcacccagcugaauagagcccugacagggaucgccguggaacaggacaagaacacccaagagguguucgcccaagugaagcaaaucuacaagaccccuccuaucaaggacuucggcggcuucaauuucagccagauucugcccgauccuagcaagcccagcaagcggagcuucaucgaggaccugcuguucaacaaagugacacuggccgacgccggcuucaucaagcaguauggcgauugucugggcgacauugccgccagggaucugauuugcgcccagaaguuuaacggacugacagugcugccuccucugcugaccgaugagaugaucgcccaguacacaucugcccugcuggccggcacaaucacaagcggcuggacauuuggagcuggcgccgcucugcagauccccuuugcuaugcagauggccuaccgguucaacggcaucggagugacccagaaugugcuguacgagaaccagaagcugaucgccaaccaguucaacagcgccaucggcaagauccaggacagccugagcagcacagcaagcgcccugggaaagcugcaggacguggucaaccagaaugcccaggcacugaacacccuggucaagcagcuguccuccaacuucggcgccaucagcucugugcugaacgauauccuggccagacuggacccuccugaggccgaggugcagaucgacagacugaucacaggcagacugcagagccuccagacauacgugacccagcagcugaucagagccgccgagauuagagccucugccaaucuggccgccaccaagaugucugagugugugcugggccagagcaagagaguggacuuuugcggcaagggcuaccaccugaugagcuucccucagucugccccucacggcgugguguuucugcacgugacauaugugcccgcucaagagaagaauuucaccaccgcuccagccaucugccacgacggcaaagcccacuuuccuagagaaggcguguucguguccaacggcacccauugguucgugacacagcggaacuucuacgagccccagaucaucaccacccacaacaccuucgugucuggcaacugcgacguugugaucggcauugugaacaauaccguguacgacccucugcagcccgagcuggacagcuucaaagaggaacuggacaaguacuuuaagaaccacacaagccccgacguggaccugggcgauaucagcggaaucaaugccagcgucgugaacauccagaaagagaucgaccggcugaacgagguggccaagaaucugaacgagagccugaucgaccugcaagaacuggggaaguacgagcaguacaucaaguggcccugguacaucuggcugggcuuuaucgccggacugauugccaucgugauggucacaaucaugcuguguugcaugaccagcugcuguagcugccugaagggcuguuguagcuguggcagcugcugcaaguucgacgaggacgauucugagcccgugcugaagggcgugaaacugcacuacaccugaugacucgagcugguacugcaugcacgcaaugcuagcugccccuuucccguccuggguaccccgagucucccccgaccucgggucccagguaugcucccaccuccaccugccccacucaccaccucugcuaguuccagacaccucccaagcacgcagcaaugcagcucaaaacgcuuagccuagccacacccccacgggaaacagcagugauuaaccuuuagcaauaaacgaaaguuuaacuaagcuauacuaaccccaggguuggucaauuucgugccagccacacccuggagcuagcaaaaaaaaaaaaaaaaaaaaaaaaaaaaaagcauaugacuaaaaaaaaaaaaaaaaaaaaaaaaaaaaaaaaaaaaaaaaaaaaaaaaaaaaaaaaaaaaaaaaaaaaaa

SEQ ID NO: 26902 - RNA, 4283 nt, Artificial Sequence
  SARS-CoV-2/Wuhan/WIV05/2019__EPI_ISL_402128 spike protein mRNA gc mod (1-1273)(K986P_V987P_K986P_V987P_K417N_E484K_N501Y_D614G)
agaauaaacuaguauucuucugguccccacagacucagagagaacccgccaccauguucguguuucuggugcugcugccccugguguccagccagugugugaaccugaccaccagaacacagcugccuccagccuacaccaacagcuucaccagaggcguguacuaccccgacaagguguucagauccagcgugcugcacucuacccaggaccuguuccugccuuucuucagcaacgugaccugguuccacgccauccacguguccggcaccaauggcaccaagagauucgacaaccccgugcugcccuucaacgacgggguguacuuugccagcaccgagaaguccaacaucaucagaggcuggaucuucggcaccacacuggacagcaagacccagagccugcugaucgugaacaacgccaccaacguggucaucaaagugugcgaguuccaguucugcaacgaccccuuccugggcgucuacuaccacaagaacaacaagagcuggauggaaagcgaguuccggguguacagcagcgccaacaacugcaccuucgaguacgugucccagccuuuccugauggaccuggaaggcaagcagggcaacuucaagaaccugcgcgaguucguguucaagaacaucgacggcuacuucaaaaucuacagcaagcacaccccuaucaaccucgugcgggaucugccucagggcuucucugcucuggaaccccugguggaucugcccaucggcaucaacaucacccgguuucagacacugcuggcccugcacagaagcuaccugacaccuggcgauagcagcagcggauggacagcuggugccgccgcuuacuaugugggcuaccugcagccuagaaccuuccugcugaaguacaacgagaacggcaccaucaccgacgccguggauugugcucuggauccucugagcgagacaaagugcacccugaaguccuucaccguggaaaagggcaucuaccagaccagcaacuuccgggugcagcccaccgaauccaucgugcgguuccccaauaucaccaaucugugccccuucggcgagguguucaaugccaccagauucgccucuguguacgccuggaaccggaagcggaucagcaauugcguggccgacuacuccgugcuguacaacuccgccagcuucagcaccuucaagugcuacggcguguccccuaccaagcugaacgaccugugcuucacaaacguguacgccgacagcuucgugauccggggagaugaagugcggcagauugccccuggacagacaggcaacaucgccgacuacaacuacaagcugcccgacgacuucaccggcugugugauugccuggaacagcaacaaccuggacuccaaagucggcggcaacuacaauuaccuguaccggcuguuccggaaguccaaucugaagcccuucgagcgggacaucagcaccgaaaucuaucaggccggcagcaccccuugcaacggcgugaagggcuucaacugcuacuucccacugcaguccuacggcuuucagcccacauacggcgugggcuaucagcccuacagagugguggugcugagcuucgaacugcugcaugcuccugccacagugugcggcccuaagaaaagcaccaaucucgugaagaacaaaugcgugaacuucaacuucaacggccugaccggcaccggcgugcugacagagagcaacaagaaguuccugccauuccagcaguuuggccgggauaucgccgauaccacagacgccguuagagauccccagacacuggaaauccuggacaucaccccaugcagcuucggcggagugucugugaucaccccuggcaccaacaccagcaaucagguggcagugcuguaccagggcgugaacuguaccgaagugcccguggccauucacgccgaucagcugacaccuacauggcggguguacuccaccggcagcaauguguuucagaccagagccggcugucugaucggagccgagcacgugaacaauagcuacgagugcgacauccccaucggcgcuggcaucugugccagcuaccagacacagacaaacagccccagacgggcuagaagcguggccagccagagcaucauugccuacacaaugucucugggcgccgagaacagcguggccuacuccaacaacucuaucgcuauccccaccaacuucaccaucagcgugaccaccgagauccugccuguguccaugaccaagaccagcguggacugcaccauguacaucugcggcgauuccaccgagugcuccaaccugcugcugcaguacggcagcuucugcacccagcugaauagagcccugacagggaucgccguggaacaggacaagaacacccaagagguguucgcccaagugaagcaaaucuacaagaccccuccuaucaaggacuucggcggcuucaauuucagccagauucugcccgauccuagcaagcccagcaagcggagcuucaucgaggaccugcuguucaacaaagugacacuggccgacgccggcuucaucaagcaguauggcgauugucugggcgacauugccgccagggaucugauuugcgcccagaaguuuaacggacugacagugcugccuccucugcugaccgaugagaugaucgcccaguacacaucugcccugcuggccggcacaaucacaagcggcuggacauuuggagcuggcgccgcucugcagauccccuuugcuaugcagauggccuaccgguucaacggcaucggagugacccagaaugugcuguacgagaaccagaagcugaucgccaaccaguucaacagcgccaucggcaagauccaggacagccugagcagcacagcaagcgcccugggaaagcugcaggacguggucaaccagaaugcccaggcacugaacacccuggucaagcagcuguccuccaacuucggcgccaucagcucugugcugaacgauauccugagcagacuggacccuccugaggccgaggugcagaucgacagacugaucacaggcagacugcagagccuccagacauacgugacccagcagcugaucagagccgccgagauuagagccucugccaaucuggccgccaccaagaugucugagugugugcugggccagagcaagagaguggacuuuugcggcaagggcuaccaccugaugagcuucccucagucugccccucacggcgugguguuucugcacgugacauaugugcccgcucaagagaagaauuucaccaccgcuccagccaucugccacgacggcaaagcccacuuuccuagagaaggcguguucguguccaacggcacccauugguucgugacacagcggaacuucuacgagccccagaucaucaccaccgacaacaccuucgugucuggcaacugcgacguugugaucggcauugugaacaauaccguguacgacccucugcagcccgagcuggacagcuucaaagaggaacuggacaaguacuuuaagaaccacacaagccccgacguggaccugggcgauaucagcggaaucaaugccagcgucgugaacauccagaaagagaucgaccggcugaacgagguggccaagaaucugaacgagagccugaucgaccugcaagaacuggggaaguacgagcaguacaucaaguggcccugguacaucuggcugggcuuuaucgccggacugauugccaucgugauggucacaaucaugcuguguugcaugaccagcugcuguagcugccugaagggcuguuguagcuguggcagcugcugcaaguucgacgaggacgauucugagcccgugcugaagggcgugaaacugcacuacaccugaugacucgagcugguacugcaugcacgcaaugcuagcugccccuuucccguccuggguaccccgagucucccccgaccucgggucccagguaugcucccaccuccaccugccccacucaccaccucugcuaguuccagacaccucccaagcacgcagcaaugcagcucaaaacgcuuagccuagccacacccccacgggaaacagcagugauuaaccuuuagcaauaaacgaaaguuuaacuaagcuauacuaaccccaggguuggucaauuucgugccagccacacccuggagcuagcaaaaaaaaaaaaaaaaaaaaaaaaaaaaaagcauaugacuaaaaaaaaaaaaaaaaaaaaaaaaaaaaaaaaaaaaaaaaaaaaaaaaaaaaaaaaaaaaaaaaaaaaaa

SEQ ID NO: 26903 - RNA, 4274 nt, Artificial Sequence
  SARS-CoV-2/Wuhan/WIV05/2019__EPI_ISL_402128 spike protein mRNA gc mod (1-1273)(K986P_V987P_K986P_V987P_L18F_D80A_D215G_L242del_A243del_ L244del_R246I_K417N_E484K_N501Y_D614G_A701V)
agaauaaacuaguauucuucugguccccacagacucagagagaacccgccaccauguucguguuucuggugcugcugccccugguguccagccagugugugaacuucaccaccagaacacagcugccuccagccuacaccaacagcuucaccagaggcguguacuaccccgacaagguguucagauccagcgugcugcacucuacccaggaccuguuccugccuuucuucagcaacgugaccugguuccacgccauccacguguccggcaccaauggcaccaagagauucgccaaccccgugcugcccuucaacgacgggguguacuuugccagcaccgagaaguccaacaucaucagaggcuggaucuucggcaccacacuggacagcaagacccagagccugcugaucgugaacaacgccaccaacguggucaucaaagugugcgaguuccaguucugcaacgaccccuuccugggcgucuacuaccacaagaacaacaagagcuggauggaaagcgaguuccggguguacagcagcgccaacaacugcaccuucgaguacgugucccagccuuuccugauggaccuggaaggcaagcagggcaacuucaagaaccugcgcgaguucguguucaagaacaucgacggcuacuucaaaaucuacagcaagcacaccccuaucaaccucgugcggggccugccucagggcuucucugcucuggaaccccugguggaucugcccaucggcaucaacaucacccgguuucagacacugcacaucagcuaccugacaccuggcgauagcagcagcggauggacagcuggugccgccgcuuacuaugugggcuaccugcagccuagaaccuuccugcugaaguacaacgagaacggcaccaucaccgacgccguggauugugcucuggauccucugagcgagacaaagugcacccugaaguccuucaccguggaaaagggcaucuaccagaccagcaacuuccgggugcagcccaccgaauccaucgugcgguuccccaauaucaccaaucugugccccuucggcgagguguucaaugccaccagauucgccucuguguacgccuggaaccggaagcggaucagcaauugcguggccgacuacuccgugcuguacaacuccgccagcuucagcaccuucaagugcuacggcguguccccuaccaagcugaacgaccugugcuucacaaacguguacgccgacagcuucgugauccggggagaugaagugcggcagauugccccuggacagacaggcaacaucgccgacuacaacuacaagcugcccgacgacuucaccggcugugugauugccuggaacagcaacaaccuggacuccaaagucggcggcaacuacaauuaccuguaccggcuguuccggaaguccaaucugaagcccuucgagcgggacaucagcaccgaaaucuaucaggccggcagcaccccuugcaacggcgugaagggcuucaacugcuacuucccacugcaguccuacggcuuucagcccacauacggcgugggcuaucagcccuacagagugguggugcugagcuucgaacugcugcaugcuccugccacagugugcggcccuaagaaaagcaccaaucucgugaagaacaaaugcgugaacuucaacuucaacggccugaccggcaccggcgugcugacagagagcaacaagaaguuccugccauuccagcaguuuggccgggauaucgccgauaccacagacgccguuagagauccccagacacuggaaauccuggacaucaccccaugcagcuucggcggagugucugugaucaccccuggcaccaacaccagcaaucagguggcagugcuguaccagggcgugaacuguaccgaagugcccguggccauucacgccgaucagcugacaccuacauggcggguguacuccaccggcagcaauguguuucagaccagagccggcugucugaucggagccgagcacgugaacaauagcuacgagugcgacauccccaucggcgcuggcaucugugccagcuaccagacacagacaaacagccccagacgggcuagaagcguggccagccagagcaucauugccuacacaaugucucugggcguggagaacagcguggccuacuccaacaacucuaucgcuauccccaccaacuucaccaucagcgugaccaccgagauccugccuguguccaugaccaagaccagcguggacugcaccauguacaucugcggcgauuccaccgagugcuccaaccugcugcugcaguacggcagcuucugcacccagcugaauagagcccugacagggaucgccguggaacaggacaagaacacccaagagguguucgcccaagugaagcaaaucuacaagaccccuccuaucaaggacuucggcggcuucaauuucagccagauucugcccgauccuagcaagcccagcaagcggagcuucaucgaggaccugcuguucaacaaagugacacuggccgacgccggcuucaucaagcaguauggcgauugucugggcgacauugccgccagggaucugauuugcgcccagaaguuuaacggacugacagugcugccuccucugcugaccgaugagaugaucgcccaguacacaucugcccugcuggccggcacaaucacaagcggcuggacauuuggagcuggcgccgcucugcagauccccuuugcuaugcagauggccuaccgguucaacggcaucggagugacccagaaugugcuguacgagaaccagaagcugaucgccaaccaguucaacagcgccaucggcaagauccaggacagccugagcagcacagcaagcgcccugggaaagcugcaggacguggucaaccagaaugcccaggcacugaacacccuggucaagcagcuguccuccaacuucggcgccaucagcucugugcugaacgauauccugagcagacuggacccuccugaggccgaggugcagaucgacagacugaucacaggcagacugcagagccuccagacauacgugacccagcagcugaucagagccgccgagauuagagccucugccaaucuggccgccaccaagaugucugagugugugcugggccagagcaagagaguggacuuuugcggcaagggcuaccaccugaugagcuucccucagucugccccucacggcgugguguuucugcacgugacauaugugcccgcucaagagaagaauuucaccaccgcuccagccaucugccacgacggcaaagcccacuuuccuagagaaggcguguucguguccaacggcacccauugguucgugacacagcggaacuucuacgagccccagaucaucaccaccgacaacaccuucgugucuggcaacugcgacguugugaucggcauugugaacaauaccguguacgacccucugcagcccgagcuggacagcuucaaagaggaacuggacaaguacuuuaagaaccacacaagccccgacguggaccugggcgauaucagcggaaucaaugccagcgucgugaacauccagaaagagaucgaccggcugaacgagguggccaagaaucugaacgagagccugaucgaccugcaagaacuggggaaguacgagcaguacaucaaguggcccugguacaucuggcugggcuuuaucgccggacugauugccaucgugauggucacaaucaugcuguguugcaugaccagcugcuguagcugccugaagggcuguuguagcuguggcagcugcugcaaguucgacgaggacgauucugagcccgugcugaagggcgugaaacugcacuacaccugaugacucgagcugguacugcaugcacgcaaugcuagcugccccuuucccguccuggguaccccgagucucccccgaccucgggucccagguaugcucccaccuccaccugccccacucaccaccucugcuaguuccagacaccucccaagcacgcagcaaugcagcucaaaacgcuuagccuagccacacccccacgggaaacagcagugauuaaccuuuagcaauaaacgaaaguuuaacuaagcuauacuaaccccaggguuggucaauuucgugccagccacacccuggagcuagcaaaaaaaaaaaaaaaaaaaaaaaaaaaaaagcauaugacuaaaaaaaaaaaaaaaaaaaaaaaaaaaaaaaaaaaaaaaaaaaaaaaaaaaaaaaaaaaaaaaaaaaaaa

SEQ ID NO: 26904 - RNA, 4283 nt, Artificial Sequence
  SARS-CoV-2/Wuhan/WIV05/2019__EPI_ISL_402128 spike protein mRNA gc mod (1-1273)(K986P_V987P_K986P_V987P_E484K_D614G)
agaauaaacuaguauucuucugguccccacagacucagagagaacccgccaccauguucguguuucuggugcugcugccccugguguccagccagugugugaaccugaccaccagaacacagcugccuccagccuacaccaacagcuucaccagaggcguguacuaccccgacaagguguucagauccagcgugcugcacucuacccaggaccuguuccugccuuucuucagcaacgugaccugguuccacgccauccacguguccggcaccaauggcaccaagagauucgacaaccccgugcugcccuucaacgacgggguguacuuugccagcaccgagaaguccaacaucaucagaggcuggaucuucggcaccacacuggacagcaagacccagagccugcugaucgugaacaacgccaccaacguggucaucaaagugugcgaguuccaguucugcaacgaccccuuccugggcgucuacuaccacaagaacaacaagagcuggauggaaagcgaguuccggguguacagcagcgccaacaacugcaccuucgaguacgugucccagccuuuccugauggaccuggaaggcaagcagggcaacuucaagaaccugcgcgaguucguguucaagaacaucgacggcuacuucaaaaucuacagcaagcacaccccuaucaaccucgugcgggaucugccucagggcuucucugcucuggaaccccugguggaucugcccaucggcaucaacaucacccgguuucagacacugcuggcccugcacagaagcuaccugacaccuggcgauagcagcagcggauggacagcuggugccgccgcuuacuaugugggcuaccugcagccuagaaccuuccugcugaaguacaacgagaacggcaccaucaccgacgccguggauugugcucuggauccucugagcgagacaaagugcacccugaaguccuucaccguggaaaagggcaucuaccagaccagcaacuuccgggugcagcccaccgaauccaucgugcgguuccccaauaucaccaaucugugccccuucggcgagguguucaaugccaccagauucgccucuguguacgccuggaaccggaagcggaucagcaauugcguggccgacuacuccgugcuguacaacuccgccagcuucagcaccuucaagugcuacggcguguccccuaccaagcugaacgaccugugcuucacaaacguguacgccgacagcuucgugauccggggagaugaagugcggcagauugccccuggacagacaggcaagaucgccgacuacaacuacaagcugcccgacgacuucaccggcugugugauugccuggaacagcaacaaccuggacuccaaagucggcggcaacuacaauuaccuguaccggcuguuccggaaguccaaucugaagcccuucgagcgggacaucagcaccgaaaucuaucaggccggcagcaccccuugcaacggcgugaagggcuucaacugcuacuucccacugcaguccuacggcuuucagcccacaaauggcgugggcuaucagcccuacagagugguggugcugagcuucgaacugcugcaugcuccugccacagugugcggcccuaagaaaagcaccaaucucgugaagaacaaaugcgugaacuucaacuucaacggccugaccggcaccggcgugcugacagagagcaacaagaaguuccugccauuccagcaguuuggccgggauaucgccgauaccacagacgccguuagagauccccagacacuggaaauccuggacaucaccccaugcagcuucggcggagugucugugaucaccccuggcaccaacaccagcaaucagguggcagugcuguaccagggcgugaacuguaccgaagugcccguggccauucacgccgaucagcugacaccuacauggcggguguacuccaccggcagcaauguguuucagaccagagccggcugucugaucggagccgagcacgugaacaauagcuacgagugcgacauccccaucggcgcuggcaucugugccagcuaccagacacagacaaacagccccagacgggcuagaagcguggccagccagagcaucauugccuacacaaugucucugggcgccgagaacagcguggccuacuccaacaacucuaucgcuauccccaccaacuucaccaucagcgugaccaccgagauccugccuguguccaugaccaagaccagcguggacugcaccauguacaucugcggcgauuccaccgagugcuccaaccugcugcugcaguacggcagcuucugcacccagcugaauagagcccugacagggaucgccguggaacaggacaagaacacccaagagguguucgcccaagugaagcaaaucuacaagaccccuccuaucaaggacuucggcggcuucaauuucagccagauucugcccgauccuagcaagcccagcaagcggagcuucaucgaggaccugcuguucaacaaagugacacuggccgacgccggcuucaucaagcaguauggcgauugucugggcgacauugccgccagggaucugauuugcgcccagaaguuuaacggacugacagugcugccuccucugcugaccgaugagaugaucgcccaguacacaucugcccugcuggccggcacaaucacaagcggcuggacauuuggagcuggcgccgcucugcagauccccuuugcuaugcagauggccuaccgguucaacggcaucggagugacccagaaugugcuguacgagaaccagaagcugaucgccaaccaguucaacagcgccaucggcaagauccaggacagccugagcagcacagcaagcgcccugggaaagcugcaggacguggucaaccagaaugcccaggcacugaacacccuggucaagcagcuguccuccaacuucggcgccaucagcucugugcugaacgauauccugagcagacuggacccuccugaggccgaggugcagaucgacagacugaucacaggcagacugcagagccuccagacauacgugacccagcagcugaucagagccgccgagauuagagccucugccaaucuggccgccaccaagaugucugagugugugcugggccagagcaagagaguggacuuuugcggcaagggcuaccaccugaugagcuucccucagucugccccucacggcgugguguuucugcacgugacauaugugcccgcucaagagaagaauuucaccaccgcuccagccaucugccacgacggcaaagcccacuuuccuagagaaggcguguucguguccaacggcacccauugguucgugacacagcggaacuucuacgagccccagaucaucaccaccgacaacaccuucgugucuggcaacugcgacguugugaucggcauugugaacaauaccguguacgacccucugcagcccgagcuggacagcuucaaagaggaacuggacaaguacuuuaagaaccacacaagccccgacguggaccugggcgauaucagcggaaucaaugccagcgucgugaacauccagaaagagaucgaccggcugaacgagguggccaagaaucugaacgagagccugaucgaccugcaagaacuggggaaguacgagcaguacaucaaguggcccugguacaucuggcugggcuuuaucgccggacugauugccaucgugauggucacaaucaugcuguguugcaugaccagcugcuguagcugccugaagggcuguuguagcuguggcagcugcugcaaguucgacgaggacgauucugagcccgugcugaagggcgugaaacugcacuacaccugaugacucgagcugguacugcaugcacgcaaugcuagcugccccuuucccguccuggguaccccgagucucccccgaccucgggucccagguaugcucccaccuccaccugccccacucaccaccucugcuaguuccagacaccucccaagcacgcagcaaugcagcucaaaacgcuuagccuagccacacccccacgggaaacagcagugauuaaccuuuagcaauaaacgaaaguuuaacuaagcuauacuaaccccaggguuggucaauuucgugccagccacacccuggagcuagcaaaaaaaaaaaaaaaaaaaaaaaaaaaaaagcauaugacuaaaaaaaaaaaaaaaaaaaaaaaaaaaaaaaaaaaaaaaaaaaaaaaaaaaaaaaaaaaaaaaaaaaaaa

SEQ ID NO: 26905 - RNA, 4283 nt, Artificial Sequence
  SARS-CoV-2/Wuhan/WIV05/2019__EPI_ISL_402128 spike protein mRNA gc mod (1-1273)(K986P_V987P_K986P_V987P_L18F_T20N_P26S_D138Y_R190S_K417T _E484K_N501Y_D614G_H655Y_T1027I)
agaauaaacuaguauucuucugguccccacagacucagagagaacccgccaccauguucguguuucuggugcugcugccccugguguccagccagugugugaacuucaccaacagaacacagcugccuagcgccuacaccaacagcuucaccagaggcguguacuaccccgacaagguguucagauccagcgugcugcacucuacccaggaccuguuccugccuuucuucagcaacgugaccugguuccacgccauccacguguccggcaccaauggcaccaagagauucgacaaccccgugcugcccuucaacgacgggguguacuuugccagcaccgagaaguccaacaucaucagaggcuggaucuucggcaccacacuggacagcaagacccagagccugcugaucgugaacaacgccaccaacguggucaucaaagugugcgaguuccaguucugcaacuaccccuuccugggcgucuacuaccacaagaacaacaagagcuggauggaaagcgaguuccggguguacagcagcgccaacaacugcaccuucgaguacgugucccagccuuuccugauggaccuggaaggcaagcagggcaacuucaagaaccugagcgaguucguguucaagaacaucgacggcuacuucaaaaucuacagcaagcacaccccuaucaaccucgugcgggaucugccucagggcuucucugcucuggaaccccugguggaucugcccaucggcaucaacaucacccgguuucagacacugcuggcccugcacagaagcuaccugacaccuggcgauagcagcagcggauggacagcuggugccgccgcuuacuaugugggcuaccugcagccuagaaccuuccugcugaaguacaacgagaacggcaccaucaccgacgccguggauugugcucuggauccucugagcgagacaaagugcacccugaaguccuucaccguggaaaagggcaucuaccagaccagcaacuuccgggugcagcccaccgaauccaucgugcgguuccccaauaucaccaaucugugccccuucggcgagguguucaaugccaccagauucgccucuguguacgccuggaaccggaagcggaucagcaauugcguggccgacuacuccgugcuguacaacuccgccagcuucagcaccuucaagugcuacggcguguccccuaccaagcugaacgaccugugcuucacaaacguguacgccgacagcuucgugauccggggagaugaagugcggcagauugccccuggacagacaggcaccaucgccgacuacaacuacaagcugcccgacgacuucaccggcugugugauugccuggaacagcaacaaccuggacuccaaagucggcggcaacuacaauuaccuguaccggcuguuccggaaguccaaucugaagcccuucgagcgggacaucagcaccgaaaucuaucaggccggcagcaccccuugcaacggcgugaagggcuucaacugcuacuucccacugcaguccuacggcuuucagcccacauacggcgugggcuaucagcccuacagagugguggugcugagcuucgaacugcugcaugcuccugccacagugugcggcccuaagaaaagcaccaaucucgugaagaacaaaugcgugaacuucaacuucaacggccugaccggcaccggcgugcugacagagagcaacaagaaguuccugccauuccagcaguuuggccgggauaucgccgauaccacagacgccguuagagauccccagacacuggaaauccuggacaucaccccaugcagcuucggcggagugucugugaucaccccuggcaccaacaccagcaaucagguggcagugcuguaccagggcgugaacuguaccgaagugcccguggccauucacgccgaucagcugacaccuacauggcggguguacuccaccggcagcaauguguuucagaccagagccggcugucugaucggagccgaguacgugaacaauagcuacgagugcgacauccccaucggcgcuggcaucugugccagcuaccagacacagacaaacagccccagacgggcuagaagcguggccagccagagcaucauugccuacacaaugucucugggcgccgagaacagcguggccuacuccaacaacucuaucgcuauccccaccaacuucaccaucagcgugaccaccgagauccugccuguguccaugaccaagaccagcguggacugcaccauguacaucugcggcgauuccaccgagugcuccaaccugcugcugcaguacggcagcuucugcacccagcugaauagagcccugacagggaucgccguggaacaggacaagaacacccaagagguguucgcccaagugaagcaaaucuacaagaccccuccuaucaaggacuucggcggcuucaauuucagccagauucugcccgauccuagcaagcccagcaagcggagcuucaucgaggaccugcuguucaacaaagugacacuggccgacgccggcuucaucaagcaguauggcgauugucugggcgacauugccgccagggaucugauuugcgcccagaaguuuaacggacugacagugcugccuccucugcugaccgaugagaugaucgcccaguacacaucugcccugcuggccggcacaaucacaagcggcuggacauuuggagcuggcgccgcucugcagauccccuuugcuaugcagauggccuaccgguucaacggcaucggagugacccagaaugugcuguacgagaaccagaagcugaucgccaaccaguucaacagcgccaucggcaagauccaggacagccugagcagcacagcaagcgcccugggaaagcugcaggacguggucaaccagaaugcccaggcacugaacacccuggucaagcagcuguccuccaacuucggcgccaucagcucugugcugaacgauauccugagcagacuggacccuccugaggccgaggugcagaucgacagacugaucacaggcagacugcagagccuccagacauacgugacccagcagcugaucagagccgccgagauuagagccucugccaaucuggccgccaucaagaugucugagugugugcugggccagagcaagagaguggacuuuugcggcaagggcuaccaccugaugagcuucccucagucugccccucacggcgugguguuucugcacgugacauaugugcccgcucaagagaagaauuucaccaccgcuccagccaucugccacgacggcaaagcccacuuuccuagagaaggcguguucguguccaacggcacccauugguucgugacacagcggaacuucuacgagccccagaucaucaccaccgacaacaccuucgugucuggcaacugcgacguugugaucggcauugugaacaauaccguguacgacccucugcagcccgagcuggacagcuucaaagaggaacuggacaaguacuuuaagaaccacacaagccccgacguggaccugggcgauaucagcggaaucaaugccagcgucgugaacauccagaaagagaucgaccggcugaacgagguggccaagaaucugaacgagagccugaucgaccugcaagaacuggggaaguacgagcaguacaucaaguggcccugguacaucuggcugggcuuuaucgccggacugauugccaucgugauggucacaaucaugcuguguugcaugaccagcugcuguagcugccugaagggcuguuguagcuguggcagcugcugcaaguucgacgaggacgauucugagcccgugcugaagggcgugaaacugcacuacaccugaugacucgagcugguacugcaugcacgcaaugcuagcugccccuuucccguccuggguaccccgagucucccccgaccucgggucccagguaugcucccaccuccaccugccccacucaccaccucugcuaguuccagacaccucccaagcacgcagcaaugcagcucaaaacgcuuagccuagccacacccccacgggaaacagcagugauuaaccuuuagcaauaaacgaaaguuuaacuaagcuauacuaaccccaggguuggucaauuucgugccagccacacccuggagcuagcaaaaaaaaaaaaaaaaaaaaaaaaaaaaaagcauaugacuaaaaaaaaaaaaaaaaaaaaaaaaaaaaaaaaaaaaaaaaaaaaaaaaaaaaaaaaaaaaaaaaaaaaaa

SEQ ID NO: 26906 - RNA, 4283 nt, Artificial Sequence
  SARS-CoV-2/Wuhan/WIV05/2019__EPI_ISL_402128 spike protein mRNA gc mod (1-1273)(K986P_V987P_K986P_V987P_S13I_W152C_L452R_D614G)
agaauaaacuaguauucuucugguccccacagacucagagagaacccgccaccauguucguguuucuggugcugcugccccugguguccauccagugugugaaccugaccaccagaacacagcugccuccagccuacaccaacagcuucaccagaggcguguacuaccccgacaagguguucagauccagcgugcugcacucuacccaggaccuguuccugccuuucuucagcaacgugaccugguuccacgccauccacguguccggcaccaauggcaccaagagauucgacaaccccgugcugcccuucaacgacgggguguacuuugccagcaccgagaaguccaacaucaucagaggcuggaucuucggcaccacacuggacagcaagacccagagccugcugaucgugaacaacgccaccaacguggucaucaaagugugcgaguuccaguucugcaacgaccccuuccugggcgucuacuaccacaagaacaacaagagcugcauggaaagcgaguuccggguguacagcagcgccaacaacugcaccuucgaguacgugucccagccuuuccugauggaccuggaaggcaagcagggcaacuucaagaaccugcgcgaguucguguucaagaacaucgacggcuacuucaaaaucuacagcaagcacaccccuaucaaccucgugcgggaucugccucagggcuucucugcucuggaaccccugguggaucugcccaucggcaucaacaucacccgguuucagacacugcuggcccugcacagaagcuaccugacaccuggcgauagcagcagcggauggacagcuggugccgccgcuuacuaugugggcuaccugcagccuagaaccuuccugcugaaguacaacgagaacggcaccaucaccgacgccguggauugugcucuggauccucugagcgagacaaagugcacccugaaguccuucaccguggaaaagggcaucuaccagaccagcaacuuccgggugcagcccaccgaauccaucgugcgguuccccaauaucaccaaucugugccccuucggcgagguguucaaugccaccagauucgccucuguguacgccuggaaccggaagcggaucagcaauugcguggccgacuacuccgugcuguacaacuccgccagcuucagcaccuucaagugcuacggcguguccccuaccaagcugaacgaccugugcuucacaaacguguacgccgacagcuucgugauccggggagaugaagugcggcagauugccccuggacagacaggcaagaucgccgacuacaacuacaagcugcccgacgacuucaccggcugugugauugccuggaacagcaacaaccuggacuccaaagucggcggcaacuacaauuaccgcuaccggcuguuccggaaguccaaucugaagcccuucgagcgggacaucagcaccgaaaucuaucaggccggcagcaccccuugcaacggcguggaaggcuucaacugcuacuucccacugcaguccuacggcuuucagcccacaaauggcgugggcuaucagcccuacagagugguggugcugagcuucgaacugcugcaugcuccugccacagugugcggcccuaagaaaagcaccaaucucgugaagaacaaaugcgugaacuucaacuucaacggccugaccggcaccggcgugcugacagagagcaacaagaaguuccugccauuccagcaguuuggccgggauaucgccgauaccacagacgccguuagagauccccagacacuggaaauccuggacaucaccccaugcagcuucggcggagugucugugaucaccccuggcaccaacaccagcaaucagguggcagugcuguaccagggcgugaacuguaccgaagugcccguggccauucacgccgaucagcugacaccuacauggcggguguacuccaccggcagcaauguguuucagaccagagccggcugucugaucggagccgagcacgugaacaauagcuacgagugcgacauccccaucggcgcuggcaucugugccagcuaccagacacagacaaacagccccagacgggcuagaagcguggccagccagagcaucauugccuacacaaugucucugggcgccgagaacagcguggccuacuccaacaacucuaucgcuauccccaccaacuucaccaucagcgugaccaccgagauccugccuguguccaugaccaagaccagcguggacugcaccauguacaucugcggcgauuccaccgagugcuccaaccugcugcugcaguacggcagcuucugcacccagcugaauagagcccugacagggaucgccguggaacaggacaagaacacccaagagguguucgcccaagugaagcaaaucuacaagaccccuccuaucaaggacuucggcggcuucaauuucagccagauucugcccgauccuagcaagcccagcaagcggagcuucaucgaggaccugcuguucaacaaagugacacuggccgacgccggcuucaucaagcaguauggcgauugucugggcgacauugccgccagggaucugauuugcgcccagaaguuuaacggacugacagugcugccuccucugcugaccgaugagaugaucgcccaguacacaucugcccugcuggccggcacaaucacaagcggcuggacauuuggagcuggcgccgcucugcagauccccuuugcuaugcagauggccuaccgguucaacggcaucggagugacccagaaugugcuguacgagaaccagaagcugaucgccaaccaguucaacagcgccaucggcaagauccaggacagccugagcagcacagcaagcgcccugggaaagcugcaggacguggucaaccagaaugcccaggcacugaacacccuggucaagcagcuguccuccaacuucggcgccaucagcucugugcugaacgauauccugagcagacuggacccuccugaggccgaggugcagaucgacagacugaucacaggcagacugcagagccuccagacauacgugacccagcagcugaucagagccgccgagauuagagccucugccaaucuggccgccaccaagaugucugagugugugcugggccagagcaagagaguggacuuuugcggcaagggcuaccaccugaugagcuucccucagucugccccucacggcgugguguuucugcacgugacauaugugcccgcucaagagaagaauuucaccaccgcuccagccaucugccacgacggcaaagcccacuuuccuagagaaggcguguucguguccaacggcacccauugguucgugacacagcggaacuucuacgagccccagaucaucaccaccgacaacaccuucgugucuggcaacugcgacguugugaucggcauugugaacaauaccguguacgacccucugcagcccgagcuggacagcuucaaagaggaacuggacaaguacuuuaagaaccacacaagccccgacguggaccugggcgauaucagcggaaucaaugccagcgucgugaacauccagaaagagaucgaccggcugaacgagguggccaagaaucugaacgagagccugaucgaccugcaagaacuggggaaguacgagcaguacaucaaguggcccugguacaucuggcugggcuuuaucgccggacugauugccaucgugauggucacaaucaugcuguguugcaugaccagcugcuguagcugccugaagggcuguuguagcuguggcagcugcugcaaguucgacgaggacgauucugagcccgugcugaagggcgugaaacugcacuacaccugaugacucgagcugguacugcaugcacgcaaugcuagcugccccuuucccguccuggguaccccgagucucccccgaccucgggucccagguaugcucccaccuccaccugccccacucaccaccucugcuaguuccagacaccucccaagcacgcagcaaugcagcucaaaacgcuuagccuagccacacccccacgggaaacagcagugauuaaccuuuagcaauaaacgaaaguuuaacuaagcuauacuaaccccaggguuggucaauuucgugccagccacacccuggagcuagcaaaaaaaaaaaaaaaaaaaaaaaaaaaaaagcauaugacuaaaaaaaaaaaaaaaaaaaaaaaaaaaaaaaaaaaaaaaaaaaaaaaaaaaaaaaaaaaaaaaaaaaaaa

SEQ ID NO: 26907 - RNA, 4283 nt, Artificial Sequence
  SARS-CoV-2/Wuhan/WIV05/2019__EPI_ISL_402128 spike protein mRNA gc mod (1-1273)(K986P_V987P)
agaauaaacuaguauucuucugguccccacagacucagagagaacccgccaccauguucguguuccuggugcugcugccucugguguccagccagugugugaaccugaccaccagaacacagcugccuccagccuacaccaacagcuuuaccagaggcguguacuaccccgacaagguguucagauccagcgugcugcacucuacccaggaccuguuccugccuuucuucagcaacgugaccugguuccacgccauccacguguccggcaccaauggcaccaagagauucgacaaccccgugcugcccuucaacgacgggguguacuuugccagcaccgagaaguccaacaucaucagaggcuggaucuucggcaccacacuggacagcaagacccagagccugcugaucgugaacaacgccaccaacguggucaucaaagugugcgaguuccaguucugcaacgaccccuuccugggcgucuacuaccacaagaacaacaagagcuggauggaaagcgaguuccggguguacagcagcgccaacaacugcaccuucgaguacgugucccagccuuuccugauggaccuggaaggcaagcagggcaacuucaagaaccugcgcgaguucguguuuaagaacaucgacggcuacuucaagaucuacagcaagcacaccccuaucaaccucgugcgggaucugccucagggcuucucugcucuggaaccccugguggaucugcccaucggcaucaacaucacccgguuucagacacugcuggcccugcacagaagcuaccugacaccuggcgauagcagcagcggauggacagcuggugccgccgcuuacuaugugggcuaccugcagccuagaaccuuccugcugaaguacaacgagaacggcaccaucaccgacgccguggauugugcucuggauccucugagcgagacaaagugcacccugaaguccuucaccguggaaaagggcaucuaccagaccagcaacuuccgggugcagcccaccgaauccaucgugcgguuccccaauaucaccaaucugugccccuucggcgagguguucaaugccaccagauucgccucuguguacgccuggaaccggaagcggaucagcaauugcguggccgacuacuccgugcuguacaacuccgccagcuucagcaccuucaagugcuacggcguguccccuaccaagcugaacgaccugugcuucacaaacguguacgccgacagcuucgugauccggggagaugaagugcggcagauugccccuggacagacaggcaagaucgccgacuacaacuacaagcugcccgacgacuucaccggcugugugauugccuggaacagcaacaaccuggacuccaaagucggcggcaacuacaauuaccuguaccggcuguuccggaaguccaaucugaagcccuucgagcgggacaucuccaccgagaucuaucaggccggcagcaccccuuguaacggcguggaaggcuucaacugcuacuucccacugcaguccuacggcuuucagcccacaaauggcgugggcuaucagcccuacagagugguggugcugagcuucgaacugcugcaugccccugccacagugugcggcccuaagaaaagcaccaaucucgugaagaacaaaugcgugaacuucaacuucaacggccugaccggcaccggcgugcugacagagagcaacaagaaguuccugccauuccagcaguuuggccgggauaucgccgauaccacagacgccguuagagauccccagacacuggaaauccuggacaucaccccuugcagcuucggcggagugucugugaucaccccuggcaccaacaccagcaaucagguggcagugcuguaccaggacgugaacuguaccgaagugcccguggccauucacgccgaucagcugacaccuacauggcggguguacuccaccggcagcaauguguuucagaccagagccggcugucugaucggagccgagcacgugaacaauagcuacgagugcgacauccccaucggcgcuggaaucugcgccagcuaccagacacagacaaacagcccucggagagccagaagcguggccagccagagcaucauugccuacacaaugucucugggcgccgagaacagcguggccuacuccaacaacucuaucgcuauccccaccaacuucaccaucagcgugaccacagagauccugccuguguccaugaccaagaccagcguggacugcaccauguacaucugcggcgauuccaccgagugcuccaaccugcugcugcaguacggcagcuucugcacccagcugaauagagcccugacagggaucgccguggaacaggacaagaacacccaagagguguucgcccaagugaagcagaucuacaagaccccuccuaucaaggacuucggcggcuucaauuucagccagauucugcccgauccuagcaagcccagcaagcggagcuucaucgaggaccugcuguucaacaaagugacacuggccgacgccggcuucaucaagcaguauggcgauugucugggcgacauugccgccagggaucugauuugcgcccagaaguuuaacggacugacagugcugccuccucugcugaccgaugagaugaucgcccaguacacaucugcccugcuggccggcacaaucacaagcggcuggacauuuggagcaggcgccgcucugcagauccccuuugcuaugcagauggccuaccgguucaacggcaucggagugacccagaaugugcuguacgagaaccagaagcugaucgccaaccaguucaacagcgccaucggcaagauccaggacagccugagcagcacagcaagcgcccugggaaagcugcaggacguggucaaccagaaugcccaggcacugaacacccuggucaagcagcuguccuccaacuucggcgccaucagcucugugcugaacgauauccugagcagacuggacccuccugaggccgaggugcagaucgacagacugaucacaggcagacugcagagccuccagacauacgugacccagcagcugaucagagccgccgagauuagagccucugccaaucuggccgccaccaagaugucugagugugugcugggccagagcaagagaguggacuuuugcggcaagggcuaccaccugaugagcuucccucagucugccccucacggcgugguguuucugcacgugacauaugugcccgcucaagagaagaauuucaccaccgcuccagccaucugccacgacggcaaagcccacuuuccuagagaaggcguguucguguccaacggcacccauugguucgugacacagcggaacuucuacgagccccagaucaucaccaccgacaacaccuucgugucuggcaacugcgacgucgugaucggcauugugaacaauaccguguacgacccucugcagcccgagcuggacagcuucaaagaggaacuggacaaguacuuuaagaaccacacaagccccgacguggaccugggcgauaucagcggaaucaaugccagcgucgugaacauccagaaagagaucgaccggcugaacgagguggccaagaaucugaacgagagccugaucgaccugcaagaacuggggaaguacgagcaguacaucaaguggcccugguacaucuggcugggcuuuaucgccggacugauugccaucgugauggucacaaucaugcuguguugcaugaccagcugcuguagcugccugaagggcuguuguagcuguggcagcugcugcaaguucgacgaggacgauucugagcccgugcugaagggcgugaaacugcacuacacaugaugacucgagcugguacugcaugcacgcaaugcuagcugccccuuucccguccuggguaccccgagucucccccgaccucgggucccagguaugcucccaccuccaccugccccacucaccaccucugcuaguuccagacaccucccaagcacgcagcaaugcagcucaaaacgcuuagccuagccacacccccacgggaaacagcagugauuaaccuuuagcaauaaacgaaaguuuaacuaagcuauacuaaccccaggguuggucaauuucgugccagccacacccuggagcuagcaaaaaaaaaaaaaaaaaaaaaaaaaaaaaagcauaugacuaaaaaaaaaaaaaaaaaaaaaaaaaaaaaaaaaaaaaaaaaaaaaaaaaaaaaaaaaaaaaaaaaaaaaa

SEQ ID NO: 26908 - RNA, 4283 nt, Artificial Sequence
  SARS-CoV-2/Wuhan/WIV05/2019__EPI_ISL_402128 spike protein mRNA gc mod (1-1273)(K986P_V987P_ D614G)
agaauaaacuaguauucuucugguccccacagacucagagagaacccgccaccauguucguguuccuggugcugcugccucugguguccagccagugugugaaccugaccaccagaacacagcugccuccagccuacaccaacagcuuuaccagaggcguguacuaccccgacaagguguucagauccagcgugcugcacucuacccaggaccuguuccugccuuucuucagcaacgugaccugguuccacgccauccacguguccggcaccaauggcaccaagagauucgacaaccccgugcugcccuucaacgacgggguguacuuugccagcaccgagaaguccaacaucaucagaggcuggaucuucggcaccacacuggacagcaagacccagagccugcugaucgugaacaacgccaccaacguggucaucaaagugugcgaguuccaguucugcaacgaccccuuccugggcgucuacuaccacaagaacaacaagagcuggauggaaagcgaguuccggguguacagcagcgccaacaacugcaccuucgaguacgugucccagccuuuccugauggaccuggaaggcaagcagggcaacuucaagaaccugcgcgaguucguguuuaagaacaucgacggcuacuucaagaucuacagcaagcacaccccuaucaaccucgugcgggaucugccucagggcuucucugcucuggaaccccugguggaucugcccaucggcaucaacaucacccgguuucagacacugcuggcccugcacagaagcuaccugacaccuggcgauagcagcagcggauggacagcuggugccgccgcuuacuaugugggcuaccugcagccuagaaccuuccugcugaaguacaacgagaacggcaccaucaccgacgccguggauugugcucuggauccucugagcgagacaaagugcacccugaaguccuucaccguggaaaagggcaucuaccagaccagcaacuuccgggugcagcccaccgaauccaucgugcgguuccccaauaucaccaaucugugccccuucggcgagguguucaaugccaccagauucgccucuguguacgccuggaaccggaagcggaucagcaauugcguggccgacuacuccgugcuguacaacuccgccagcuucagcaccuucaagugcuacggcguguccccuaccaagcugaacgaccugugcuucacaaacguguacgccgacagcuucgugauccggggagaugaagugcggcagauugccccuggacagacaggcaagaucgccgacuacaacuacaagcugcccgacgacuucaccggcugugugauugccuggaacagcaacaaccuggacuccaaagucggcggcaacuacaauuaccuguaccggcuguuccggaaguccaaucugaagcccuucgagcgggacaucuccaccgagaucuaucaggccggcagcaccccuuguaacggcguggaaggcuucaacugcuacuucccacugcaguccuacggcuuucagcccacaaauggcgugggcuaucagcccuacagagugguggugcugagcuucgaacugcugcaugccccugccacagugugcggcccuaagaaaagcaccaaucucgugaagaacaaaugcgugaacuucaacuucaacggccugaccggcaccggcgugcugacagagagcaacaagaaguuccugccauuccagcaguuuggccgggauaucgccgauaccacagacgccguuagagauccccagacacuggaaauccuggacaucaccccuugcagcuucggcggagugucugugaucaccccuggcaccaacaccagcaaucagguggcagugcuguaccagggcgugaacuguaccgaagugcccguggccauucacgccgaucagcugacaccuacauggcggguguacuccaccggcagcaauguguuucagaccagagccggcugucugaucggagccgagcacgugaacaauagcuacgagugcgacauccccaucggcgcuggaaucugcgccagcuaccagacacagacaaacagcccucggagagccagaagcguggccagccagagcaucauugccuacacaaugucucugggcgccgagaacagcguggccuacuccaacaacucuaucgcuauccccaccaacuucaccaucagcgugaccacagagauccugccuguguccaugaccaagaccagcguggacugcaccauguacaucugcggcgauuccaccgagugcuccaaccugcugcugcaguacggcagcuucugcacccagcugaauagagcccugacagggaucgccguggaacaggacaagaacacccaagagguguucgcccaagugaagcagaucuacaagaccccuccuaucaaggacuucggcggcuucaauuucagccagauucugcccgauccuagcaagcccagcaagcggagcuucaucgaggaccugcuguucaacaaagugacacuggccgacgccggcuucaucaagcaguauggcgauugucugggcgacauugccgccagggaucugauuugcgcccagaaguuuaacggacugacagugcugccuccucugcugaccgaugagaugaucgcccaguacacaucugcccugcuggccggcacaaucacaagcggcuggacauuuggagcaggcgccgcucugcagauccccuuugcuaugcagauggccuaccgguucaacggcaucggagugacccagaaugugcuguacgagaaccagaagcugaucgccaaccaguucaacagcgccaucggcaagauccaggacagccugagcagcacagcaagcgcccugggaaagcugcaggacguggucaaccagaaugcccaggcacugaacacccuggucaagcagcuguccuccaacuucggcgccaucagcucugugcugaacgauauccugagcagacuggacccuccugaggccgaggugcagaucgacagacugaucacaggcagacugcagagccuccagacauacgugacccagcagcugaucagagccgccgagauuagagccucugccaaucuggccgccaccaagaugucugagugugugcugggccagagcaagagaguggacuuuugcggcaagggcuaccaccugaugagcuucccucagucugccccucacggcgugguguuucugcacgugacauaugugcccgcucaagagaagaauuucaccaccgcuccagccaucugccacgacggcaaagcccacuuuccuagagaaggcguguucguguccaacggcacccauugguucgugacacagcggaacuucuacgagccccagaucaucaccaccgacaacaccuucgugucuggcaacugcgacgucgugaucggcauugugaacaauaccguguacgacccucugcagcccgagcuggacagcuucaaagaggaacuggacaaguacuuuaagaaccacacaagccccgacguggaccugggcgauaucagcggaaucaaugccagcgucgugaacauccagaaagagaucgaccggcugaacgagguggccaagaaucugaacgagagccugaucgaccugcaagaacuggggaaguacgagcaguacaucaaguggcccugguacaucuggcugggcuuuaucgccggacugauugccaucgugauggucacaaucaugcuguguugcaugaccagcugcuguagcugccugaagggcuguuguagcuguggcagcugcugcaaguucgacgaggacgauucugagcccgugcugaagggcgugaaacugcacuacacaugaugacucgagcugguacugcaugcacgcaaugcuagcugccccuuucccguccuggguaccccgagucucccccgaccucgggucccagguaugcucccaccuccaccugccccacucaccaccucugcuaguuccagacaccucccaagcacgcagcaaugcagcucaaaacgcuuagccuagccacacccccacgggaaacagcagugauuaaccuuuagcaauaaacgaaaguuuaacuaagcuauacuaaccccaggguuggucaauuucgugccagccacacccuggagcuagcaaaaaaaaaaaaaaaaaaaaaaaaaaaaaagcauaugacuaaaaaaaaaaaaaaaaaaaaaaaaaaaaaaaaaaaaaaaaaaaaaaaaaaaaaaaaaaaaaaaaaaaaaa

SEQ ID NO: 26909 - RNA, 4283 nt, Artificial Sequence
  SARS-CoV-2/Wuhan/WIV05/2019__EPI_ISL_402128 spike protein mRNA gc mod (1-1273)(K986P_V987P_A222V_D614G)
agaauaaacuaguauucuucugguccccacagacucagagagaacccgccaccauguucguguuccuggugcugcugccucugguguccagccagugugugaaccugaccaccagaacacagcugccuccagccuacaccaacagcuuuaccagaggcguguacuaccccgacaagguguucagauccagcgugcugcacucuacccaggaccuguuccugccuuucuucagcaacgugaccugguuccacgccauccacguguccggcaccaauggcaccaagagauucgacaaccccgugcugcccuucaacgacgggguguacuuugccagcaccgagaaguccaacaucaucagaggcuggaucuucggcaccacacuggacagcaagacccagagccugcugaucgugaacaacgccaccaacguggucaucaaagugugcgaguuccaguucugcaacgaccccuuccugggcgucuacuaccacaagaacaacaagagcuggauggaaagcgaguuccggguguacagcagcgccaacaacugcaccuucgaguacgugucccagccuuuccugauggaccuggaaggcaagcagggcaacuucaagaaccugcgcgaguucguguuuaagaacaucgacggcuacuucaagaucuacagcaagcacaccccuaucaaccucgugcgggaucugccucagggcuucucugugcuggaaccccugguggaucugcccaucggcaucaacaucacccgguuucagacacugcuggcccugcacagaagcuaccugacaccuggcgauagcagcagcggauggacagcuggugccgccgcuuacuaugugggcuaccugcagccuagaaccuuccugcugaaguacaacgagaacggcaccaucaccgacgccguggauugugcucuggauccucugagcgagacaaagugcacccugaaguccuucaccguggaaaagggcaucuaccagaccagcaacuuccgggugcagcccaccgaauccaucgugcgguuccccaauaucaccaaucugugccccuucggcgagguguucaaugccaccagauucgccucuguguacgccuggaaccggaagcggaucagcaauugcguggccgacuacuccgugcuguacaacuccgccagcuucagcaccuucaagugcuacggcguguccccuaccaagcugaacgaccugugcuucacaaacguguacgccgacagcuucgugauccggggagaugaagugcggcagauugccccuggacagacaggcaagaucgccgacuacaacuacaagcugcccgacgacuucaccggcugugugauugccuggaacagcaacaaccuggacuccaaagucggcggcaacuacaauuaccuguaccggcuguuccggaaguccaaucugaagcccuucgagcgggacaucuccaccgagaucuaucaggccggcagcaccccuuguaacggcguggaaggcuucaacugcuacuucccacugcaguccuacggcuuucagcccacaaauggcgugggcuaucagcccuacagagugguggugcugagcuucgaacugcugcaugccccugccacagugugcggcccuaagaaaagcaccaaucucgugaagaacaaaugcgugaacuucaacuucaacggccugaccggcaccggcgugcugacagagagcaacaagaaguuccugccauuccagcaguuuggccgggauaucgccgauaccacagacgccguuagagauccccagacacuggaaauccuggacaucaccccuugcagcuucggcggagugucugugaucaccccuggcaccaacaccagcaaucagguggcagugcuguaccagggcgugaacuguaccgaagugcccguggccauucacgccgaucagcugacaccuacauggcggguguacuccaccggcagcaauguguuucagaccagagccggcugucugaucggagccgagcacgugaacaauagcuacgagugcgacauccccaucggcgcuggaaucugcgccagcuaccagacacagacaaacagcccucggagagccagaagcguggccagccagagcaucauugccuacacaaugucucugggcgccgagaacagcguggccuacuccaacaacucuaucgcuauccccaccaacuucaccaucagcgugaccacagagauccugccuguguccaugaccaagaccagcguggacugcaccauguacaucugcggcgauuccaccgagugcuccaaccugcugcugcaguacggcagcuucugcacccagcugaauagagcccugacagggaucgccguggaacaggacaagaacacccaagagguguucgcccaagugaagcagaucuacaagaccccuccuaucaaggacuucggcggcuucaauuucagccagauucugcccgauccuagcaagcccagcaagcggagcuucaucgaggaccugcuguucaacaaagugacacuggccgacgccggcuucaucaagcaguauggcgauugucugggcgacauugccgccagggaucugauuugcgcccagaaguuuaacggacugacagugcugccuccucugcugaccgaugagaugaucgcccaguacacaucugcccugcuggccggcacaaucacaagcggcuggacauuuggagcaggcgccgcucugcagauccccuuugcuaugcagauggccuaccgguucaacggcaucggagugacccagaaugugcuguacgagaaccagaagcugaucgccaaccaguucaacagcgccaucggcaagauccaggacagccugagcagcacagcaagcgcccugggaaagcugcaggacguggucaaccagaaugcccaggcacugaacacccuggucaagcagcuguccuccaacuucggcgccaucagcucugugcugaacgauauccugagcagacuggacccuccugaggccgaggugcagaucgacagacugaucacaggcagacugcagagccuccagacauacgugacccagcagcugaucagagccgccgagauuagagccucugccaaucuggccgccaccaagaugucugagugugugcugggccagagcaagagaguggacuuuugcggcaagggcuaccaccugaugagcuucccucagucugccccucacggcgugguguuucugcacgugacauaugugcccgcucaagagaagaauuucaccaccgcuccagccaucugccacgacggcaaagcccacuuuccuagagaaggcguguucguguccaacggcacccauugguucgugacacagcggaacuucuacgagccccagaucaucaccaccgacaacaccuucgugucuggcaacugcgacgucgugaucggcauugugaacaauaccguguacgacccucugcagcccgagcuggacagcuucaaagaggaacuggacaaguacuuuaagaaccacacaagccccgacguggaccugggcgauaucagcggaaucaaugccagcgucgugaacauccagaaagagaucgaccggcugaacgagguggccaagaaucugaacgagagccugaucgaccugcaagaacuggggaaguacgagcaguacaucaaguggcccugguacaucuggcugggcuuuaucgccggacugauugccaucgugauggucacaaucaugcuguguugcaugaccagcugcuguagcugccugaagggcuguuguagcuguggcagcugcugcaaguucgacgaggacgauucugagcccgugcugaagggcgugaaacugcacuacacaugaugacucgagcugguacugcaugcacgcaaugcuagcugccccuuucccguccuggguaccccgagucucccccgaccucgggucccagguaugcucccaccuccaccugccccacucaccaccucugcuaguuccagacaccucccaagcacgcagcaaugcagcucaaaacgcuuagccuagccacacccccacgggaaacagcagugauuaaccuuuagcaauaaacgaaaguuuaacuaagcuauacuaaccccaggguuggucaauuucgugccagccacacccuggagcuagcaaaaaaaaaaaaaaaaaaaaaaaaaaaaaagcauaugacuaaaaaaaaaaaaaaaaaaaaaaaaaaaaaaaaaaaaaaaaaaaaaaaaaaaaaaaaaaaaaaaaaaaaaa

SEQ ID NO: 26910 - RNA, 4283 nt, Artificial Sequence
  SARS-CoV-2/Wuhan/WIV05/2019__EPI_ISL_402128 spike protein mRNA gc mod (1-1273)(K986P_V987P_N439K_D614G)
agaauaaacuaguauucuucugguccccacagacucagagagaacccgccaccauguucguguuccuggugcugcugccucugguguccagccagugugugaaccugaccaccagaacacagcugccuccagccuacaccaacagcuuuaccagaggcguguacuaccccgacaagguguucagauccagcgugcugcacucuacccaggaccuguuccugccuuucuucagcaacgugaccugguuccacgccauccacguguccggcaccaauggcaccaagagauucgacaaccccgugcugcccuucaacgacgggguguacuuugccagcaccgagaaguccaacaucaucagaggcuggaucuucggcaccacacuggacagcaagacccagagccugcugaucgugaacaacgccaccaacguggucaucaaagugugcgaguuccaguucugcaacgaccccuuccugggcgucuacuaccacaagaacaacaagagcuggauggaaagcgaguuccggguguacagcagcgccaacaacugcaccuucgaguacgugucccagccuuuccugauggaccuggaaggcaagcagggcaacuucaagaaccugcgcgaguucguguuuaagaacaucgacggcuacuucaagaucuacagcaagcacaccccuaucaaccucgugcgggaucugccucagggcuucucugcucuggaaccccugguggaucugcccaucggcaucaacaucacccgguuucagacacugcuggcccugcacagaagcuaccugacaccuggcgauagcagcagcggauggacagcuggugccgccgcuuacuaugugggcuaccugcagccuagaaccuuccugcugaaguacaacgagaacggcaccaucaccgacgccguggauugugcucuggauccucugagcgagacaaagugcacccugaaguccuucaccguggaaaagggcaucuaccagaccagcaacuuccgggugcagcccaccgaauccaucgugcgguuccccaauaucaccaaucugugccccuucggcgagguguucaaugccaccagauucgccucuguguacgccuggaaccggaagcggaucagcaauugcguggccgacuacuccgugcuguacaacuccgccagcuucagcaccuucaagugcuacggcguguccccuaccaagcugaacgaccugugcuucacaaacguguacgccgacagcuucgugauccggggagaugaagugcggcagauugccccuggacagacaggcaagaucgccgacuacaacuacaagcugcccgacgacuucaccggcugugugauugccuggaacagcaagaaccuggacuccaaagucggcggcaacuacaauuaccuguaccggcuguuccggaaguccaaucugaagcccuucgagcgggacaucuccaccgagaucuaucaggccggcagcaccccuuguaacggcguggaaggcuucaacugcuacuucccacugcaguccuacggcuuucagcccacaaauggcgugggcuaucagcccuacagagugguggugcugagcuucgaacugcugcaugccccugccacagugugcggcccuaagaaaagcaccaaucucgugaagaacaaaugcgugaacuucaacuucaacggccugaccggcaccggcgugcugacagagagcaacaagaaguuccugccauuccagcaguuuggccgggauaucgccgauaccacagacgccguuagagauccccagacacuggaaauccuggacaucaccccuugcagcuucggcggagugucugugaucaccccuggcaccaacaccagcaaucagguggcagugcuguaccagggcgugaacuguaccgaagugcccguggccauucacgccgaucagcugacaccuacauggcggguguacuccaccggcagcaauguguuucagaccagagccggcugucugaucggagccgagcacgugaacaauagcuacgagugcgacauccccaucggcgcuggaaucugcgccagcuaccagacacagacaaacagcccucggagagccagaagcguggccagccagagcaucauugccuacacaaugucucugggcgccgagaacagcguggccuacuccaacaacucuaucgcuauccccaccaacuucaccaucagcgugaccacagagauccugccuguguccaugaccaagaccagcguggacugcaccauguacaucugcggcgauuccaccgagugcuccaaccugcugcugcaguacggcagcuucugcacccagcugaauagagcccugacagggaucgccguggaacaggacaagaacacccaagagguguucgcccaagugaagcagaucuacaagaccccuccuaucaaggacuucggcggcuucaauuucagccagauucugcccgauccuagcaagcccagcaagcggagcuucaucgaggaccugcuguucaacaaagugacacuggccgacgccggcuucaucaagcaguauggcgauugucugggcgacauugccgccagggaucugauuugcgcccagaaguuuaacggacugacagugcugccuccucugcugaccgaugagaugaucgcccaguacacaucugcccugcuggccggcacaaucacaagcggcuggacauuuggagcaggcgccgcucugcagauccccuuugcuaugcagauggccuaccgguucaacggcaucggagugacccagaaugugcuguacgagaaccagaagcugaucgccaaccaguucaacagcgccaucggcaagauccaggacagccugagcagcacagcaagcgcccugggaaagcugcaggacguggucaaccagaaugcccaggcacugaacacccuggucaagcagcuguccuccaacuucggcgccaucagcucugugcugaacgauauccugagcagacuggacccuccugaggccgaggugcagaucgacagacugaucacaggcagacugcagagccuccagacauacgugacccagcagcugaucagagccgccgagauuagagccucugccaaucuggccgccaccaagaugucugagugugugcugggccagagcaagagaguggacuuuugcggcaagggcuaccaccugaugagcuucccucagucugccccucacggcgugguguuucugcacgugacauaugugcccgcucaagagaagaauuucaccaccgcuccagccaucugccacgacggcaaagcccacuuuccuagagaaggcguguucguguccaacggcacccauugguucgugacacagcggaacuucuacgagccccagaucaucaccaccgacaacaccuucgugucuggcaacugcgacgucgugaucggcauugugaacaauaccguguacgacccucugcagcccgagcuggacagcuucaaagaggaacuggacaaguacuuuaagaaccacacaagccccgacguggaccugggcgauaucagcggaaucaaugccagcgucgugaacauccagaaagagaucgaccggcugaacgagguggccaagaaucugaacgagagccugaucgaccugcaagaacuggggaaguacgagcaguacaucaaguggcccugguacaucuggcugggcuuuaucgccggacugauugccaucgugauggucacaaucaugcuguguugcaugaccagcugcuguagcugccugaagggcuguuguagcuguggcagcugcugcaaguucgacgaggacgauucugagcccgugcugaagggcgugaaacugcacuacacaugaugacucgagcugguacugcaugcacgcaaugcuagcugccccuuucccguccuggguaccccgagucucccccgaccucgggucccagguaugcucccaccuccaccugccccacucaccaccucugcuaguuccagacaccucccaagcacgcagcaaugcagcucaaaacgcuuagccuagccacacccccacgggaaacagcagugauuaaccuuuagcaauaaacgaaaguuuaacuaagcuauacuaaccccaggguuggucaauuucgugccagccacacccuggagcuagcaaaaaaaaaaaaaaaaaaaaaaaaaaaaaagcauaugacuaaaaaaaaaaaaaaaaaaaaaaaaaaaaaaaaaaaaaaaaaaaaaaaaaaaaaaaaaaaaaaaaaaaaaa

SEQ ID NO: 26911 - RNA, 4283 nt, Artificial Sequence
  SARS-CoV-2/Wuhan/WIV05/2019__EPI_ISL_402128 spike protein mRNA gc mod (1-1273)(K986P_V987P_S477N_D614G)
agaauaaacuaguauucuucugguccccacagacucagagagaacccgccaccauguucguguuccuggugcugcugccucugguguccagccagugugugaaccugaccaccagaacacagcugccuccagccuacaccaacagcuuuaccagaggcguguacuaccccgacaagguguucagauccagcgugcugcacucuacccaggaccuguuccugccuuucuucagcaacgugaccugguuccacgccauccacguguccggcaccaauggcaccaagagauucgacaaccccgugcugcccuucaacgacgggguguacuuugccagcaccgagaaguccaacaucaucagaggcuggaucuucggcaccacacuggacagcaagacccagagccugcugaucgugaacaacgccaccaacguggucaucaaagugugcgaguuccaguucugcaacgaccccuuccugggcgucuacuaccacaagaacaacaagagcuggauggaaagcgaguuccggguguacagcagcgccaacaacugcaccuucgaguacgugucccagccuuuccugauggaccuggaaggcaagcagggcaacuucaagaaccugcgcgaguucguguuuaagaacaucgacggcuacuucaagaucuacagcaagcacaccccuaucaaccucgugcgggaucugccucagggcuucucugcucuggaaccccugguggaucugcccaucggcaucaacaucacccgguuucagacacugcuggcccugcacagaagcuaccugacaccuggcgauagcagcagcggauggacagcuggugccgccgcuuacuaugugggcuaccugcagccuagaaccuuccugcugaaguacaacgagaacggcaccaucaccgacgccguggauugugcucuggauccucugagcgagacaaagugcacccugaaguccuucaccguggaaaagggcaucuaccagaccagcaacuuccgggugcagcccaccgaauccaucgugcgguuccccaauaucaccaaucugugccccuucggcgagguguucaaugccaccagauucgccucuguguacgccuggaaccggaagcggaucagcaauugcguggccgacuacuccgugcuguacaacuccgccagcuucagcaccuucaagugcuacggcguguccccuaccaagcugaacgaccugugcuucacaaacguguacgccgacagcuucgugauccggggagaugaagugcggcagauugccccuggacagacaggcaagaucgccgacuacaacuacaagcugcccgacgacuucaccggcugugugauugccuggaacagcaacaaccuggacuccaaagucggcggcaacuacaauuaccuguaccggcuguuccggaaguccaaucugaagcccuucgagcgggacaucuccaccgagaucuaucaggccggcaacaccccuuguaacggcguggaaggcuucaacugcuacuucccacugcaguccuacggcuuucagcccacaaauggcgugggcuaucagcccuacagagugguggugcugagcuucgaacugcugcaugccccugccacagugugcggcccuaagaaaagcaccaaucucgugaagaacaaaugcgugaacuucaacuucaacggccugaccggcaccggcgugcugacagagagcaacaagaaguuccugccauuccagcaguuuggccgggauaucgccgauaccacagacgccguuagagauccccagacacuggaaauccuggacaucaccccuugcagcuucggcggagugucugugaucaccccuggcaccaacaccagcaaucagguggcagugcuguaccagggcgugaacuguaccgaagugcccguggccauucacgccgaucagcugacaccuacauggcggguguacuccaccggcagcaauguguuucagaccagagccggcugucugaucggagccgagcacgugaacaauagcuacgagugcgacauccccaucggcgcuggaaucugcgccagcuaccagacacagacaaacagcccucggagagccagaagcguggccagccagagcaucauugccuacacaaugucucugggcgccgagaacagcguggccuacuccaacaacucuaucgcuauccccaccaacuucaccaucagcgugaccacagagauccugccuguguccaugaccaagaccagcguggacugcaccauguacaucugcggcgauuccaccgagugcuccaaccugcugcugcaguacggcagcuucugcacccagcugaauagagcccugacagggaucgccguggaacaggacaagaacacccaagagguguucgcccaagugaagcagaucuacaagaccccuccuaucaaggacuucggcggcuucaauuucagccagauucugcccgauccuagcaagcccagcaagcggagcuucaucgaggaccugcuguucaacaaagugacacuggccgacgccggcuucaucaagcaguauggcgauugucugggcgacauugccgccagggaucugauuugcgcccagaaguuuaacggacugacagugcugccuccucugcugaccgaugagaugaucgcccaguacacaucugcccugcuggccggcacaaucacaagcggcuggacauuuggagcaggcgccgcucugcagauccccuuugcuaugcagauggccuaccgguucaacggcaucggagugacccagaaugugcuguacgagaaccagaagcugaucgccaaccaguucaacagcgccaucggcaagauccaggacagccugagcagcacagcaagcgcccugggaaagcugcaggacguggucaaccagaaugcccaggcacugaacacccuggucaagcagcuguccuccaacuucggcgccaucagcucugugcugaacgauauccugagcagacuggacccuccugaggccgaggugcagaucgacagacugaucacaggcagacugcagagccuccagacauacgugacccagcagcugaucagagccgccgagauuagagccucugccaaucuggccgccaccaagaugucugagugugugcugggccagagcaagagaguggacuuuugcggcaagggcuaccaccugaugagcuucccucagucugccccucacggcgugguguuucugcacgugacauaugugcccgcucaagagaagaauuucaccaccgcuccagccaucugccacgacggcaaagcccacuuuccuagagaaggcguguucguguccaacggcacccauugguucgugacacagcggaacuucuacgagccccagaucaucaccaccgacaacaccuucgugucuggcaacugcgacgucgugaucggcauugugaacaauaccguguacgacccucugcagcccgagcuggacagcuucaaagaggaacuggacaaguacuuuaagaaccacacaagccccgacguggaccugggcgauaucagcggaaucaaugccagcgucgugaacauccagaaagagaucgaccggcugaacgagguggccaagaaucugaacgagagccugaucgaccugcaagaacuggggaaguacgagcaguacaucaaguggcccugguacaucuggcugggcuuuaucgccggacugauugccaucgugauggucacaaucaugcuguguugcaugaccagcugcuguagcugccugaagggcuguuguagcuguggcagcugcugcaaguucgacgaggacgauucugagcccgugcugaagggcgugaaacugcacuacacaugaugacucgagcugguacugcaugcacgcaaugcuagcugccccuuucccguccuggguaccccgagucucccccgaccucgggucccagguaugcucccaccuccaccugccccacucaccaccucugcuaguuccagacaccucccaagcacgcagcaaugcagcucaaaacgcuuagccuagccacacccccacgggaaacagcagugauuaaccuuuagcaauaaacgaaaguuuaacuaagcuauacuaaccccaggguuggucaauuucgugccagccacacccuggagcuagcaaaaaaaaaaaaaaaaaaaaaaaaaaaaaagcauaugacuaaaaaaaaaaaaaaaaaaaaaaaaaaaaaaaaaaaaaaaaaaaaaaaaaaaaaaaaaaaaaaaaaaaaaa

SEQ ID NO: 26912 - RNA, 4283 nt, Artificial Sequence
  SARS-CoV-2/Wuhan/WIV05/2019__EPI_ISL_402128 spike protein mRNA gc mod (1-1273)(K986P_V987P_N501Y_D614G)
agaauaaacuaguauucuucugguccccacagacucagagagaacccgccaccauguucguguuccuggugcugcugccucugguguccagccagugugugaaccugaccaccagaacacagcugccuccagccuacaccaacagcuuuaccagaggcguguacuaccccgacaagguguucagauccagcgugcugcacucuacccaggaccuguuccugccuuucuucagcaacgugaccugguuccacgccauccacguguccggcaccaauggcaccaagagauucgacaaccccgugcugcccuucaacgacgggguguacuuugccagcaccgagaaguccaacaucaucagaggcuggaucuucggcaccacacuggacagcaagacccagagccugcugaucgugaacaacgccaccaacguggucaucaaagugugcgaguuccaguucugcaacgaccccuuccugggcgucuacuaccacaagaacaacaagagcuggauggaaagcgaguuccggguguacagcagcgccaacaacugcaccuucgaguacgugucccagccuuuccugauggaccuggaaggcaagcagggcaacuucaagaaccugcgcgaguucguguuuaagaacaucgacggcuacuucaagaucuacagcaagcacaccccuaucaaccucgugcgggaucugccucagggcuucucugcucuggaaccccugguggaucugcccaucggcaucaacaucacccgguuucagacacugcuggcccugcacagaagcuaccugacaccuggcgauagcagcagcggauggacagcuggugccgccgcuuacuaugugggcuaccugcagccuagaaccuuccugcugaaguacaacgagaacggcaccaucaccgacgccguggauugugcucuggauccucugagcgagacaaagugcacccugaaguccuucaccguggaaaagggcaucuaccagaccagcaacuuccgggugcagcccaccgaauccaucgugcgguuccccaauaucaccaaucugugccccuucggcgagguguucaaugccaccagauucgccucuguguacgccuggaaccggaagcggaucagcaauugcguggccgacuacuccgugcuguacaacuccgccagcuucagcaccuucaagugcuacggcguguccccuaccaagcugaacgaccugugcuucacaaacguguacgccgacagcuucgugauccggggagaugaagugcggcagauugccccuggacagacaggcaagaucgccgacuacaacuacaagcugcccgacgacuucaccggcugugugauugccuggaacagcaacaaccuggacuccaaagucggcggcaacuacaauuaccuguaccggcuguuccggaaguccaaucugaagcccuucgagcgggacaucuccaccgagaucuaucaggccggcagcaccccuuguaacggcguggaaggcuucaacugcuacuucccacugcaguccuacggcuuucagcccacauacggcgugggcuaucagcccuacagagugguggugcugagcuucgaacugcugcaugccccugccacagugugcggcccuaagaaaagcaccaaucucgugaagaacaaaugcgugaacuucaacuucaacggccugaccggcaccggcgugcugacagagagcaacaagaaguuccugccauuccagcaguuuggccgggauaucgccgauaccacagacgccguuagagauccccagacacuggaaauccuggacaucaccccuugcagcuucggcggagugucugugaucaccccuggcaccaacaccagcaaucagguggcagugcuguaccagggcgugaacuguaccgaagugcccguggccauucacgccgaucagcugacaccuacauggcggguguacuccaccggcagcaauguguuucagaccagagccggcugucugaucggagccgagcacgugaacaauagcuacgagugcgacauccccaucggcgcuggaaucugcgccagcuaccagacacagacaaacagcccucggagagccagaagcguggccagccagagcaucauugccuacacaaugucucugggcgccgagaacagcguggccuacuccaacaacucuaucgcuauccccaccaacuucaccaucagcgugaccacagagauccugccuguguccaugaccaagaccagcguggacugcaccauguacaucugcggcgauuccaccgagugcuccaaccugcugcugcaguacggcagcuucugcacccagcugaauagagcccugacagggaucgccguggaacaggacaagaacacccaagagguguucgcccaagugaagcagaucuacaagaccccuccuaucaaggacuucggcggcuucaauuucagccagauucugcccgauccuagcaagcccagcaagcggagcuucaucgaggaccugcuguucaacaaagugacacuggccgacgccggcuucaucaagcaguauggcgauugucugggcgacauugccgccagggaucugauuugcgcccagaaguuuaacggacugacagugcugccuccucugcugaccgaugagaugaucgcccaguacacaucugcccugcuggccggcacaaucacaagcggcuggacauuuggagcaggcgccgcucugcagauccccuuugcuaugcagauggccuaccgguucaacggcaucggagugacccagaaugugcuguacgagaaccagaagcugaucgccaaccaguucaacagcgccaucggcaagauccaggacagccugagcagcacagcaagcgcccugggaaagcugcaggacguggucaaccagaaugcccaggcacugaacacccuggucaagcagcuguccuccaacuucggcgccaucagcucugugcugaacgauauccugagcagacuggacccuccugaggccgaggugcagaucgacagacugaucacaggcagacugcagagccuccagacauacgugacccagcagcugaucagagccgccgagauuagagccucugccaaucuggccgccaccaagaugucugagugugugcugggccagagcaagagaguggacuuuugcggcaagggcuaccaccugaugagcuucccucagucugccccucacggcgugguguuucugcacgugacauaugugcccgcucaagagaagaauuucaccaccgcuccagccaucugccacgacggcaaagcccacuuuccuagagaaggcguguucguguccaacggcacccauugguucgugacacagcggaacuucuacgagccccagaucaucaccaccgacaacaccuucgugucuggcaacugcgacgucgugaucggcauugugaacaauaccguguacgacccucugcagcccgagcuggacagcuucaaagaggaacuggacaaguacuuuaagaaccacacaagccccgacguggaccugggcgauaucagcggaaucaaugccagcgucgugaacauccagaaagagaucgaccggcugaacgagguggccaagaaucugaacgagagccugaucgaccugcaagaacuggggaaguacgagcaguacaucaaguggcccugguacaucuggcugggcuuuaucgccggacugauugccaucgugauggucacaaucaugcuguguugcaugaccagcugcuguagcugccugaagggcuguuguagcuguggcagcugcugcaaguucgacgaggacgauucugagcccgugcugaagggcgugaaacugcacuacacaugaugacucgagcugguacugcaugcacgcaaugcuagcugccccuuucccguccuggguaccccgagucucccccgaccucgggucccagguaugcucccaccuccaccugccccacucaccaccucugcuaguuccagacaccucccaagcacgcagcaaugcagcucaaaacgcuuagccuagccacacccccacgggaaacagcagugauuaaccuuuagcaauaaacgaaaguuuaacuaagcuauacuaaccccaggguuggucaauuucgugccagccacacccuggagcuagcaaaaaaaaaaaaaaaaaaaaaaaaaaaaaagcauaugacuaaaaaaaaaaaaaaaaaaaaaaaaaaaaaaaaaaaaaaaaaaaaaaaaaaaaaaaaaaaaaaaaaaaaaa

SEQ ID NO: 26913 - RNA, 4277 nt, Artificial Sequence
  SARS-CoV-2/Wuhan/WIV05/2019__EPI_ISL_402128 spike protein mRNA gc mod (1-1273)(K986P_V987P_H69del_V70del_D614G)
agaauaaacuaguauucuucugguccccacagacucagagagaacccgccaccauguucguguuccuggugcugcugccucugguguccagccagugugugaaccugaccaccagaacacagcugccuccagccuacaccaacagcuuuaccagaggcguguacuaccccgacaagguguucagauccagcgugcugcacucuacccaggaccuguuccugccuuucuucagcaacgugaccugguuccacgccaucuccggcaccaauggcaccaagagauucgacaaccccgugcugcccuucaacgacgggguguacuuugccagcaccgagaaguccaacaucaucagaggcuggaucuucggcaccacacuggacagcaagacccagagccugcugaucgugaacaacgccaccaacguggucaucaaagugugcgaguuccaguucugcaacgaccccuuccugggcgucuacuaccacaagaacaacaagagcuggauggaaagcgaguuccggguguacagcagcgccaacaacugcaccuucgaguacgugucccagccuuuccugauggaccuggaaggcaagcagggcaacuucaagaaccugcgcgaguucguguuuaagaacaucgacggcuacuucaagaucuacagcaagcacaccccuaucaaccucgugcgggaucugccucagggcuucucugcucuggaaccccugguggaucugcccaucggcaucaacaucacccgguuucagacacugcuggcccugcacagaagcuaccugacaccuggcgauagcagcagcggauggacagcuggugccgccgcuuacuaugugggcuaccugcagccuagaaccuuccugcugaaguacaacgagaacggcaccaucaccgacgccguggauugugcucuggauccucugagcgagacaaagugcacccugaaguccuucaccguggaaaagggcaucuaccagaccagcaacuuccgggugcagcccaccgaauccaucgugcgguuccccaauaucaccaaucugugccccuucggcgagguguucaaugccaccagauucgccucuguguacgccuggaaccggaagcggaucagcaauugcguggccgacuacuccgugcuguacaacuccgccagcuucagcaccuucaagugcuacggcguguccccuaccaagcugaacgaccugugcuucacaaacguguacgccgacagcuucgugauccggggagaugaagugcggcagauugccccuggacagacaggcaagaucgccgacuacaacuacaagcugcccgacgacuucaccggcugugugauugccuggaacagcaacaaccuggacuccaaagucggcggcaacuacaauuaccuguaccggcuguuccggaaguccaaucugaagcccuucgagcgggacaucuccaccgagaucuaucaggccggcagcaccccuuguaacggcguggaaggcuucaacugcuacuucccacugcaguccuacggcuuucagcccacaaauggcgugggcuaucagcccuacagagugguggugcugagcuucgaacugcugcaugccccugccacagugugcggcccuaagaaaagcaccaaucucgugaagaacaaaugcgugaacuucaacuucaacggccugaccggcaccggcgugcugacagagagcaacaagaaguuccugccauuccagcaguuuggccgggauaucgccgauaccacagacgccguuagagauccccagacacuggaaauccuggacaucaccccuugcagcuucggcggagugucugugaucaccccuggcaccaacaccagcaaucagguggcagugcuguaccagggcgugaacuguaccgaagugcccguggccauucacgccgaucagcugacaccuacauggcggguguacuccaccggcagcaauguguuucagaccagagccggcugucugaucggagccgagcacgugaacaauagcuacgagugcgacauccccaucggcgcuggaaucugcgccagcuaccagacacagacaaacagcccucggagagccagaagcguggccagccagagcaucauugccuacacaaugucucugggcgccgagaacagcguggccuacuccaacaacucuaucgcuauccccaccaacuucaccaucagcgugaccacagagauccugccuguguccaugaccaagaccagcguggacugcaccauguacaucugcggcgauuccaccgagugcuccaaccugcugcugcaguacggcagcuucugcacccagcugaauagagcccugacagggaucgccguggaacaggacaagaacacccaagagguguucgcccaagugaagcagaucuacaagaccccuccuaucaaggacuucggcggcuucaauuucagccagauucugcccgauccuagcaagcccagcaagcggagcuucaucgaggaccugcuguucaacaaagugacacuggccgacgccggcuucaucaagcaguauggcgauugucugggcgacauugccgccagggaucugauuugcgcccagaaguuuaacggacugacagugcugccuccucugcugaccgaugagaugaucgcccaguacacaucugcccugcuggccggcacaaucacaagcggcuggacauuuggagcaggcgccgcucugcagauccccuuugcuaugcagauggccuaccgguucaacggcaucggagugacccagaaugugcuguacgagaaccagaagcugaucgccaaccaguucaacagcgccaucggcaagauccaggacagccugagcagcacagcaagcgcccugggaaagcugcaggacguggucaaccagaaugcccaggcacugaacacccuggucaagcagcuguccuccaacuucggcgccaucagcucugugcugaacgauauccugagcagacuggacccuccugaggccgaggugcagaucgacagacugaucacaggcagacugcagagccuccagacauacgugacccagcagcugaucagagccgccgagauuagagccucugccaaucuggccgccaccaagaugucugagugugugcugggccagagcaagagaguggacuuuugcggcaagggcuaccaccugaugagcuucccucagucugccccucacggcgugguguuucugcacgugacauaugugcccgcucaagagaagaauuucaccaccgcuccagccaucugccacgacggcaaagcccacuuuccuagagaaggcguguucguguccaacggcacccauugguucgugacacagcggaacuucuacgagccccagaucaucaccaccgacaacaccuucgugucuggcaacugcgacgucgugaucggcauugugaacaauaccguguacgacccucugcagcccgagcuggacagcuucaaagaggaacuggacaaguacuuuaagaaccacacaagccccgacguggaccugggcgauaucagcggaaucaaugccagcgucgugaacauccagaaagagaucgaccggcugaacgagguggccaagaaucugaacgagagccugaucgaccugcaagaacuggggaaguacgagcaguacaucaaguggcccugguacaucuggcugggcuuuaucgccggacugauugccaucgugauggucacaaucaugcuguguugcaugaccagcugcuguagcugccugaagggcuguuguagcuguggcagcugcugcaaguucgacgaggacgauucugagcccgugcugaagggcgugaaacugcacuacacaugaugacucgagcugguacugcaugcacgcaaugcuagcugccccuuucccguccuggguaccccgagucucccccgaccucgggucccagguaugcucccaccuccaccugccccacucaccaccucugcuaguuccagacaccucccaagcacgcagcaaugcagcucaaaacgcuuagccuagccacacccccacgggaaacagcagugauuaaccuuuagcaauaaacgaaaguuuaacuaagcuauacuaaccccaggguuggucaauuucgugccagccacacccuggagcuagcaaaaaaaaaaaaaaaaaaaaaaaaaaaaaagcauaugacuaaaaaaaaaaaaaaaaaaaaaaaaaaaaaaaaaaaaaaaaaaaaaaaaaaaaaaaaaaaaaaaaaaaaaa

SEQ ID NO: 26914 - RNA, 4283 nt, Artificial Sequence
  SARS-CoV-2/Wuhan/WIV05/2019__EPI_ISL_402128 spike protein mRNA gc mod (1-1273)(K986P_V987P_Y453F_D614G)
agaauaaacuaguauucuucugguccccacagacucagagagaacccgccaccauguucguguuccuggugcugcugccucugguguccagccagugugugaaccugaccaccagaacacagcugccuccagccuacaccaacagcuuuaccagaggcguguacuaccccgacaagguguucagauccagcgugcugcacucuacccaggaccuguuccugccuuucuucagcaacgugaccugguuccacgccauccacguguccggcaccaauggcaccaagagauucgacaaccccgugcugcccuucaacgacgggguguacuuugccagcaccgagaaguccaacaucaucagaggcuggaucuucggcaccacacuggacagcaagacccagagccugcugaucgugaacaacgccaccaacguggucaucaaagugugcgaguuccaguucugcaacgaccccuuccugggcgucuacuaccacaagaacaacaagagcuggauggaaagcgaguuccggguguacagcagcgccaacaacugcaccuucgaguacgugucccagccuuuccugauggaccuggaaggcaagcagggcaacuucaagaaccugcgcgaguucguguuuaagaacaucgacggcuacuucaagaucuacagcaagcacaccccuaucaaccucgugcgggaucugccucagggcuucucugcucuggaaccccugguggaucugcccaucggcaucaacaucacccgguuucagacacugcuggcccugcacagaagcuaccugacaccuggcgauagcagcagcggauggacagcuggugccgccgcuuacuaugugggcuaccugcagccuagaaccuuccugcugaaguacaacgagaacggcaccaucaccgacgccguggauugugcucuggauccucugagcgagacaaagugcacccugaaguccuucaccguggaaaagggcaucuaccagaccagcaacuuccgggugcagcccaccgaauccaucgugcgguuccccaauaucaccaaucugugccccuucggcgagguguucaaugccaccagauucgccucuguguacgccuggaaccggaagcggaucagcaauugcguggccgacuacuccgugcuguacaacuccgccagcuucagcaccuucaagugcuacggcguguccccuaccaagcugaacgaccugugcuucacaaacguguacgccgacagcuucgugauccggggagaugaagugcggcagauugccccuggacagacaggcaagaucgccgacuacaacuacaagcugcccgacgacuucaccggcugugugauugccuggaacagcaacaaccuggacuccaaagucggcggcaacuacaauuaccuguuccggcuguuccggaaguccaaucugaagcccuucgagcgggacaucuccaccgagaucuaucaggccggcagcaccccuuguaacggcguggaaggcuucaacugcuacuucccacugcaguccuacggcuuucagcccacaaauggcgugggcuaucagcccuacagagugguggugcugagcuucgaacugcugcaugccccugccacagugugcggcccuaagaaaagcaccaaucucgugaagaacaaaugcgugaacuucaacuucaacggccugaccggcaccggcgugcugacagagagcaacaagaaguuccugccauuccagcaguuuggccgggauaucgccgauaccacagacgccguuagagauccccagacacuggaaauccuggacaucaccccuugcagcuucggcggagugucugugaucaccccuggcaccaacaccagcaaucagguggcagugcuguaccagggcgugaacuguaccgaagugcccguggccauucacgccgaucagcugacaccuacauggcggguguacuccaccggcagcaauguguuucagaccagagccggcugucugaucggagccgagcacgugaacaauagcuacgagugcgacauccccaucggcgcuggaaucugcgccagcuaccagacacagacaaacagcccucggagagccagaagcguggccagccagagcaucauugccuacacaaugucucugggcgccgagaacagcguggccuacuccaacaacucuaucgcuauccccaccaacuucaccaucagcgugaccacagagauccugccuguguccaugaccaagaccagcguggacugcaccauguacaucugcggcgauuccaccgagugcuccaaccugcugcugcaguacggcagcuucugcacccagcugaauagagcccugacagggaucgccguggaacaggacaagaacacccaagagguguucgcccaagugaagcagaucuacaagaccccuccuaucaaggacuucggcggcuucaauuucagccagauucugcccgauccuagcaagcccagcaagcggagcuucaucgaggaccugcuguucaacaaagugacacuggccgacgccggcuucaucaagcaguauggcgauugucugggcgacauugccgccagggaucugauuugcgcccagaaguuuaacggacugacagugcugccuccucugcugaccgaugagaugaucgcccaguacacaucugcccugcuggccggcacaaucacaagcggcuggacauuuggagcaggcgccgcucugcagauccccuuugcuaugcagauggccuaccgguucaacggcaucggagugacccagaaugugcuguacgagaaccagaagcugaucgccaaccaguucaacagcgccaucggcaagauccaggacagccugagcagcacagcaagcgcccugggaaagcugcaggacguggucaaccagaaugcccaggcacugaacacccuggucaagcagcuguccuccaacuucggcgccaucagcucugugcugaacgauauccugagcagacuggacccuccugaggccgaggugcagaucgacagacugaucacaggcagacugcagagccuccagacauacgugacccagcagcugaucagagccgccgagauuagagccucugccaaucuggccgccaccaagaugucugagugugugcugggccagagcaagagaguggacuuuugcggcaagggcuaccaccugaugagcuucccucagucugccccucacggcgugguguuucugcacgugacauaugugcccgcucaagagaagaauuucaccaccgcuccagccaucugccacgacggcaaagcccacuuuccuagagaaggcguguucguguccaacggcacccauugguucgugacacagcggaacuucuacgagccccagaucaucaccaccgacaacaccuucgugucuggcaacugcgacgucgugaucggcauugugaacaauaccguguacgacccucugcagcccgagcuggacagcuucaaagaggaacuggacaaguacuuuaagaaccacacaagccccgacguggaccugggcgauaucagcggaaucaaugccagcgucgugaacauccagaaagagaucgaccggcugaacgagguggccaagaaucugaacgagagccugaucgaccugcaagaacuggggaaguacgagcaguacaucaaguggcccugguacaucuggcugggcuuuaucgccggacugauugccaucgugauggucacaaucaugcuguguugcaugaccagcugcuguagcugccugaagggcuguuguagcuguggcagcugcugcaaguucgacgaggacgauucugagcccgugcugaagggcgugaaacugcacuacacaugaugacucgagcugguacugcaugcacgcaaugcuagcugccccuuucccguccuggguaccccgagucucccccgaccucgggucccagguaugcucccaccuccaccugccccacucaccaccucugcuaguuccagacaccucccaagcacgcagcaaugcagcucaaaacgcuuagccuagccacacccccacgggaaacagcagugauuaaccuuuagcaauaaacgaaaguuuaacuaagcuauacuaaccccaggguuggucaauuucgugccagccacacccuggagcuagcaaaaaaaaaaaaaaaaaaaaaaaaaaaaaagcauaugacuaaaaaaaaaaaaaaaaaaaaaaaaaaaaaaaaaaaaaaaaaaaaaaaaaaaaaaaaaaaaaaaaaaaaaa

SEQ ID NO: 26915 - RNA, 4283 nt, Artificial Sequence
  SARS-CoV-2/Wuhan/WIV05/2019__EPI_ISL_402128 spike protein mRNA gc mod (1-1273)(K986P_V987P_D614G_I692V)
agaauaaacuaguauucuucugguccccacagacucagagagaacccgccaccauguucguguuccuggugcugcugccucugguguccagccagugugugaaccugaccaccagaacacagcugccuccagccuacaccaacagcuuuaccagaggcguguacuaccccgacaagguguucagauccagcgugcugcacucuacccaggaccuguuccugccuuucuucagcaacgugaccugguuccacgccauccacguguccggcaccaauggcaccaagagauucgacaaccccgugcugcccuucaacgacgggguguacuuugccagcaccgagaaguccaacaucaucagaggcuggaucuucggcaccacacuggacagcaagacccagagccugcugaucgugaacaacgccaccaacguggucaucaaagugugcgaguuccaguucugcaacgaccccuuccugggcgucuacuaccacaagaacaacaagagcuggauggaaagcgaguuccggguguacagcagcgccaacaacugcaccuucgaguacgugucccagccuuuccugauggaccuggaaggcaagcagggcaacuucaagaaccugcgcgaguucguguuuaagaacaucgacggcuacuucaagaucuacagcaagcacaccccuaucaaccucgugcgggaucugccucagggcuucucugcucuggaaccccugguggaucugcccaucggcaucaacaucacccgguuucagacacugcuggcccugcacagaagcuaccugacaccuggcgauagcagcagcggauggacagcuggugccgccgcuuacuaugugggcuaccugcagccuagaaccuuccugcugaaguacaacgagaacggcaccaucaccgacgccguggauugugcucuggauccucugagcgagacaaagugcacccugaaguccuucaccguggaaaagggcaucuaccagaccagcaacuuccgggugcagcccaccgaauccaucgugcgguuccccaauaucaccaaucugugccccuucggcgagguguucaaugccaccagauucgccucuguguacgccuggaaccggaagcggaucagcaauugcguggccgacuacuccgugcuguacaacuccgccagcuucagcaccuucaagugcuacggcguguccccuaccaagcugaacgaccugugcuucacaaacguguacgccgacagcuucgugauccggggagaugaagugcggcagauugccccuggacagacaggcaagaucgccgacuacaacuacaagcugcccgacgacuucaccggcugugugauugccuggaacagcaacaaccuggacuccaaagucggcggcaacuacaauuaccuguaccggcuguuccggaaguccaaucugaagcccuucgagcgggacaucuccaccgagaucuaucaggccggcagcaccccuuguaacggcguggaaggcuucaacugcuacuucccacugcaguccuacggcuuucagcccacaaauggcgugggcuaucagcccuacagagugguggugcugagcuucgaacugcugcaugccccugccacagugugcggcccuaagaaaagcaccaaucucgugaagaacaaaugcgugaacuucaacuucaacggccugaccggcaccggcgugcugacagagagcaacaagaaguuccugccauuccagcaguuuggccgggauaucgccgauaccacagacgccguuagagauccccagacacuggaaauccuggacaucaccccuugcagcuucggcggagugucugugaucaccccuggcaccaacaccagcaaucagguggcagugcuguaccagggcgugaacuguaccgaagugcccguggccauucacgccgaucagcugacaccuacauggcggguguacuccaccggcagcaauguguuucagaccagagccggcugucugaucggagccgagcacgugaacaauagcuacgagugcgacauccccaucggcgcuggaaucugcgccagcuaccagacacagacaaacagcccucggagagccagaagcguggccagccagagcgugauugccuacacaaugucucugggcgccgagaacagcguggccuacuccaacaacucuaucgcuauccccaccaacuucaccaucagcgugaccacagagauccugccuguguccaugaccaagaccagcguggacugcaccauguacaucugcggcgauuccaccgagugcuccaaccugcugcugcaguacggcagcuucugcacccagcugaauagagcccugacagggaucgccguggaacaggacaagaacacccaagagguguucgcccaagugaagcagaucuacaagaccccuccuaucaaggacuucggcggcuucaauuucagccagauucugcccgauccuagcaagcccagcaagcggagcuucaucgaggaccugcuguucaacaaagugacacuggccgacgccggcuucaucaagcaguauggcgauugucugggcgacauugccgccagggaucugauuugcgcccagaaguuuaacggacugacagugcugccuccucugcugaccgaugagaugaucgcccaguacacaucugcccugcuggccggcacaaucacaagcggcuggacauuuggagcaggcgccgcucugcagauccccuuugcuaugcagauggccuaccgguucaacggcaucggagugacccagaaugugcuguacgagaaccagaagcugaucgccaaccaguucaacagcgccaucggcaagauccaggacagccugagcagcacagcaagcgcccugggaaagcugcaggacguggucaaccagaaugcccaggcacugaacacccuggucaagcagcuguccuccaacuucggcgccaucagcucugugcugaacgauauccugagcagacuggacccuccugaggccgaggugcagaucgacagacugaucacaggcagacugcagagccuccagacauacgugacccagcagcugaucagagccgccgagauuagagccucugccaaucuggccgccaccaagaugucugagugugugcugggccagagcaagagaguggacuuuugcggcaagggcuaccaccugaugagcuucccucagucugccccucacggcgugguguuucugcacgugacauaugugcccgcucaagagaagaauuucaccaccgcuccagccaucugccacgacggcaaagcccacuuuccuagagaaggcguguucguguccaacggcacccauugguucgugacacagcggaacuucuacgagccccagaucaucaccaccgacaacaccuucgugucuggcaacugcgacgucgugaucggcauugugaacaauaccguguacgacccucugcagcccgagcuggacagcuucaaagaggaacuggacaaguacuuuaagaaccacacaagccccgacguggaccugggcgauaucagcggaaucaaugccagcgucgugaacauccagaaagagaucgaccggcugaacgagguggccaagaaucugaacgagagccugaucgaccugcaagaacuggggaaguacgagcaguacaucaaguggcccugguacaucuggcugggcuuuaucgccggacugauugccaucgugauggucacaaucaugcuguguugcaugaccagcugcuguagcugccugaagggcuguuguagcuguggcagcugcugcaaguucgacgaggacgauucugagcccgugcugaagggcgugaaacugcacuacacaugaugacucgagcugguacugcaugcacgcaaugcuagcugccccuuucccguccuggguaccccgagucucccccgaccucgggucccagguaugcucccaccuccaccugccccacucaccaccucugcuaguuccagacaccucccaagcacgcagcaaugcagcucaaaacgcuuagccuagccacacccccacgggaaacagcagugauuaaccuuuagcaauaaacgaaaguuuaacuaagcuauacuaaccccaggguuggucaauuucgugccagccacacccuggagcuagcaaaaaaaaaaaaaaaaaaaaaaaaaaaaaagcauaugacuaaaaaaaaaaaaaaaaaaaaaaaaaaaaaaaaaaaaaaaaaaaaaaaaaaaaaaaaaaaaaaaaaaaaaa

SEQ ID NO: 26916 - RNA, 4283 nt, Artificial Sequence
  SARS-CoV-2/Wuhan/WIV05/2019__EPI_ISL_402128 spike protein mRNA gc mod (1-1273)(K986P_V987P_D614G_M1229I)
agaauaaacuaguauucuucugguccccacagacucagagagaacccgccaccauguucguguuccuggugcugcugccucugguguccagccagugugugaaccugaccaccagaacacagcugccuccagccuacaccaacagcuuuaccagaggcguguacuaccccgacaagguguucagauccagcgugcugcacucuacccaggaccuguuccugccuuucuucagcaacgugaccugguuccacgccauccacguguccggcaccaauggcaccaagagauucgacaaccccgugcugcccuucaacgacgggguguacuuugccagcaccgagaaguccaacaucaucagaggcuggaucuucggcaccacacuggacagcaagacccagagccugcugaucgugaacaacgccaccaacguggucaucaaagugugcgaguuccaguucugcaacgaccccuuccugggcgucuacuaccacaagaacaacaagagcuggauggaaagcgaguuccggguguacagcagcgccaacaacugcaccuucgaguacgugucccagccuuuccugauggaccuggaaggcaagcagggcaacuucaagaaccugcgcgaguucguguuuaagaacaucgacggcuacuucaagaucuacagcaagcacaccccuaucaaccucgugcgggaucugccucagggcuucucugcucuggaaccccugguggaucugcccaucggcaucaacaucacccgguuucagacacugcuggcccugcacagaagcuaccugacaccuggcgauagcagcagcggauggacagcuggugccgccgcuuacuaugugggcuaccugcagccuagaaccuuccugcugaaguacaacgagaacggcaccaucaccgacgccguggauugugcucuggauccucugagcgagacaaagugcacccugaaguccuucaccguggaaaagggcaucuaccagaccagcaacuuccgggugcagcccaccgaauccaucgugcgguuccccaauaucaccaaucugugccccuucggcgagguguucaaugccaccagauucgccucuguguacgccuggaaccggaagcggaucagcaauugcguggccgacuacuccgugcuguacaacuccgccagcuucagcaccuucaagugcuacggcguguccccuaccaagcugaacgaccugugcuucacaaacguguacgccgacagcuucgugauccggggagaugaagugcggcagauugccccuggacagacaggcaagaucgccgacuacaacuacaagcugcccgacgacuucaccggcugugugauugccuggaacagcaacaaccuggacuccaaagucggcggcaacuacaauuaccuguaccggcuguuccggaaguccaaucugaagcccuucgagcgggacaucuccaccgagaucuaucaggccggcagcaccccuuguaacggcguggaaggcuucaacugcuacuucccacugcaguccuacggcuuucagcccacaaauggcgugggcuaucagcccuacagagugguggugcugagcuucgaacugcugcaugccccugccacagugugcggcccuaagaaaagcaccaaucucgugaagaacaaaugcgugaacuucaacuucaacggccugaccggcaccggcgugcugacagagagcaacaagaaguuccugccauuccagcaguuuggccgggauaucgccgauaccacagacgccguuagagauccccagacacuggaaauccuggacaucaccccuugcagcuucggcggagugucugugaucaccccuggcaccaacaccagcaaucagguggcagugcuguaccagggcgugaacuguaccgaagugcccguggccauucacgccgaucagcugacaccuacauggcggguguacuccaccggcagcaauguguuucagaccagagccggcugucugaucggagccgagcacgugaacaauagcuacgagugcgacauccccaucggcgcuggaaucugcgccagcuaccagacacagacaaacagcccucggagagccagaagcguggccagccagagcaucauugccuacacaaugucucugggcgccgagaacagcguggccuacuccaacaacucuaucgcuauccccaccaacuucaccaucagcgugaccacagagauccugccuguguccaugaccaagaccagcguggacugcaccauguacaucugcggcgauuccaccgagugcuccaaccugcugcugcaguacggcagcuucugcacccagcugaauagagcccugacagggaucgccguggaacaggacaagaacacccaagagguguucgcccaagugaagcagaucuacaagaccccuccuaucaaggacuucggcggcuucaauuucagccagauucugcccgauccuagcaagcccagcaagcggagcuucaucgaggaccugcuguucaacaaagugacacuggccgacgccggcuucaucaagcaguauggcgauugucugggcgacauugccgccagggaucugauuugcgcccagaaguuuaacggacugacagugcugccuccucugcugaccgaugagaugaucgcccaguacacaucugcccugcuggccggcacaaucacaagcggcuggacauuuggagcaggcgccgcucugcagauccccuuugcuaugcagauggccuaccgguucaacggcaucggagugacccagaaugugcuguacgagaaccagaagcugaucgccaaccaguucaacagcgccaucggcaagauccaggacagccugagcagcacagcaagcgcccugggaaagcugcaggacguggucaaccagaaugcccaggcacugaacacccuggucaagcagcuguccuccaacuucggcgccaucagcucugugcugaacgauauccugagcagacuggacccuccugaggccgaggugcagaucgacagacugaucacaggcagacugcagagccuccagacauacgugacccagcagcugaucagagccgccgagauuagagccucugccaaucuggccgccaccaagaugucugagugugugcugggccagagcaagagaguggacuuuugcggcaagggcuaccaccugaugagcuucccucagucugccccucacggcgugguguuucugcacgugacauaugugcccgcucaagagaagaauuucaccaccgcuccagccaucugccacgacggcaaagcccacuuuccuagagaaggcguguucguguccaacggcacccauugguucgugacacagcggaacuucuacgagccccagaucaucaccaccgacaacaccuucgugucuggcaacugcgacgucgugaucggcauugugaacaauaccguguacgacccucugcagcccgagcuggacagcuucaaagaggaacuggacaaguacuuuaagaaccacacaagccccgacguggaccugggcgauaucagcggaaucaaugccagcgucgugaacauccagaaagagaucgaccggcugaacgagguggccaagaaucugaacgagagccugaucgaccugcaagaacuggggaaguacgagcaguacaucaaguggcccugguacaucuggcugggcuuuaucgccggacugauugccaucgugaucgucacaaucaugcuguguugcaugaccagcugcuguagcugccugaagggcuguuguagcuguggcagcugcugcaaguucgacgaggacgauucugagcccgugcugaagggcgugaaacugcacuacacaugaugacucgagcugguacugcaugcacgcaaugcuagcugccccuuucccguccuggguaccccgagucucccccgaccucgggucccagguaugcucccaccuccaccugccccacucaccaccucugcuaguuccagacaccucccaagcacgcagcaaugcagcucaaaacgcuuagccuagccacacccccacgggaaacagcagugauuaaccuuuagcaauaaacgaaaguuuaacuaagcuauacuaaccccaggguuggucaauuucgugccagccacacccuggagcuagcaaaaaaaaaaaaaaaaaaaaaaaaaaaaaagcauaugacuaaaaaaaaaaaaaaaaaaaaaaaaaaaaaaaaaaaaaaaaaaaaaaaaaaaaaaaaaaaaaaaaaaaaaa

SEQ ID NO: 26917 - RNA, 4277 nt, Artificial Sequence
  SARS-CoV-2/Wuhan/WIV05/2019__EPI_ISL_402128 spike protein mRNA gc mod (1-1273)(K986P_V987P_H69del_V70del_A222V_Y453F_S477N_D614G_I692V)
agaauaaacuaguauucuucugguccccacagacucagagagaacccgccaccauguucguguuccuggugcugcugccucugguguccagccagugugugaaccugaccaccagaacacagcugccuccagccuacaccaacagcuuuaccagaggcguguacuaccccgacaagguguucagauccagcgugcugcacucuacccaggaccuguuccugccuuucuucagcaacgugaccugguuccacgccaucuccggcaccaauggcaccaagagauucgacaaccccgugcugcccuucaacgacgggguguacuuugccagcaccgagaaguccaacaucaucagaggcuggaucuucggcaccacacuggacagcaagacccagagccugcugaucgugaacaacgccaccaacguggucaucaaagugugcgaguuccaguucugcaacgaccccuuccugggcgucuacuaccacaagaacaacaagagcuggauggaaagcgaguuccggguguacagcagcgccaacaacugcaccuucgaguacgugucccagccuuuccugauggaccuggaaggcaagcagggcaacuucaagaaccugcgcgaguucguguuuaagaacaucgacggcuacuucaagaucuacagcaagcacaccccuaucaaccucgugcgggaucugccucagggcuucucugugcuggaaccccugguggaucugcccaucggcaucaacaucacccgguuucagacacugcuggcccugcacagaagcuaccugacaccuggcgauagcagcagcggauggacagcuggugccgccgcuuacuaugugggcuaccugcagccuagaaccuuccugcugaaguacaacgagaacggcaccaucaccgacgccguggauugugcucuggauccucugagcgagacaaagugcacccugaaguccuucaccguggaaaagggcaucuaccagaccagcaacuuccgggugcagcccaccgaauccaucgugcgguuccccaauaucaccaaucugugccccuucggcgagguguucaaugccaccagauucgccucuguguacgccuggaaccggaagcggaucagcaauugcguggccgacuacuccgugcuguacaacuccgccagcuucagcaccuucaagugcuacggcguguccccuaccaagcugaacgaccugugcuucacaaacguguacgccgacagcuucgugauccggggagaugaagugcggcagauugccccuggacagacaggcaagaucgccgacuacaacuacaagcugcccgacgacuucaccggcugugugauugccuggaacagcaacaaccuggacuccaaagucggcggcaacuacaauuaccuguuccggcuguuccggaaguccaaucugaagcccuucgagcgggacaucuccaccgagaucuaucaggccggcaacaccccuuguaacggcguggaaggcuucaacugcuacuucccacugcaguccuacggcuuucagcccacaaauggcgugggcuaucagcccuacagagugguggugcugagcuucgaacugcugcaugccccugccacagugugcggcccuaagaaaagcaccaaucucgugaagaacaaaugcgugaacuucaacuucaacggccugaccggcaccggcgugcugacagagagcaacaagaaguuccugccauuccagcaguuuggccgggauaucgccgauaccacagacgccguuagagauccccagacacuggaaauccuggacaucaccccuugcagcuucggcggagugucugugaucaccccuggcaccaacaccagcaaucagguggcagugcuguaccagggcgugaacuguaccgaagugcccguggccauucacgccgaucagcugacaccuacauggcggguguacuccaccggcagcaauguguuucagaccagagccggcugucugaucggagccgagcacgugaacaauagcuacgagugcgacauccccaucggcgcuggaaucugcgccagcuaccagacacagacaaacagcccucggagagccagaagcguggccagccagagcgugauugccuacacaaugucucugggcgccgagaacagcguggccuacuccaacaacucuaucgcuauccccaccaacuucaccaucagcgugaccacagagauccugccuguguccaugaccaagaccagcguggacugcaccauguacaucugcggcgauuccaccgagugcuccaaccugcugcugcaguacggcagcuucugcacccagcugaauagagcccugacagggaucgccguggaacaggacaagaacacccaagagguguucgcccaagugaagcagaucuacaagaccccuccuaucaaggacuucggcggcuucaauuucagccagauucugcccgauccuagcaagcccagcaagcggagcuucaucgaggaccugcuguucaacaaagugacacuggccgacgccggcuucaucaagcaguauggcgauugucugggcgacauugccgccagggaucugauuugcgcccagaaguuuaacggacugacagugcugccuccucugcugaccgaugagaugaucgcccaguacacaucugcccugcuggccggcacaaucacaagcggcuggacauuuggagcaggcgccgcucugcagauccccuuugcuaugcagauggccuaccgguucaacggcaucggagugacccagaaugugcuguacgagaaccagaagcugaucgccaaccaguucaacagcgccaucggcaagauccaggacagccugagcagcacagcaagcgcccugggaaagcugcaggacguggucaaccagaaugcccaggcacugaacacccuggucaagcagcuguccuccaacuucggcgccaucagcucugugcugaacgauauccugagcagacuggacccuccugaggccgaggugcagaucgacagacugaucacaggcagacugcagagccuccagacauacgugacccagcagcugaucagagccgccgagauuagagccucugccaaucuggccgccaccaagaugucugagugugugcugggccagagcaagagaguggacuuuugcggcaagggcuaccaccugaugagcuucccucagucugccccucacggcgugguguuucugcacgugacauaugugcccgcucaagagaagaauuucaccaccgcuccagccaucugccacgacggcaaagcccacuuuccuagagaaggcguguucguguccaacggcacccauugguucgugacacagcggaacuucuacgagccccagaucaucaccaccgacaacaccuucgugucuggcaacugcgacgucgugaucggcauugugaacaauaccguguacgacccucugcagcccgagcuggacagcuucaaagaggaacuggacaaguacuuuaagaaccacacaagccccgacguggaccugggcgauaucagcggaaucaaugccagcgucgugaacauccagaaagagaucgaccggcugaacgagguggccaagaaucugaacgagagccugaucgaccugcaagaacuggggaaguacgagcaguacaucaaguggcccugguacaucuggcugggcuuuaucgccggacugauugccaucgugauggucacaaucaugcuguguugcaugaccagcugcuguagcugccugaagggcuguuguagcuguggcagcugcugcaaguucgacgaggacgauucugagcccgugcugaagggcgugaaacugcacuacacaugaugacucgagcugguacugcaugcacgcaaugcuagcugccccuuucccguccuggguaccccgagucucccccgaccucgggucccagguaugcucccaccuccaccugccccacucaccaccucugcuaguuccagacaccucccaagcacgcagcaaugcagcucaaaacgcuuagccuagccacacccccacgggaaacagcagugauuaaccuuuagcaauaaacgaaaguuuaacuaagcuauacuaaccccaggguuggucaauuucgugccagccacacccuggagcuagcaaaaaaaaaaaaaaaaaaaaaaaaaaaaaagcauaugacuaaaaaaaaaaaaaaaaaaaaaaaaaaaaaaaaaaaaaaaaaaaaaaaaaaaaaaaaaaaaaaaaaaaaaa

SEQ ID NO: 26918 - RNA, 4277 nt, Artificial Sequence
  SARS-CoV-2/Wuhan/WIV05/2019__EPI_ISL_402128 spike protein mRNA gc mod (1-1273)(K986P_V987P_H69del_V70del_Y453F_D614G_I692V_M1229I)
agaauaaacuaguauucuucugguccccacagacucagagagaacccgccaccauguucguguuccuggugcugcugccucugguguccagccagugugugaaccugaccaccagaacacagcugccuccagccuacaccaacagcuuuaccagaggcguguacuaccccgacaagguguucagauccagcgugcugcacucuacccaggaccuguuccugccuuucuucagcaacgugaccugguuccacgccaucuccggcaccaauggcaccaagagauucgacaaccccgugcugcccuucaacgacgggguguacuuugccagcaccgagaaguccaacaucaucagaggcuggaucuucggcaccacacuggacagcaagacccagagccugcugaucgugaacaacgccaccaacguggucaucaaagugugcgaguuccaguucugcaacgaccccuuccugggcgucuacuaccacaagaacaacaagagcuggauggaaagcgaguuccggguguacagcagcgccaacaacugcaccuucgaguacgugucccagccuuuccugauggaccuggaaggcaagcagggcaacuucaagaaccugcgcgaguucguguuuaagaacaucgacggcuacuucaagaucuacagcaagcacaccccuaucaaccucgugcgggaucugccucagggcuucucugcucuggaaccccugguggaucugcccaucggcaucaacaucacccgguuucagacacugcuggcccugcacagaagcuaccugacaccuggcgauagcagcagcggauggacagcuggugccgccgcuuacuaugugggcuaccugcagccuagaaccuuccugcugaaguacaacgagaacggcaccaucaccgacgccguggauugugcucuggauccucugagcgagacaaagugcacccugaaguccuucaccguggaaaagggcaucuaccagaccagcaacuuccgggugcagcccaccgaauccaucgugcgguuccccaauaucaccaaucugugccccuucggcgagguguucaaugccaccagauucgccucuguguacgccuggaaccggaagcggaucagcaauugcguggccgacuacuccgugcuguacaacuccgccagcuucagcaccuucaagugcuacggcguguccccuaccaagcugaacgaccugugcuucacaaacguguacgccgacagcuucgugauccggggagaugaagugcggcagauugccccuggacagacaggcaagaucgccgacuacaacuacaagcugcccgacgacuucaccggcugugugauugccuggaacagcaacaaccuggacuccaaagucggcggcaacuacaauuaccuguuccggcuguuccggaaguccaaucugaagcccuucgagcgggacaucuccaccgagaucuaucaggccggcagcaccccuuguaacggcguggaaggcuucaacugcuacuucccacugcaguccuacggcuuucagcccacaaauggcgugggcuaucagcccuacagagugguggugcugagcuucgaacugcugcaugccccugccacagugugcggcccuaagaaaagcaccaaucucgugaagaacaaaugcgugaacuucaacuucaacggccugaccggcaccggcgugcugacagagagcaacaagaaguuccugccauuccagcaguuuggccgggauaucgccgauaccacagacgccguuagagauccccagacacuggaaauccuggacaucaccccuugcagcuucggcggagugucugugaucaccccuggcaccaacaccagcaaucagguggcagugcuguaccagggcgugaacuguaccgaagugcccguggccauucacgccgaucagcugacaccuacauggcggguguacuccaccggcagcaauguguuucagaccagagccggcugucugaucggagccgagcacgugaacaauagcuacgagugcgacauccccaucggcgcuggaaucugcgccagcuaccagacacagacaaacagcccucggagagccagaagcguggccagccagagcgugauugccuacacaaugucucugggcgccgagaacagcguggccuacuccaacaacucuaucgcuauccccaccaacuucaccaucagcgugaccacagagauccugccuguguccaugaccaagaccagcguggacugcaccauguacaucugcggcgauuccaccgagugcuccaaccugcugcugcaguacggcagcuucugcacccagcugaauagagcccugacagggaucgccguggaacaggacaagaacacccaagagguguucgcccaagugaagcagaucuacaagaccccuccuaucaaggacuucggcggcuucaauuucagccagauucugcccgauccuagcaagcccagcaagcggagcuucaucgaggaccugcuguucaacaaagugacacuggccgacgccggcuucaucaagcaguauggcgauugucugggcgacauugccgccagggaucugauuugcgcccagaaguuuaacggacugacagugcugccuccucugcugaccgaugagaugaucgcccaguacacaucugcccugcuggccggcacaaucacaagcggcuggacauuuggagcaggcgccgcucugcagauccccuuugcuaugcagauggccuaccgguucaacggcaucggagugacccagaaugugcuguacgagaaccagaagcugaucgccaaccaguucaacagcgccaucggcaagauccaggacagccugagcagcacagcaagcgcccugggaaagcugcaggacguggucaaccagaaugcccaggcacugaacacccuggucaagcagcuguccuccaacuucggcgccaucagcucugugcugaacgauauccugagcagacuggacccuccugaggccgaggugcagaucgacagacugaucacaggcagacugcagagccuccagacauacgugacccagcagcugaucagagccgccgagauuagagccucugccaaucuggccgccaccaagaugucugagugugugcugggccagagcaagagaguggacuuuugcggcaagggcuaccaccugaugagcuucccucagucugccccucacggcgugguguuucugcacgugacauaugugcccgcucaagagaagaauuucaccaccgcuccagccaucugccacgacggcaaagcccacuuuccuagagaaggcguguucguguccaacggcacccauugguucgugacacagcggaacuucuacgagccccagaucaucaccaccgacaacaccuucgugucuggcaacugcgacgucgugaucggcauugugaacaauaccguguacgacccucugcagcccgagcuggacagcuucaaagaggaacuggacaaguacuuuaagaaccacacaagccccgacguggaccugggcgauaucagcggaaucaaugccagcgucgugaacauccagaaagagaucgaccggcugaacgagguggccaagaaucugaacgagagccugaucgaccugcaagaacuggggaaguacgagcaguacaucaaguggcccugguacaucuggcugggcuuuaucgccggacugauugccaucgugaucgucacaaucaugcuguguugcaugaccagcugcuguagcugccugaagggcuguuguagcuguggcagcugcugcaaguucgacgaggacgauucugagcccgugcugaagggcgugaaacugcacuacacaugaugacucgagcugguacugcaugcacgcaaugcuagcugccccuuucccguccuggguaccccgagucucccccgaccucgggucccagguaugcucccaccuccaccugccccacucaccaccucugcuaguuccagacaccucccaagcacgcagcaaugcagcucaaaacgcuuagccuagccacacccccacgggaaacagcagugauuaaccuuuagcaauaaacgaaaguuuaacuaagcuauacuaaccccaggguuggucaauuucgugccagccacacccuggagcuagcaaaaaaaaaaaaaaaaaaaaaaaaaaaaaagcauaugacuaaaaaaaaaaaaaaaaaaaaaaaaaaaaaaaaaaaaaaaaaaaaaaaaaaaaaaaaaaaaaaaaaaaaaa

SEQ ID NO: 26919 - RNA, 4274 nt, Artificial Sequence
  SARS-CoV-2/Wuhan/WIV05/2019__EPI_ISL_402128 spike protein mRNA gc mod (1-1273)(K986P_V987P_K986P_V987P_H69del_V70del_Y144del_N501Y_A570 D_D614G_P681H_T716I_S982A_D1118H)
agaauaaacuaguauucuucugguccccacagacucagagagaacccgccaccauguucguguuccuggugcugcugccucugguguccagccagugugugaaccugaccaccagaacacagcugccuccagccuacaccaacagcuuuaccagaggcguguacuaccccgacaagguguucagauccagcgugcugcacucuacccaggaccuguuccugccuuucuucagcaacgugaccugguuccacgccaucuccggcaccaauggcaccaagagauucgacaaccccgugcugcccuucaacgacgggguguacuuugccagcaccgagaaguccaacaucaucagaggcuggaucuucggcaccacacuggacagcaagacccagagccugcugaucgugaacaacgccaccaacguggucaucaaagugugcgaguuccaguucugcaacgaccccuuccugggcgucuaccacaagaacaacaagagcuggauggaaagcgaguuccggguguacagcagcgccaacaacugcaccuucgaguacgugucccagccuuuccugauggaccuggaaggcaagcagggcaacuucaagaaccugcgcgaguucguguuuaagaacaucgacggcuacuucaagaucuacagcaagcacaccccuaucaaccucgugcgggaucugccucagggcuucucugcucuggaaccccugguggaucugcccaucggcaucaacaucacccgguuucagacacugcuggcccugcacagaagcuaccugacaccuggcgauagcagcagcggauggacagcuggugccgccgcuuacuaugugggcuaccugcagccuagaaccuuccugcugaaguacaacgagaacggcaccaucaccgacgccguggauugugcucuggauccucugagcgagacaaagugcacccugaaguccuucaccguggaaaagggcaucuaccagaccagcaacuuccgggugcagcccaccgaauccaucgugcgguuccccaauaucaccaaucugugccccuucggcgagguguucaaugccaccagauucgccucuguguacgccuggaaccggaagcggaucagcaauugcguggccgacuacuccgugcuguacaacuccgccagcuucagcaccuucaagugcuacggcguguccccuaccaagcugaacgaccugugcuucacaaacguguacgccgacagcuucgugauccggggagaugaagugcggcagauugccccuggacagacaggcaagaucgccgacuacaacuacaagcugcccgacgacuucaccggcugugugauugccuggaacagcaacaaccuggacuccaaagucggcggcaacuacaauuaccuguaccggcuguuccggaaguccaaucugaagcccuucgagcgggacaucuccaccgagaucuaucaggccggcagcaccccuuguaacggcguggaaggcuucaacugcuacuucccacugcaguccuacggcuuucagcccacauacggcgugggcuaucagcccuacagagugguggugcugagcuucgaacugcugcaugccccugccacagugugcggcccuaagaaaagcaccaaucucgugaagaacaaaugcgugaacuucaacuucaacggccugaccggcaccggcgugcugacagagagcaacaagaaguuccugccauuccagcaguuuggccgggauaucgacgauaccacagacgccguuagagauccccagacacuggaaauccuggacaucaccccuugcagcuucggcggagugucugugaucaccccuggcaccaacaccagcaaucagguggcagugcuguaccagggcgugaacuguaccgaagugcccguggccauucacgccgaucagcugacaccuacauggcggguguacuccaccggcagcaauguguuucagaccagagccggcugucugaucggagccgagcacgugaacaauagcuacgagugcgacauccccaucggcgcuggaaucugcgccagcuaccagacacagacaaacagccaccggagagccagaagcguggccagccagagcaucauugccuacacaaugucucugggcgccgagaacagcguggccuacuccaacaacucuaucgcuauccccaucaacuucaccaucagcgugaccacagagauccugccuguguccaugaccaagaccagcguggacugcaccauguacaucugcggcgauuccaccgagugcuccaaccugcugcugcaguacggcagcuucugcacccagcugaauagagcccugacagggaucgccguggaacaggacaagaacacccaagagguguucgcccaagugaagcagaucuacaagaccccuccuaucaaggacuucggcggcuucaauuucagccagauucugcccgauccuagcaagcccagcaagcggagcuucaucgaggaccugcuguucaacaaagugacacuggccgacgccggcuucaucaagcaguauggcgauugucugggcgacauugccgccagggaucugauuugcgcccagaaguuuaacggacugacagugcugccuccucugcugaccgaugagaugaucgcccaguacacaucugcccugcuggccggcacaaucacaagcggcuggacauuuggagcaggcgccgcucugcagauccccuuugcuaugcagauggccuaccgguucaacggcaucggagugacccagaaugugcuguacgagaaccagaagcugaucgccaaccaguucaacagcgccaucggcaagauccaggacagccugagcagcacagcaagcgcccugggaaagcugcaggacguggucaaccagaaugcccaggcacugaacacccuggucaagcagcuguccuccaacuucggcgccaucagcucugugcugaacgauauccuggccagacuggacccuccugaggccgaggugcagaucgacagacugaucacaggcagacugcagagccuccagacauacgugacccagcagcugaucagagccgccgagauuagagccucugccaaucuggccgccaccaagaugucugagugugugcugggccagagcaagagaguggacuuuugcggcaagggcuaccaccugaugagcuucccucagucugccccucacggcgugguguuucugcacgugacauaugugcccgcucaagagaagaauuucaccaccgcuccagccaucugccacgacggcaaagcccacuuuccuagagaaggcguguucguguccaacggcacccauugguucgugacacagcggaacuucuacgagccccagaucaucaccacccacaacaccuucgugucuggcaacugcgacgucgugaucggcauugugaacaauaccguguacgacccucugcagcccgagcuggacagcuucaaagaggaacuggacaaguacuuuaagaaccacacaagccccgacguggaccugggcgauaucagcggaaucaaugccagcgucgugaacauccagaaagagaucgaccggcugaacgagguggccaagaaucugaacgagagccugaucgaccugcaagaacuggggaaguacgagcaguacaucaaguggcccugguacaucuggcugggcuuuaucgccggacugauugccaucgugauggucacaaucaugcuguguugcaugaccagcugcuguagcugccugaagggcuguuguagcuguggcagcugcugcaaguucgacgaggacgauucugagcccgugcugaagggcgugaaacugcacuacacaugaugacucgagcugguacugcaugcacgcaaugcuagcugccccuuucccguccuggguaccccgagucucccccgaccucgggucccagguaugcucccaccuccaccugccccacucaccaccucugcuaguuccagacaccucccaagcacgcagcaaugcagcucaaaacgcuuagccuagccacacccccacgggaaacagcagugauuaaccuuuagcaauaaacgaaaguuuaacuaagcuauacuaaccccaggguuggucaauuucgugccagccacacccuggagcuagcaaaaaaaaaaaaaaaaaaaaaaaaaaaaaagcauaugacuaaaaaaaaaaaaaaaaaaaaaaaaaaaaaaaaaaaaaaaaaaaaaaaaaaaaaaaaaaaaaaaaaaaaaa

SEQ ID NO: 26920 - RNA, 4283 nt, Artificial Sequence
  SARS-CoV-2/Wuhan/WIV05/2019__EPI_ISL_402128 spike protein mRNA gc mod (1-1273)(K986P_V987P_K986P_V987P_K417N_E484K_N501Y_D614G)
agaauaaacuaguauucuucugguccccacagacucagagagaacccgccaccauguucguguuccuggugcugcugccucugguguccagccagugugugaaccugaccaccagaacacagcugccuccagccuacaccaacagcuuuaccagaggcguguacuaccccgacaagguguucagauccagcgugcugcacucuacccaggaccuguuccugccuuucuucagcaacgugaccugguuccacgccauccacguguccggcaccaauggcaccaagagauucgacaaccccgugcugcccuucaacgacgggguguacuuugccagcaccgagaaguccaacaucaucagaggcuggaucuucggcaccacacuggacagcaagacccagagccugcugaucgugaacaacgccaccaacguggucaucaaagugugcgaguuccaguucugcaacgaccccuuccugggcgucuacuaccacaagaacaacaagagcuggauggaaagcgaguuccggguguacagcagcgccaacaacugcaccuucgaguacgugucccagccuuuccugauggaccuggaaggcaagcagggcaacuucaagaaccugcgcgaguucguguuuaagaacaucgacggcuacuucaagaucuacagcaagcacaccccuaucaaccucgugcgggaucugccucagggcuucucugcucuggaaccccugguggaucugcccaucggcaucaacaucacccgguuucagacacugcuggcccugcacagaagcuaccugacaccuggcgauagcagcagcggauggacagcuggugccgccgcuuacuaugugggcuaccugcagccuagaaccuuccugcugaaguacaacgagaacggcaccaucaccgacgccguggauugugcucuggauccucugagcgagacaaagugcacccugaaguccuucaccguggaaaagggcaucuaccagaccagcaacuuccgggugcagcccaccgaauccaucgugcgguuccccaauaucaccaaucugugccccuucggcgagguguucaaugccaccagauucgccucuguguacgccuggaaccggaagcggaucagcaauugcguggccgacuacuccgugcuguacaacuccgccagcuucagcaccuucaagugcuacggcguguccccuaccaagcugaacgaccugugcuucacaaacguguacgccgacagcuucgugauccggggagaugaagugcggcagauugccccuggacagacaggcaacaucgccgacuacaacuacaagcugcccgacgacuucaccggcugugugauugccuggaacagcaacaaccuggacuccaaagucggcggcaacuacaauuaccuguaccggcuguuccggaaguccaaucugaagcccuucgagcgggacaucuccaccgagaucuaucaggccggcagcaccccuuguaacggcgugaagggcuucaacugcuacuucccacugcaguccuacggcuuucagcccacauacggcgugggcuaucagcccuacagagugguggugcugagcuucgaacugcugcaugccccugccacagugugcggcccuaagaaaagcaccaaucucgugaagaacaaaugcgugaacuucaacuucaacggccugaccggcaccggcgugcugacagagagcaacaagaaguuccugccauuccagcaguuuggccgggauaucgccgauaccacagacgccguuagagauccccagacacuggaaauccuggacaucaccccuugcagcuucggcggagugucugugaucaccccuggcaccaacaccagcaaucagguggcagugcuguaccagggcgugaacuguaccgaagugcccguggccauucacgccgaucagcugacaccuacauggcggguguacuccaccggcagcaauguguuucagaccagagccggcugucugaucggagccgagcacgugaacaauagcuacgagugcgacauccccaucggcgcuggaaucugcgccagcuaccagacacagacaaacagcccucggagagccagaagcguggccagccagagcaucauugccuacacaaugucucugggcgccgagaacagcguggccuacuccaacaacucuaucgcuauccccaccaacuucaccaucagcgugaccacagagauccugccuguguccaugaccaagaccagcguggacugcaccauguacaucugcggcgauuccaccgagugcuccaaccugcugcugcaguacggcagcuucugcacccagcugaauagagcccugacagggaucgccguggaacaggacaagaacacccaagagguguucgcccaagugaagcagaucuacaagaccccuccuaucaaggacuucggcggcuucaauuucagccagauucugcccgauccuagcaagcccagcaagcggagcuucaucgaggaccugcuguucaacaaagugacacuggccgacgccggcuucaucaagcaguauggcgauugucugggcgacauugccgccagggaucugauuugcgcccagaaguuuaacggacugacagugcugccuccucugcugaccgaugagaugaucgcccaguacacaucugcccugcuggccggcacaaucacaagcggcuggacauuuggagcaggcgccgcucugcagauccccuuugcuaugcagauggccuaccgguucaacggcaucggagugacccagaaugugcuguacgagaaccagaagcugaucgccaaccaguucaacagcgccaucggcaagauccaggacagccugagcagcacagcaagcgcccugggaaagcugcaggacguggucaaccagaaugcccaggcacugaacacccuggucaagcagcuguccuccaacuucggcgccaucagcucugugcugaacgauauccugagcagacuggacccuccugaggccgaggugcagaucgacagacugaucacaggcagacugcagagccuccagacauacgugacccagcagcugaucagagccgccgagauuagagccucugccaaucuggccgccaccaagaugucugagugugugcugggccagagcaagagaguggacuuuugcggcaagggcuaccaccugaugagcuucccucagucugccccucacggcgugguguuucugcacgugacauaugugcccgcucaagagaagaauuucaccaccgcuccagccaucugccacgacggcaaagcccacuuuccuagagaaggcguguucguguccaacggcacccauugguucgugacacagcggaacuucuacgagccccagaucaucaccaccgacaacaccuucgugucuggcaacugcgacgucgugaucggcauugugaacaauaccguguacgacccucugcagcccgagcuggacagcuucaaagaggaacuggacaaguacuuuaagaaccacacaagccccgacguggaccugggcgauaucagcggaaucaaugccagcgucgugaacauccagaaagagaucgaccggcugaacgagguggccaagaaucugaacgagagccugaucgaccugcaagaacuggggaaguacgagcaguacaucaaguggcccugguacaucuggcugggcuuuaucgccggacugauugccaucgugauggucacaaucaugcuguguugcaugaccagcugcuguagcugccugaagggcuguuguagcuguggcagcugcugcaaguucgacgaggacgauucugagcccgugcugaagggcgugaaacugcacuacacaugaugacucgagcugguacugcaugcacgcaaugcuagcugccccuuucccguccuggguaccccgagucucccccgaccucgggucccagguaugcucccaccuccaccugccccacucaccaccucugcuaguuccagacaccucccaagcacgcagcaaugcagcucaaaacgcuuagccuagccacacccccacgggaaacagcagugauuaaccuuuagcaauaaacgaaaguuuaacuaagcuauacuaaccccaggguuggucaauuucgugccagccacacccuggagcuagcaaaaaaaaaaaaaaaaaaaaaaaaaaaaaagcauaugacuaaaaaaaaaaaaaaaaaaaaaaaaaaaaaaaaaaaaaaaaaaaaaaaaaaaaaaaaaaaaaaaaaaaaaa

SEQ ID NO: 26921 - RNA, 4274 nt, Artificial Sequence
  SARS-CoV-2/Wuhan/WIV05/2019__EPI_ISL_402128 spike protein mRNA gc mod (1-1273)(K986P_V987P_K986P_V987P_L18F_D80A_D215G_L242del_A243del_ L244del_R246I_K417N_E484K_N501Y_D614G_A701V)
agaauaaacuaguauucuucugguccccacagacucagagagaacccgccaccauguucguguuccuggugcugcugccucugguguccagccagugugugaacuucaccaccagaacacagcugccuccagccuacaccaacagcuuuaccagaggcguguacuaccccgacaagguguucagauccagcgugcugcacucuacccaggaccuguuccugccuuucuucagcaacgugaccugguuccacgccauccacguguccggcaccaauggcaccaagagauucgccaaccccgugcugcccuucaacgacgggguguacuuugccagcaccgagaaguccaacaucaucagaggcuggaucuucggcaccacacuggacagcaagacccagagccugcugaucgugaacaacgccaccaacguggucaucaaagugugcgaguuccaguucugcaacgaccccuuccugggcgucuacuaccacaagaacaacaagagcuggauggaaagcgaguuccggguguacagcagcgccaacaacugcaccuucgaguacgugucccagccuuuccugauggaccuggaaggcaagcagggcaacuucaagaaccugcgcgaguucguguuuaagaacaucgacggcuacuucaagaucuacagcaagcacaccccuaucaaccucgugcggggccugccucagggcuucucugcucuggaaccccugguggaucugcccaucggcaucaacaucacccgguuucagacacugcacaucagcuaccugacaccuggcgauagcagcagcggauggacagcuggugccgccgcuuacuaugugggcuaccugcagccuagaaccuuccugcugaaguacaacgagaacggcaccaucaccgacgccguggauugugcucuggauccucugagcgagacaaagugcacccugaaguccuucaccguggaaaagggcaucuaccagaccagcaacuuccgggugcagcccaccgaauccaucgugcgguuccccaauaucaccaaucugugccccuucggcgagguguucaaugccaccagauucgccucuguguacgccuggaaccggaagcggaucagcaauugcguggccgacuacuccgugcuguacaacuccgccagcuucagcaccuucaagugcuacggcguguccccuaccaagcugaacgaccugugcuucacaaacguguacgccgacagcuucgugauccggggagaugaagugcggcagauugccccuggacagacaggcaacaucgccgacuacaacuacaagcugcccgacgacuucaccggcugugugauugccuggaacagcaacaaccuggacuccaaagucggcggcaacuacaauuaccuguaccggcuguuccggaaguccaaucugaagcccuucgagcgggacaucuccaccgagaucuaucaggccggcagcaccccuuguaacggcgugaagggcuucaacugcuacuucccacugcaguccuacggcuuucagcccacauacggcgugggcuaucagcccuacagagugguggugcugagcuucgaacugcugcaugccccugccacagugugcggcccuaagaaaagcaccaaucucgugaagaacaaaugcgugaacuucaacuucaacggccugaccggcaccggcgugcugacagagagcaacaagaaguuccugccauuccagcaguuuggccgggauaucgccgauaccacagacgccguuagagauccccagacacuggaaauccuggacaucaccccuugcagcuucggcggagugucugugaucaccccuggcaccaacaccagcaaucagguggcagugcuguaccagggcgugaacuguaccgaagugcccguggccauucacgccgaucagcugacaccuacauggcggguguacuccaccggcagcaauguguuucagaccagagccggcugucugaucggagccgagcacgugaacaauagcuacgagugcgacauccccaucggcgcuggaaucugcgccagcuaccagacacagacaaacagcccucggagagccagaagcguggccagccagagcaucauugccuacacaaugucucugggcguggagaacagcguggccuacuccaacaacucuaucgcuauccccaccaacuucaccaucagcgugaccacagagauccugccuguguccaugaccaagaccagcguggacugcaccauguacaucugcggcgauuccaccgagugcuccaaccugcugcugcaguacggcagcuucugcacccagcugaauagagcccugacagggaucgccguggaacaggacaagaacacccaagagguguucgcccaagugaagcagaucuacaagaccccuccuaucaaggacuucggcggcuucaauuucagccagauucugcccgauccuagcaagcccagcaagcggagcuucaucgaggaccugcuguucaacaaagugacacuggccgacgccggcuucaucaagcaguauggcgauugucugggcgacauugccgccagggaucugauuugcgcccagaaguuuaacggacugacagugcugccuccucugcugaccgaugagaugaucgcccaguacacaucugcccugcuggccggcacaaucacaagcggcuggacauuuggagcaggcgccgcucugcagauccccuuugcuaugcagauggccuaccgguucaacggcaucggagugacccagaaugugcuguacgagaaccagaagcugaucgccaaccaguucaacagcgccaucggcaagauccaggacagccugagcagcacagcaagcgcccugggaaagcugcaggacguggucaaccagaaugcccaggcacugaacacccuggucaagcagcuguccuccaacuucggcgccaucagcucugugcugaacgauauccugagcagacuggacccuccugaggccgaggugcagaucgacagacugaucacaggcagacugcagagccuccagacauacgugacccagcagcugaucagagccgccgagauuagagccucugccaaucuggccgccaccaagaugucugagugugugcugggccagagcaagagaguggacuuuugcggcaagggcuaccaccugaugagcuucccucagucugccccucacggcgugguguuucugcacgugacauaugugcccgcucaagagaagaauuucaccaccgcuccagccaucugccacgacggcaaagcccacuuuccuagagaaggcguguucguguccaacggcacccauugguucgugacacagcggaacuucuacgagccccagaucaucaccaccgacaacaccuucgugucuggcaacugcgacgucgugaucggcauugugaacaauaccguguacgacccucugcagcccgagcuggacagcuucaaagaggaacuggacaaguacuuuaagaaccacacaagccccgacguggaccugggcgauaucagcggaaucaaugccagcgucgugaacauccagaaagagaucgaccggcugaacgagguggccaagaaucugaacgagagccugaucgaccugcaagaacuggggaaguacgagcaguacaucaaguggcccugguacaucuggcugggcuuuaucgccggacugauugccaucgugauggucacaaucaugcuguguugcaugaccagcugcuguagcugccugaagggcuguuguagcuguggcagcugcugcaaguucgacgaggacgauucugagcccgugcugaagggcgugaaacugcacuacacaugaugacucgagcugguacugcaugcacgcaaugcuagcugccccuuucccguccuggguaccccgagucucccccgaccucgggucccagguaugcucccaccuccaccugccccacucaccaccucugcuaguuccagacaccucccaagcacgcagcaaugcagcucaaaacgcuuagccuagccacacccccacgggaaacagcagugauuaaccuuuagcaauaaacgaaaguuuaacuaagcuauacuaaccccaggguuggucaauuucgugccagccacacccuggagcuagcaaaaaaaaaaaaaaaaaaaaaaaaaaaaaagcauaugacuaaaaaaaaaaaaaaaaaaaaaaaaaaaaaaaaaaaaaaaaaaaaaaaaaaaaaaaaaaaaaaaaaaaaaa

SEQ ID NO: 26922 - RNA, 4283 nt, Artificial Sequence
  SARS-CoV-2/Wuhan/WIV05/2019__EPI_ISL_402128 spike protein mRNA gc mod (1-1273)(K986P_V987P_K986P_V987P_E484K_D614G)
agaauaaacuaguauucuucugguccccacagacucagagagaacccgccaccauguucguguuccuggugcugcugccucugguguccagccagugugugaaccugaccaccagaacacagcugccuccagccuacaccaacagcuuuaccagaggcguguacuaccccgacaagguguucagauccagcgugcugcacucuacccaggaccuguuccugccuuucuucagcaacgugaccugguuccacgccauccacguguccggcaccaauggcaccaagagauucgacaaccccgugcugcccuucaacgacgggguguacuuugccagcaccgagaaguccaacaucaucagaggcuggaucuucggcaccacacuggacagcaagacccagagccugcugaucgugaacaacgccaccaacguggucaucaaagugugcgaguuccaguucugcaacgaccccuuccugggcgucuacuaccacaagaacaacaagagcuggauggaaagcgaguuccggguguacagcagcgccaacaacugcaccuucgaguacgugucccagccuuuccugauggaccuggaaggcaagcagggcaacuucaagaaccugcgcgaguucguguuuaagaacaucgacggcuacuucaagaucuacagcaagcacaccccuaucaaccucgugcgggaucugccucagggcuucucugcucuggaaccccugguggaucugcccaucggcaucaacaucacccgguuucagacacugcuggcccugcacagaagcuaccugacaccuggcgauagcagcagcggauggacagcuggugccgccgcuuacuaugugggcuaccugcagccuagaaccuuccugcugaaguacaacgagaacggcaccaucaccgacgccguggauugugcucuggauccucugagcgagacaaagugcacccugaaguccuucaccguggaaaagggcaucuaccagaccagcaacuuccgggugcagcccaccgaauccaucgugcgguuccccaauaucaccaaucugugccccuucggcgagguguucaaugccaccagauucgccucuguguacgccuggaaccggaagcggaucagcaauugcguggccgacuacuccgugcuguacaacuccgccagcuucagcaccuucaagugcuacggcguguccccuaccaagcugaacgaccugugcuucacaaacguguacgccgacagcuucgugauccggggagaugaagugcggcagauugccccuggacagacaggcaagaucgccgacuacaacuacaagcugcccgacgacuucaccggcugugugauugccuggaacagcaacaaccuggacuccaaagucggcggcaacuacaauuaccuguaccggcuguuccggaaguccaaucugaagcccuucgagcgggacaucuccaccgagaucuaucaggccggcagcaccccuuguaacggcgugaagggcuucaacugcuacuucccacugcaguccuacggcuuucagcccacaaauggcgugggcuaucagcccuacagagugguggugcugagcuucgaacugcugcaugccccugccacagugugcggcccuaagaaaagcaccaaucucgugaagaacaaaugcgugaacuucaacuucaacggccugaccggcaccggcgugcugacagagagcaacaagaaguuccugccauuccagcaguuuggccgggauaucgccgauaccacagacgccguuagagauccccagacacuggaaauccuggacaucaccccuugcagcuucggcggagugucugugaucaccccuggcaccaacaccagcaaucagguggcagugcuguaccagggcgugaacuguaccgaagugcccguggccauucacgccgaucagcugacaccuacauggcggguguacuccaccggcagcaauguguuucagaccagagccggcugucugaucggagccgagcacgugaacaauagcuacgagugcgacauccccaucggcgcuggaaucugcgccagcuaccagacacagacaaacagcccucggagagccagaagcguggccagccagagcaucauugccuacacaaugucucugggcgccgagaacagcguggccuacuccaacaacucuaucgcuauccccaccaacuucaccaucagcgugaccacagagauccugccuguguccaugaccaagaccagcguggacugcaccauguacaucugcggcgauuccaccgagugcuccaaccugcugcugcaguacggcagcuucugcacccagcugaauagagcccugacagggaucgccguggaacaggacaagaacacccaagagguguucgcccaagugaagcagaucuacaagaccccuccuaucaaggacuucggcggcuucaauuucagccagauucugcccgauccuagcaagcccagcaagcggagcuucaucgaggaccugcuguucaacaaagugacacuggccgacgccggcuucaucaagcaguauggcgauugucugggcgacauugccgccagggaucugauuugcgcccagaaguuuaacggacugacagugcugccuccucugcugaccgaugagaugaucgcccaguacacaucugcccugcuggccggcacaaucacaagcggcuggacauuuggagcaggcgccgcucugcagauccccuuugcuaugcagauggccuaccgguucaacggcaucggagugacccagaaugugcuguacgagaaccagaagcugaucgccaaccaguucaacagcgccaucggcaagauccaggacagccugagcagcacagcaagcgcccugggaaagcugcaggacguggucaaccagaaugcccaggcacugaacacccuggucaagcagcuguccuccaacuucggcgccaucagcucugugcugaacgauauccugagcagacuggacccuccugaggccgaggugcagaucgacagacugaucacaggcagacugcagagccuccagacauacgugacccagcagcugaucagagccgccgagauuagagccucugccaaucuggccgccaccaagaugucugagugugugcugggccagagcaagagaguggacuuuugcggcaagggcuaccaccugaugagcuucccucagucugccccucacggcgugguguuucugcacgugacauaugugcccgcucaagagaagaauuucaccaccgcuccagccaucugccacgacggcaaagcccacuuuccuagagaaggcguguucguguccaacggcacccauugguucgugacacagcggaacuucuacgagccccagaucaucaccaccgacaacaccuucgugucuggcaacugcgacgucgugaucggcauugugaacaauaccguguacgacccucugcagcccgagcuggacagcuucaaagaggaacuggacaaguacuuuaagaaccacacaagccccgacguggaccugggcgauaucagcggaaucaaugccagcgucgugaacauccagaaagagaucgaccggcugaacgagguggccaagaaucugaacgagagccugaucgaccugcaagaacuggggaaguacgagcaguacaucaaguggcccugguacaucuggcugggcuuuaucgccggacugauugccaucgugauggucacaaucaugcuguguugcaugaccagcugcuguagcugccugaagggcuguuguagcuguggcagcugcugcaaguucgacgaggacgauucugagcccgugcugaagggcgugaaacugcacuacacaugaugacucgagcugguacugcaugcacgcaaugcuagcugccccuuucccguccuggguaccccgagucucccccgaccucgggucccagguaugcucccaccuccaccugccccacucaccaccucugcuaguuccagacaccucccaagcacgcagcaaugcagcucaaaacgcuuagccuagccacacccccacgggaaacagcagugauuaaccuuuagcaauaaacgaaaguuuaacuaagcuauacuaaccccaggguuggucaauuucgugccagccacacccuggagcuagcaaaaaaaaaaaaaaaaaaaaaaaaaaaaaagcauaugacuaaaaaaaaaaaaaaaaaaaaaaaaaaaaaaaaaaaaaaaaaaaaaaaaaaaaaaaaaaaaaaaaaaaaaa

SEQ ID NO: 26923 - RNA, 4283 nt, Artificial Sequence
  SARS-CoV-2/Wuhan/WIV05/2019__EPI_ISL_402128 spike protein mRNA gc mod (1-1273)(K986P_V987P_K986P_V987P_L18F_T20N_P26S_D138Y_R190S_K417T _E484K_N501Y_D614G_H655Y_T1027I)
agaauaaacuaguauucuucugguccccacagacucagagagaacccgccaccauguucguguuccuggugcugcugccucugguguccagccagugugugaacuucaccaacagaacacagcugccuagcgccuacaccaacagcuuuaccagaggcguguacuaccccgacaagguguucagauccagcgugcugcacucuacccaggaccuguuccugccuuucuucagcaacgugaccugguuccacgccauccacguguccggcaccaauggcaccaagagauucgacaaccccgugcugcccuucaacgacgggguguacuuugccagcaccgagaaguccaacaucaucagaggcuggaucuucggcaccacacuggacagcaagacccagagccugcugaucgugaacaacgccaccaacguggucaucaaagugugcgaguuccaguucugcaacuaccccuuccugggcgucuacuaccacaagaacaacaagagcuggauggaaagcgaguuccggguguacagcagcgccaacaacugcaccuucgaguacgugucccagccuuuccugauggaccuggaaggcaagcagggcaacuucaagaaccugagcgaguucguguuuaagaacaucgacggcuacuucaagaucuacagcaagcacaccccuaucaaccucgugcgggaucugccucagggcuucucugcucuggaaccccugguggaucugcccaucggcaucaacaucacccgguuucagacacugcuggcccugcacagaagcuaccugacaccuggcgauagcagcagcggauggacagcuggugccgccgcuuacuaugugggcuaccugcagccuagaaccuuccugcugaaguacaacgagaacggcaccaucaccgacgccguggauugugcucuggauccucugagcgagacaaagugcacccugaaguccuucaccguggaaaagggcaucuaccagaccagcaacuuccgggugcagcccaccgaauccaucgugcgguuccccaauaucaccaaucugugccccuucggcgagguguucaaugccaccagauucgccucuguguacgccuggaaccggaagcggaucagcaauugcguggccgacuacuccgugcuguacaacuccgccagcuucagcaccuucaagugcuacggcguguccccuaccaagcugaacgaccugugcuucacaaacguguacgccgacagcuucgugauccggggagaugaagugcggcagauugccccuggacagacaggcaccaucgccgacuacaacuacaagcugcccgacgacuucaccggcugugugauugccuggaacagcaacaaccuggacuccaaagucggcggcaacuacaauuaccuguaccggcuguuccggaaguccaaucugaagcccuucgagcgggacaucuccaccgagaucuaucaggccggcagcaccccuuguaacggcgugaagggcuucaacugcuacuucccacugcaguccuacggcuuucagcccacauacggcgugggcuaucagcccuacagagugguggugcugagcuucgaacugcugcaugccccugccacagugugcggcccuaagaaaagcaccaaucucgugaagaacaaaugcgugaacuucaacuucaacggccugaccggcaccggcgugcugacagagagcaacaagaaguuccugccauuccagcaguuuggccgggauaucgccgauaccacagacgccguuagagauccccagacacuggaaauccuggacaucaccccuugcagcuucggcggagugucugugaucaccccuggcaccaacaccagcaaucagguggcagugcuguaccagggcgugaacuguaccgaagugcccguggccauucacgccgaucagcugacaccuacauggcggguguacuccaccggcagcaauguguuucagaccagagccggcugucugaucggagccgaguacgugaacaauagcuacgagugcgacauccccaucggcgcuggaaucugcgccagcuaccagacacagacaaacagcccucggagagccagaagcguggccagccagagcaucauugccuacacaaugucucugggcgccgagaacagcguggccuacuccaacaacucuaucgcuauccccaccaacuucaccaucagcgugaccacagagauccugccuguguccaugaccaagaccagcguggacugcaccauguacaucugcggcgauuccaccgagugcuccaaccugcugcugcaguacggcagcuucugcacccagcugaauagagcccugacagggaucgccguggaacaggacaagaacacccaagagguguucgcccaagugaagcagaucuacaagaccccuccuaucaaggacuucggcggcuucaauuucagccagauucugcccgauccuagcaagcccagcaagcggagcuucaucgaggaccugcuguucaacaaagugacacuggccgacgccggcuucaucaagcaguauggcgauugucugggcgacauugccgccagggaucugauuugcgcccagaaguuuaacggacugacagugcugccuccucugcugaccgaugagaugaucgcccaguacacaucugcccugcuggccggcacaaucacaagcggcuggacauuuggagcaggcgccgcucugcagauccccuuugcuaugcagauggccuaccgguucaacggcaucggagugacccagaaugugcuguacgagaaccagaagcugaucgccaaccaguucaacagcgccaucggcaagauccaggacagccugagcagcacagcaagcgcccugggaaagcugcaggacguggucaaccagaaugcccaggcacugaacacccuggucaagcagcuguccuccaacuucggcgccaucagcucugugcugaacgauauccugagcagacuggacccuccugaggccgaggugcagaucgacagacugaucacaggcagacugcagagccuccagacauacgugacccagcagcugaucagagccgccgagauuagagccucugccaaucuggccgccaucaagaugucugagugugugcugggccagagcaagagaguggacuuuugcggcaagggcuaccaccugaugagcuucccucagucugccccucacggcgugguguuucugcacgugacauaugugcccgcucaagagaagaauuucaccaccgcuccagccaucugccacgacggcaaagcccacuuuccuagagaaggcguguucguguccaacggcacccauugguucgugacacagcggaacuucuacgagccccagaucaucaccaccgacaacaccuucgugucuggcaacugcgacgucgugaucggcauugugaacaauaccguguacgacccucugcagcccgagcuggacagcuucaaagaggaacuggacaaguacuuuaagaaccacacaagccccgacguggaccugggcgauaucagcggaaucaaugccagcgucgugaacauccagaaagagaucgaccggcugaacgagguggccaagaaucugaacgagagccugaucgaccugcaagaacuggggaaguacgagcaguacaucaaguggcccugguacaucuggcugggcuuuaucgccggacugauugccaucgugauggucacaaucaugcuguguugcaugaccagcugcuguagcugccugaagggcuguuguagcuguggcagcugcugcaaguucgacgaggacgauucugagcccgugcugaagggcgugaaacugcacuacacaugaugacucgagcugguacugcaugcacgcaaugcuagcugccccuuucccguccuggguaccccgagucucccccgaccucgggucccagguaugcucccaccuccaccugccccacucaccaccucugcuaguuccagacaccucccaagcacgcagcaaugcagcucaaaacgcuuagccuagccacacccccacgggaaacagcagugauuaaccuuuagcaauaaacgaaaguuuaacuaagcuauacuaaccccaggguuggucaauuucgugccagccacacccuggagcuagcaaaaaaaaaaaaaaaaaaaaaaaaaaaaaagcauaugacuaaaaaaaaaaaaaaaaaaaaaaaaaaaaaaaaaaaaaaaaaaaaaaaaaaaaaaaaaaaaaaaaaaaaaa
